(19) United States
(12) Patent Application Publication
(10) Pub. No.: US 2007/0185017 A1
(43) Pub. Date: Aug. 9, 2007

(54) Compositions and methods for the treatment of immune related diseases

(75) Inventors: Sudeepta Aggarwal, North Potomac, MD (US); Hilary Clark, San Francisco, CA (US); Austin L. Gurney, San Francisco, CA (US); Jill R. Schoenfeld, Ashland, OR (US); P. Mickey Williams, Half Moon Bay, CA (US); William I. Wood, Cupertino, CA (US); Thomas D. Wu, San Francisco, CA (US)

Correspondence Address: GENENTECH, INC., 1 DNA WAY, SOUTH SAN FRANCISCO, CA, 94080, US

(73) Assignee: Genentech, Inc., South San Francisco, CA (US)

(21) Appl. No.: 10/533,069

(22) PCT Filed: Oct. 28, 2003
(86) PCT No.: PCT/US03/34381

§ 371 Date: Jan. 3, 2007

Related U.S. Application Data
(60) Provisional application No. 60/422,472, filed on Oct. 29, 2002.

(51) Int. Cl. A61K 38/17; C07K 14/47; C07K 16/18; C12P 21/06; C12N 9/00

(52) U.S. Cl. 514/12; 530/350; 530/388.1; 435/69.1; 435/183; 435/320.1; 435/325

(57) ABSTRACT

The present invention relates to compositions containing novel proteins and methods of using those compositions for the diagnosis and treatment of immune related diseases.

### FIELD OF THE INVENTION

[0001] The present invention relates to compositions and methods useful for the diagnosis and treatment of immune related diseases.

### BACKGROUND OF THE INVENTION

[0002] Immune related and inflammatory diseases are the manifestation or consequence of fairly complex, often multiple interconnected biological pathways which in normal physiology are critical to respond to insult or injury, initiate repair from insult or injury, and mount innate and acquired defense against foreign organisms. Disease or pathology occurs when these normal physiological pathways cause additional insult or injury either as directly related to the intensity of the response, as a consequence of abnormal regulation or excessive stimulation, as a reaction to self, or as a combination of these.

[0003] Though the genesis of these diseases often involves multistep pathways and often multiple different biological systems/pathways, intervention at critical points in one or more of these pathways can have an ameliorative or therapeutic effect. Therapeutic intervention can occur by either antagonism of a detrimental process/pathway or stimulation of a beneficial process/pathway.

[0004] Many immune related diseases are known and have been extensively studied. Such diseases include immune-mediated inflammatory diseases, non-immune-mediated inflammatory diseases, infectious diseases, immunodeficiency diseases, neoplasia, etc.

[0005] T lymphocytes (T cells) are an important component of a mammalian immune response. T cells recognize antigens which are associated with a self-molecule encoded by genes within the major histocompatibility complex (MHC). The antigen may be displayed together with MHC molecules on the surface of antigen presenting cells, virus infected cells, cancer cells, grafts, etc. The T cell system eliminates these altered cells which pose a health threat to the host mammal. T cells include helper T cells and cytotoxic T cells. Helper T cells proliferate extensively following recognition of an antigen-MHC complex on an antigen presenting cell. Helper T cells also secrete a variety of cytokines, i.e., lymphokines, which play a central role in the activation of B cells, cytotoxic T cells and a variety of other cells which participate in the immune response.

[0006] Immune related diseases could be treated by suppressing the immune response. Using neutralizing antibodies that inhibit molecules having immune stimulatory activity would be beneficial in the treatment of immune-mediated and inflammatory diseases. Molecules which inhibit the immune response can be utilized (proteins directly or via the use of antibody agonists) to inhibit the immune response and thus ameliorate immune related disease.

[0007] T cells play a central role in host defense. T cells are able to modulate the immune response of other cell lineages through the production of a variety of cytokines and immune modulatory molecules. In addition they are responsible for surveying cells throughout the organism for the presence of non-self. This highly sophisticated process utilizes the T cell receptor (TCR), which is able to recognize and discriminate between self and non-self peptides displayed by the MHC complex on other cells. This process also integrates co-stimulatory signals that provide additional information to the T cell about the nature of the potential non-self threat. These two signals, the TCR signal and the co-stimulatory signal can be experimentally triggered by use of agonist antibodies such as certain antibodies to the T cell receptor component CD3, and the co-stimulatory receptor CD28. While T cells are essential components of normal immune function, it is believed that inappropriate T cell function underlies many very serious medical conditions including autoimmune disease. Diseases that are impacted by pathologic T cell function are thought to include asthma, arthritis, psoriasis, multiple sclerosis, inflammatory bowel disease, diabetes, graft versus host disease and many others. In these diseases the portion of the T cell repertoire that has a “memory” phenotype is thought to contribute to the disease pathology. It is therefore of great importance to understand the molecular events that occur upon activation of memory T cells. In humans, memory T cells can be identified through the use of the antigen CD45RO which is expressed on memory T cells but not on resting naïve T cells. The use of DNA microarrays provides a powerful experimental approach to identify molecular changes that occur upon activation of this critical cell population. Understanding the identity of molecules whose expression is altered upon memory T cell activation can enable therapeutic strategies that target the pathways impacted by these alterations in gene expression. Such therapeutic strategies can include the use of recombinant proteins, soluble receptors, antibodies, peptides, or small molecule drugs.

[0008] Despite the above identified advances in T cell research, there is a great need for additional diagnostic and therapeutic agents capable of detecting the presence of memory T cell mediated disorders in a mammal and for effectively reducing these disorders. Accordingly, it is an objective of the present invention to identify polypeptides that are overexpressed in memory T cells as compared to non-memory T cells, and to use those polypeptides, and their encoding nucleic acids, to produce compositions of matter useful in the therapeutic treatment and diagnostic detection of memory T cell mediated disorders in mammals.

### SUMMARY OF THE INVENTION

### A. Embodiments

[0009] The present invention concerns compositions and methods useful for the diagnosis and treatment of immune related disease in mammals, including humans. The present invention is based on the identification of proteins (including agonist and antagonist antibodies) which are a result of stimulation of the immune response in mammals. Immune related diseases can be treated by suppressing or enhancing the immune response. Molecules that enhance the immune response stimulate or potentiate the immune response to an antigen. Molecules which stimulate the immune response can be used therapeutically where enhancement of the immune response would be beneficial. Alternatively, molecules that suppress the immune response attenuate or reduce the immune response to an antigen (e.g., neutralizing antibodies) can be used therapeutically where attenuation of the immune response would be beneficial (e.g., inflammation). Accordingly, the PRO polypeptides, agonists and antagonists thereof are also useful to prepare medicines and medicaments for the treatment of immune-related and inflammatory diseases. In a specific aspect, such medicines and medicaments comprise a therapeutically effective amount of a PRO polypeptide, agonist or antagonist thereof with a pharmaceutically acceptable carrier. Preferably, the admixture is sterile.

[0010] In a further embodiment, the invention concerns a method of identifying agonists or antagonists to a PRO polypeptide which comprises contacting the PRO polypeptide with a candidate molecule and monitoring a biological activity mediated by said PRO polypeptide. Preferably, the PRO polypeptide is a native sequence PRO polypeptide. In a specific aspect, the PRO agonist or antagonist is an anti-PRO antibody.

[0011] In another embodiment, the invention concerns a composition of matter comprising a PRO polypeptide or an agonist or antagonist antibody which binds the polypeptide in admixture with a carrier or excipient. In one aspect, the composition comprises a therapeutically effective amount of the polypeptide or antibody. In another aspect, when the composition comprises an immune stimulating molecule, the composition is useful for: (a) increasing infiltration of inflammatory cells into a tissue of a mammal in need thereof, (b) stimulating or enhancing an immune response in a mammal in need thereof, (c) increasing the proliferation of T-lymphocytes in a mammal in need thereof in response to an antigen, (d) stimulating the activity of T-lymphocytes or (e) increasing the vascular permeability. In a further aspect, when the composition comprises an immune inhibiting molecule, the composition is useful for: (a) decreasing infiltration of inflammatory cells into a tissue of a mammal in need thereof, (b) inhibiting or reducing an immune response in a mammal in need thereof, (c) decreasing the activity of T-lymphocytes or (d) decreasing the proliferation of T-lymphocytes in a mammal in need thereof in response to an antigen. In another aspect, the composition comprises a further active ingredient, which may, for example, be a further antibody or a cytotoxic or chemotherapeutic agent. Preferably, the composition is sterile.

[0012] In another embodiment, the invention concerns a method of treating an immune related disorder in a mammal in need thereof, comprising administering to the mammal an effective amount of a PRO polypeptide, an agonist thereof, or an antagonist thereto. In a preferred aspect, the immune related disorder is selected from the group consisting of: systemic lupus erythematosis, rheumatoid arthritis, osteoarthritis, juvenile chronic arthritis, spondyloarthropathies, systemic sclerosis, idiopathic inflammatory myopathies, Sjögren's syndrome, systemic vasculitis, sarcoidosis, autoimmune hemolytic anemia, autoimmune thrombocytopenia, thyroiditis, diabetes mellitus, immune-mediated renal disease, demyelinating diseases of the central and peripheral nervous systems such as multiple sclerosis, idiopathic demyelinating polyneuropathy or Guillain-Barré syndrome, and chronic inflammatory demyelinating polyneuropathy, hepatobiliary diseases such as infectious, autoimmune chronic active hepatitis, primary biliary cirrhosis, granulomatous hepatitis, and sclerosing cholangitis, inflammatory bowel disease, gluten-sensitive enteropathy, and Whipple's disease, autoimmune or immune-mediated skin diseases including bullous skin diseases, erythema multiforme and contact dermatitis, psoriasis, allergic diseases such as asthma, allergic rhinitis, atopic dermatitis, food hypersensitivity and urticaria, immunologic diseases of the lung such as eosinophilic pneumonias, idiopathic pulmonary fibrosis and hypersensitivity pneumonitis, transplantation associated diseases including graft rejection and graft-versus-host-disease.

[0013] In another embodiment, the invention provides an antibody which specifically binds to any of the above or below described polypeptides. Optionally, the antibody is a monoclonal antibody, humanized antibody, antibody fragment or single-chain antibody. In one aspect, the present invention concerns an isolated antibody which binds a PRO polypeptide. In another aspect, the antibody mimics the activity of a PRO polypeptide (an agonist antibody) or conversely the antibody inhibits or neutralizes the activity of a PRO polypeptide (an antagonist antibody). In another aspect, the antibody is a monoclonal antibody, which preferably has nonhuman complementarity determining region (CDR) residues and human framework region (FR) residues. The antibody may be labeled and may be immobilized on a solid support. In a further aspect, the antibody is an antibody fragment, a monoclonal antibody, a single-chain antibody, or an anti-idiotypic antibody.

[0014] In yet another embodiment, the present invention provides a composition comprising an anti-PRO antibody in admixture with a pharmaceutically acceptable carrier. In one aspect, the composition comprises a therapeutically effective amount of the antibody. Preferably, the composition is sterile. The composition may be administered in the form of a liquid pharmaceutical formulation, which may be preserved to achieve extended storage stability. Alternatively, the antibody is a monoclonal antibody, an antibody fragment, a humanized antibody, or a single-chain antibody.

[0015] In a further embodiment, the invention concerns an article of manufacture, comprising:

[0016] (a) a composition of matter comprising a PRO polypeptide or agonist or antagonist thereof;

[0017] (b) a container containing said composition; and

[0018] (c) a label affixed to said container, or a package insert included in said container referring to the use of said PRO polypeptide or agonist or antagonist thereof in the treatment of an immune related disease. The composition may comprise a therapeutically effective amount of the PRO polypeptide or the agonist or antagonist thereof.

[0019] In yet another embodiment, the present invention concerns a method of diagnosing an immune related disease in a mammal, comprising detecting the level of expression of a gene encoding a PRO polypeptide (a) in a test sample of tissue cells obtained from the mammal, and (b) in a control sample of known normal tissue cells of the same cell type, wherein a higher or lower expression level in the test sample as compared to the control sample indicates the presence of immune related disease in the mammal from which the test tissue cells were obtained.

[0020] In another embodiment, the present invention concerns a method of diagnosing an immune disease in a mammal, comprising (a) contacting an anti-PRO antibody with a test sample of tissue cells obtained from the mammal, and (b) detecting the formation of a complex between the antibody and a PRO polypeptide, in the test sample; wherein the formation of said complex is indicative of the presence or absence of said disease. The detection may be qualitative or quantitative, and may be performed in comparison with monitoring the complex formation in a control sample of known normal tissue cells of the same cell type. A larger quantity of complexes formed in the test sample indicates the presence or absence of an immune disease in the mammal from which the test tissue cells were obtained. The antibody preferably carries a detectable label. Complex formation can be monitored, for example, by light microscopy, flow cytometry, fluorimetry, or other techniques known in the art. The test sample is usually obtained from an individual suspected of having a deficiency or abnormality of the immune system.

[0021] In another embodiment, the invention provides a method for determining the presence of a PRO polypeptide in a sample comprising exposing a test sample of cells suspected of containing the PRO polypeptide to an anti-PRO antibody and determining the binding of said antibody to said cell sample. In a specific aspect, the sample comprises a cell suspected of containing the PRO polypeptide and the antibody binds to the cell. The antibody is preferably detectably labeled and/or bound to a solid support.

[0022] In another embodiment, the present invention concerns an immune-related disease diagnostic kit, comprising an anti-PRO antibody and a carrier in suitable packaging. The kit preferably contains instructions for using the antibody to detect the presence of the PRO polypeptide. Preferably the carrier is pharmaceutically acceptable.

[0023] In another embodiment, the present invention concerns a diagnostic kit, containing an anti-PRO antibody in suitable packaging. The kit preferably contains instructions for using the antibody to detect the PRO polypeptide.

[0024] In another embodiment, the invention provides a method of diagnosing an immune-related disease in a mammal which comprises detecting the presence or absence or a PRO polypeptide in a test sample of tissue cells obtained from said mammal, wherein the presence or absence of the PRO polypeptide in said test sample is indicative of the presence of an immune-related disease in said mammal.

[0025] In another embodiment, the present invention concerns a method for identifying an agonist of a PRO polypeptide comprising:

[0026] (a) contacting cells and a test compound to be screened under conditions suitable for the induction of a cellular response normally induced by a PRO polypeptide; and

[0027] (b) determining the induction of said cellular response to determine if the test compound is an effective agonist, wherein the induction of said cellular response is indicative of said test compound being an effective agonist.

[0028] In another embodiment, the invention concerns a method for identifying a compound capable of inhibiting the activity of a PRO polypeptide comprising contacting a candidate compound with a PRO polypeptide under conditions and for a time sufficient to allow these two components to interact and determining whether the activity of the PRO polypeptide is inhibited. In a specific aspect, either the candidate compound or the PRO polypeptide is immobilized on a solid support. In another aspect, the non-immobilized component carries a detectable label. In a preferred aspect, this method comprises the steps of:

[0029] (a) contacting cells and a test compound to be screened in the presence of a PRO polypeptide under conditions suitable for the induction of a cellular response normally induced by a PRO polypeptide; and

[0030] (b) determining the induction of said cellular response to determine if the test compound is an effective antagonist.

[0031] In another embodiment, the invention provides a method for identifying a compound that inhibits the expression of a PRO polypeptide in cells that normally express the polypeptide, wherein the method comprises contacting the cells with a test compound and determining whether the expression of the PRO polypeptide is inhibited. In a preferred aspect, this method comprises the steps of:

[0032] (a) contacting cells and a test compound to be screened under conditions suitable for allowing expression of the PRO polypeptide; and

[0033] (b) determining the inhibition of expression of said polypeptide.

[0034] In yet another embodiment, the present invention concerns a method for treating an immune-related disorder in a mammal that suffers therefrom comprising administering to the mammal a nucleic acid molecule that codes for either (a) a PRO polypeptide, (b) an agonist of a PRO polypeptide or (c) an antagonist of a PRO polypeptide, wherein said agonist or antagonist may be an anti-PRO antibody. In a preferred embodiment, the mammal is human. In another preferred embodiment, the nucleic acid is administered via ex vivo gene therapy. In a further preferred embodiment, the nucleic acid is comprised within a vector, more preferably an adenoviral, adeno-associated viral, lentiviral or retroviral vector.

[0035] In yet another aspect, the invention provides a recombinant viral particle comprising a viral vector consisting essentially of a promoter, nucleic acid encoding (a) a PRO polypeptide, (b) an agonist polypeptide of a PRO polypeptide, or (c) an antagonist polypeptide of a PRO polypeptide, and a signal sequence for cellular secretion of the polypeptide, wherein the viral vector is in association with viral structural proteins. Preferably, the signal sequence is from a mammal, such as from a native PRO polypeptide.

[0036] In a still further embodiment, the invention concerns an ex vivo producer cell comprising a nucleic [symbol] construct that expresses retroviral structural proteins and also comprises a retroviral vector consisting [symbol] ually of a promoter, nucleic acid encoding (a) a PRO polypeptide, (b) an agonist polypeptide of a PRO [symbol] peptide or (c) an antagonist polypeptide of a PRO polypeptide, and a signal sequence for cellular [symbol] tion of the polypeptide, wherein said producer cell packages the retroviral vector in association with the [symbol] ural proteins to produce recombinant retroviral particles.

[0037] In a still further embodiment, the invention provides a method of increasing the activity of T-lymphocytes in a mammal comprising administering to said mammal (a) a PRO polypeptide, (b) an agonist of a PRO polypeptide, or (c) an antagonist of a PRO polypeptide, wherein the activity of T-lymphocytes in the mammal is increased.

[0038] In a still further embodiment, the invention provides a method of decreasing the activity of T-lymphocytes in a mammal comprising administering to said mammal (a) a PRO polypeptide, (b) an agonist of a PRO polypeptide, or (c) an antagonist of a PRO polypeptide, wherein the activity of T-lymphocytes in the mammal is decreased.

[0039] In a still further embodiment, the invention provides a method of increasing the proliferation of T-lymphocytes in a mammal comprising administering to said mammal (a) a PRO polypeptide, (b) an agonist of a PRO polypeptide, or (c) an antagonist of a PRO polypeptide, wherein the proliferation of T-lymphocytes in the mammal is increased.

[0040] In a still further embodiment, the invention provides a method of decreasing the proliferation of T-lymphocytes in a mammal comprising administering to said mammal (a) a PRO polypeptide, (b) an agonist of a PRO polypeptide, or (c) an antagonist of a PRO polypeptide, wherein the proliferation of T-lymphocytes in the mammal is decreased.

### B. Additional Embodiments

[0041] In other embodiments of the present invention, the invention provides vectors comprising DNA encoding any of the herein described polypeptides. Host cell comprising any such vector are also provided. By way of example, the host cells may be CHO cells, E. coli, or yeast. A process for producing any of the herein described polypeptides is further provided and comprises culturing host cells under conditions suitable for expression of the desired polypeptide and recovering the desired polypeptide from the cell culture.

[0042] In other embodiments, the invention provides chimeric molecules comprising any of the herein described polypeptides fused to a heterologous polypeptide or amino acid sequence. Example of such chimeric molecules comprise any of the herein described polypeptides fused to an epitope tag sequence or a Fc region of an immunoglobulin.

[0043] In another embodiment, the invention provides an antibody which specifically binds to any of the above or below described polypeptides. Optionally, the antibody is a monoclonal antibody, humanized antibody, antibody fragment or single-chain antibody.

[0044] In yet other embodiments, the invention provides oligonucleotide probes useful for isolating genomic and cDNA nucleotide sequences or as antisense probes, wherein those probes may be derived from any of the above or below described nucleotide sequences.

[0045] In other embodiments, the invention provides an isolated nucleic acid molecule comprising a nucleotide sequence that encodes a PRO polypeptide.

[0046] In one aspect, the isolated nucleic acid molecule comprises a nucleotide sequence having at least about 80% nucleic acid sequence identity, alternatively at least about 81% nucleic acid sequence identity, alternatively at least about 82% nucleic acid sequence identity, alternatively at least about 83% nucleic acid sequence identity, alternatively at least about 84% nucleic acid sequence identity, alternatively at least about 85% nucleic acid sequence identity, alternatively at least about 86% nucleic acid sequence identity, alternatively at least about 87% nucleic acid sequence identity, alternatively at least about 88% nucleic acid sequence identity, alternatively at least about 89% nucleic acid sequence identity, alternatively at least about 90% nucleic acid sequence identity, alternatively at least about 91% nucleic acid sequence identity, alternatively at least about 92% nucleic acid sequence identity, alternatively at least about 93% nucleic acid sequence identity, alternatively at least about 94% nucleic acid sequence identity, alternatively at least about 95% nucleic acid sequence identity, alternatively at least about 96% nucleic acid sequence identity, alternatively at least about 97% nucleic acid sequence identity, alternatively at least about 98% nucleic acid sequence identity and alternatively at least about 99% nucleic acid sequence identity to (a) a DNA molecule encoding a PRO polypeptide having a full-length amino acid sequence as disclosed herein, an amino acid sequence lacking the signal peptide as disclosed herein, an extracellular domain of a transmembrane protein, with or without the signal peptide, as disclosed herein or any other specifically defined fragment of the full-length amino acid sequence as disclosed herein, or (b) the complement of the DNA molecule of (a).

[0047] In other aspects, the isolated nucleic acid molecule comprises a nucleotide sequence having at least about 80% nucleic acid sequence identity, alternatively at least about 81% nucleic acid sequence identity, alternatively at least about 82% nucleic acid sequence identity, alternatively at least about 83% nucleic acid sequence identity, alternatively at least about 84% nucleic acid sequence identity, alternatively at least about 85% nucleic acid sequence identity, alternatively at least about 86% nucleic acid sequence identity, alternatively at least about 87% nucleic acid sequence identity, alternatively at least about 88% nucleic acid sequence identity, alternatively at least about 89% nucleic acid sequence identity, alternatively at least about 90% nucleic acid sequence identity, alternatively at least about 91% nucleic acid sequence identity, alternatively at least about 92% nucleic acid sequence identity, alternatively at least about 93% nucleic acid sequence identity, alternatively at least about 94% nucleic acid sequence identity, alternatively at least about 95% nucleic acid sequence identity, alternatively at least about 96% nucleic acid sequence identity, alternatively at least about 97% nucleic acid sequence identity, alternatively at least about 98% nucleic acid sequence identity and alternatively at least about 99% nucleic acid sequence identity to (a) a DNA molecule comprising the coding sequence of a full-length PRO polypeptide cDNA as disclosed herein, the coding sequence of a PRO polypeptide lacking the signal peptide as disclosed herein, the coding sequence of an extracellular domain of a transmembrane PRO polypeptide, with or without the signal peptide, as disclosed herein or the coding sequence of any other specifically defined fragment of the full-length amino acid sequence as disclosed herein, or (b) the complement of the DNA molecule of (a).

[0048] In a further aspect, the invention concerns an isolated nucleic acid molecule comprising a nucleotide sequence having at least about 80% nucleic acid sequence identity, alternatively at least about 81% nucleic acid sequence identity, alternatively at least about 82% nucleic acid sequence identity, alternatively at least about 83% nucleic acid sequence identity, alternatively at least about 84% nucleic acid sequence identity, alternatively at least about 85% nucleic acid sequence identity, alternatively at least about 86% nucleic acid sequence identity, alternatively at least about 87% nucleic acid sequence identity, alternatively at least about 88% nucleic acid sequence identity, alternatively at least about 89% nucleic acid sequence identity, alternatively at least about 90% nucleic acid sequence identity, alternatively at least about 91% nucleic acid sequence identity, alternatively at least about 92% nucleic acid sequence identity, alternatively at least about 93% nucleic acid sequence identity, alternatively at least about 94% nucleic acid sequence identity, alternatively at least about 95% nucleic acid sequence identity, alternatively at least about 96% nucleic acid sequence identity, alternatively at least about 97% nucleic acid sequence identity, alternatively at least about 98% nucleic acid sequence identity and alternatively at least about 99% nucleic acid sequence identity to (a) a DNA molecule that encodes the same mature polypeptide encoded by any of the human protein cDNAs as disclosed herein, or (b) the complement of the DNA molecule of (a).

[0049] Another aspect the invention provides an isolated nucleic acid molecule comprising a nucleotide sequence encoding a PRO polypeptide which is either transmembrane domain-deleted or transmembrane domain-inactivated, or is complementary to such encoding nucleotide sequence, wherein the transmembrane domain(s) of such polypeptide are disclosed herein. Therefore, soluble extracellular domains of the herein described PRO polypeptides are contemplated.

[0050] Another embodiment is directed to fragments of a PRO polypeptide coding sequence, or the complement thereof, that may find use as, for example, hybridization probes, for encoding fragments of a PRO polypeptide that may optionally encode a polypeptide comprising a binding site for an anti-PRO antibody or as antisense oligonucleotide probes. Such nucleic acid fragments are usually at least about 20 nucleotides in length, alternatively at least about 30 nucleotides in length, alternatively at least about 40 nucleotides in length, alternatively at least about 50 nucleotides in length, alternatively at least about 60 nucleotides in length, alternatively at least about 70 nucleotides in length, alternatively at least about 80 nucleotides in length, alternatively at least about 90 nucleotides in length, alternatively at least about 100 nucleotides in length, alternatively at least about 110 nucleotides in length, alternatively at least about 120 nucleotides in length, alternatively at least about 130 nucleotides in length, alternatively at least about 140 nucleotides in length, alternatively at least about 150 nucleotides in length, alternatively at least about 160 nucleotides in length, alternatively at least about 170 nucleotides in length, alternatively at least about 180 nucleotides in length, alternatively at least about 190 nucleotides in length, alternatively at least about 200 nucleotides in length, alternatively at least about 250 nucleotides in length, alternatively at least about 300 nucleotides in length, alternatively at least about 350 nucleotides in length, alternatively at least about 400 nucleotides in length, alternatively at least about 450 nucleotides in length, alternatively at least about 500 nucleotides in length, alternatively at least about 600 nucleotides in length, alternatively at least about 700 nucleotides in length, alternatively at least about 800 nucleotides in length, alternatively at least about 900 nucleotides in length and alternatively at least about 1000 nucleotides in length, wherein in this context the term “about” means the referenced nucleotide sequence length plus or minus 10% of that referenced length. It is noted that novel fragments of a PRO polypeptide-encoding nucleotide sequence may be determined in a routine manner by aligning the PRO polypeptide-encoding nucleotide sequence with other known nucleotide sequences using any of a number of well known sequence alignment programs and determining which PRO polypeptide-encoding nucleotide sequence fragment(s) are novel. All of such PRO polypeptide-encoding nucleotide sequences are contemplated herein. Also contemplated are the PRO polypeptide fragments encoded by these nucleotide molecule fragments, preferably those PRO polypeptide fragments that comprise a binding site for an anti-PRO antibody.

[0051] In another embodiment, the invention provides isolated PRO polypeptide encoded by any of the isolated nucleic acid sequences herein above identified.

[0052] In a certain aspect, the invention concerns an isolated PRO polypeptide, comprising an amino acid sequence having at least about 80% amino acid sequence identity, alternatively at least about 81% amino acid sequence identity, alternatively at least about 82% amino acid sequence identity, alternatively at least about 83% amino acid sequence identity, alternatively at least about 84% amino acid sequence identity, alternatively at least about 85% amino acid sequence identity, alternatively at least about 86% amino acid sequence identity, alternatively at least about 87% amino acid sequence identity, alternatively at least about 88% amino acid sequence identity, alternatively at least about 89% amino acid sequence identity, alternatively at least about 90% amino acid sequence identity, alternatively at least about 91% amino acid sequence identity, alternatively at least about 92% amino acid sequence identity, alternatively at least about 93% amino acid sequence identity, alternatively at least about 94% amino acid sequence identity, alternatively at least about 95% amino acid sequence identity, alternatively at least about 96% amino acid sequence identity, alternatively at least about 97% amino acid sequence identity, alternatively at least about 98% amino acid sequence identity and alternatively at least about 99% amino acid sequence identity to a PRO polypeptide having a full-length amino acid sequence as disclosed herein, an amino acid sequence lacking the signal peptide as disclosed herein, an extracellular domain of a transmembrane protein, with or without the signal peptide, as disclosed herein or any other specifically defined fragment of the full-length amino acid sequence as disclosed herein.

[0053] In a further aspect, the invention concerns an isolated PRO polypeptide comprising an amino acid sequence having at least about 80% amino acid sequence identity, alternatively at least about 81% amino acid sequence identity, alternatively at least about 82% amino acid sequence identity, alternatively at least about 83% amino acid sequence identity, alternatively at least about 84% amino acid sequence identity, alternatively at least about 85% amino acid sequence identity, alternatively at least about 86% amino acid sequence identity, alternatively at least about 87% amino acid sequence identity, alternatively at least about 88% amino acid sequence identity, alternatively at least about 89% amino acid sequence identity, alternatively at least about 90% amino acid sequence identity, alternatively at least about 91% amino acid sequence identity, alternatively at least about 92% amino acid sequence identity, alternatively at least about 93% amino acid sequence identity, alternatively at least about 94% amino acid sequence identity, alternatively at least about 95% amino acid sequence identity, alternatively at least about 96% amino acid sequence identity, alternatively at least about 97% amino acid sequence identity, alternatively at least about 98% amino acid sequence identity and alternatively at least about 99% amino acid sequence identity to an amino acid sequence encoded by any of the human protein cDNAs as disclosed herein.

[0054] In a specific aspect, the invention provides an isolated PRO polypeptide without the N-terminal signal sequence and/or the initiating methionine and is encoded by a nucleotide sequence that encodes such an amino acid sequence as herein before described. Processes for producing the same are also herein described, wherein those processes comprise culturing a host cell comprising a vector which comprises the appropriate encoding nucleic acid molecule under conditions suitable for expression of the PRO polypeptide and recovering the PRO polypeptide from the cell culture.

[0055] Another aspect the invention provides an isolated PRO polypeptide which is either transmembrane domain-deleted or transmembrane domain-inactivated. Processes for producing the same are also herein described, wherein those processes comprise culturing a host cell comprising a vector which comprises the appropriate encoding nucleic acid molecule under conditions suitable for expression of the PRO polypeptide and recovering the PRO polypeptide from the cell culture.

[0056] In yet another embodiment, the invention concerns agonists and antagonists of a native PRO polypeptide as defined herein. In a particular embodiment, the agonist or antagonist is an anti-PRO antibody or a small molecule.

[0057] In a further embodiment, the invention concerns a method of identifying agonists or antagonists to a PRO polypeptide which comprise contacting the PRO polypeptide with a candidate molecule and monitoring a biological activity mediated by said PRO polypeptide. Preferably, the PRO polypeptide is a native PRO polypeptide.

[0058] In a still further embodiment, the invention concerns a composition of matter comprising a PRO polypeptide, or an agonist or antagonist of a PRO polypeptide as herein described, or an anti-PRO antibody, in combination with a carrier. Optionally, the carrier is a pharmaceutically acceptable carrier.

[0059] Another embodiment of the present invention is directed to the use of a PRO polypeptide, or an agonist or antagonist thereof as herein before described, or an anti-PRO antibody, for the preparation of a medicament useful in the treatment of a condition which is responsive to the PRO polypeptide, an agonist or antagonist thereof or an anti-PRO antibody.

### BRIEF DESCRIPTION OF THE DRAWINGS

[0060] The FIGS. 1-2442 show the nucleic acids of the invention and their encoded PRO polypeptides.

[0061] FIG. 1 shows a nucleotide sequence (SEQ ID NO:1) of a native sequence PRO84739 cDNA, wherein SEQ ID NO:1 is a clone designated herein as “DNA329084”.

[0062] FIG. 2 shows the amino acid sequence (SEQ ID NO:2) derived from the coding sequence of SEQ ID NO:1 shown in FIG. 1.

[0063] FIG. 3 shows a nucleotide sequence (SEQ ID NO:3) of a native sequence PRO61679 cDNA, wherein SEQ ID NO3: is a clone designated herein as “DNA273712”.

[0064] FIG. 4 shows the amino acid sequence (SEQ ID NO:4) derived from the coding sequence of SEQ ID NO:3 shown in FIG. 3.

[0065] FIG. 5 shows a nucleotide sequence (SEQ ID NO:5) of a native sequence PRO83580 cDNA, wherein SEQ ID NO5: is a clone designated herein as “DNA327535”.

[0066] FIG. 6 shows the amino acid sequence (SEQ ID NO:6) derived from the coding sequence of SEQ ID NO5: shown in FIG. 5.

[0067] FIG. 7 shows a nucleotide sequence (SEQ ID NO:7) of a native sequence PRO60800 cDNA, wherein SEQ ID NO: is a clone designated herein as “DNA326466”.

[0068] FIG. 8 shows the amino acid sequence (SEQ ID NO:8) derived from the coding sequence of SEQ ID NO: 7 shown in FIG. 7.

[0069] FIG. 9 shows a nucleotide sequence (SEQ ID NO:9) of a native sequence PRO84740 cDNA, wherein SEQ ID NO:9 is a clone designated herein as “DNA329085”.

[0070] FIG. 10 shows the amino acid sequence (SEQ ID NO:10) derived from the coding sequence of SEQ ID NO:9 shown in FIG. 9.

[0071] FIG. 11 shows a nucleotide sequence (SEQ ID NO:11) of a native sequence PRO84741 cDNA, wherein SEQ ID NO:11 is a clone designated herein as “DNA329086”.

[0072] FIG. 12 shows the amino acid sequence (SEQ ID NO:12) derived from the coding sequence of SEQ ID NO:11 shown in FIG. 11.

[0073] FIG. 13 shows a nucleotide sequence (SEQ ID NO:13) of a native sequence PRO69614 cDNA, wherein SEQ ID NO:13 is a clone designated herein as “DNA329087”.

[0074] FIG. 14 shows the amino acid sequence (SEQ ID NO:14) derived from the coding sequence of SEQ ID NO:13 shown in FIG. 13.

[0075] FIG. 15 shows a nucleotide sequence (SEQ ID NO:15) of a native sequence PRO71125 cDNA, wherein SEQ ID NO:15 is a clone designated herein as “DNA324783”.

[0076] FIG. 16 shows the amino acid sequence (SEQ ID NO:16) derived from the coding sequence of SEQ ID NO:15 shown in FIG. 15.

[0077] FIG. 17 shows a nucleotide sequence (SEQ ID NO:17) of a native sequence PRO40279 cDNA, wherein SEQ ID NO:17 is a clone designated herein as “DNA329088”.

[0078] FIG. 18 shows the amino acid sequence (SEQ ID NO:18) derived from the coding sequence of SEQ ID NO:17 shown in FIG. 17.

[0079] FIG. 19 shows a nucleotide sequence (SEQ ID NO:19) of a native sequence PRO60747 cDNA, wherein SEQ ID NO:19 is a clone designated herein as “DNA272614”.

[0080] FIG. 20 shows the amino acid sequence (SEQ ID NO:20) derived from the coding sequence of SEQ ID NO:19 shown in FIG. 19.

[0081] FIG. 21 shows a nucleotide sequence (SEQ ID NO:21) of a native sequence PRO71106 cDNA, wherein SEQ ID NO:21 is a clone designated herein as “DNA304680”.

[0082] FIG. 22 shows the amino acid sequence (SEQ ID NO:22) derived from the coding sequence of SEQ ID NO:21 shown in FIG. 21.

[0083] FIG. 23 shows a nucleotide sequence (SEQ ID NO:23) of a native sequence PRO37034 cDNA, wherein SEQ ID NO:23 is a clone designated herein as “DNA226571”.

[0084] FIG. 24 shows the amino acid sequence (SEQ ID NO:24) derived from the coding sequence of SEQ ID NO:23 shown in FIG. 23.

[0085] FIG. 25 shows a nucleotide sequence (SEQ ID NO:25) of a native sequence PRO84742 cDNA, % herein SEQ ID NO:25 is a clone designated herein as “DNA329089”.

[0086] FIG. 26 shows the amino acid sequence (SEQ ID NO:26) derived from the coding sequence of SEQ ID NO:25 shown in FIG. 25.

[0087] FIG. 27 shows a nucleotide sequence (SEQ ID NO:27) of a native sequence PRO84743 cDNA, wherein SEQ ID NO:27 is a clone designated herein as “DNA329090”.

[0088] FIG. 28 shows the amino acid sequence (SEQ ID NO:28) derived from the coding sequence of SEQ ID NO:27 shown in FIG. 27.

[0089] FIG. 29 shows a nucleotide sequence (SEQ ID NO:29) of a native sequence PRO22637 cDNA, wherein SEQ ID NO:29 is a clone designated herein as “DNA189703”.

[0090] FIG. 30 shows the amino acid sequence (SEQ ID NO:30) derived from the coding sequence of SEQ ID NO:29 shown in FIG. 29.

[0091] FIG. 31 shows a nucleotide sequence (SEQ ID NO:31) of a native sequence PRO81962 cDNA, wherein SEQ ID NO:31 is a clone designated herein as “DNA325438”.

[0092] FIG. 32 shows the amino acid sequence (SEQ ID NO:32) derived from the coding sequence of SEQ ID NO:31 shown in FIG. 31.

[0093] FIG. 33 shows a nucleotide sequence (SEQ ID NO:33) of a native sequence PRO11997 cDNA, wherein SEQ ID NO:33 is a clone designated herein as “DNA329091”.

[0094] FIG. 34 shows the amino acid sequence (SEQ ID NO:34) derived from the coding sequence of SEQ ID NO:33 shown in FIG. 33.

[0095] FIG. 35 shows a nucleotide sequence (SEQ ID NO:35) of a native sequence PRO59293 cDNA, wherein SEQ ID NO:35 is a clone designated herein as “DNA270963”.

[0096] FIG. 36 shows the amino acid sequence (SEQ ID NO:36) derived from the coding sequence of SEQ ID NO:35 shown in FIG. 35.

[0097] FIG. 37 shows a nucleotide sequence (SEQ ID NO:37) of a native sequence PRO33667 cDNA, wherein SEQ ID NO:37 is a clone designated herein as “DNA210121”.

[0098] FIG. 38 shows the amino acid sequence (SEQ ID NO:38) derived from the coding sequence of SEQ ID NO:37 shown in FIG. 37.

[0099] FIG. 39 shows a nucleotide sequence (SEQ ID NO:39) of a native sequence PRO84744 cDNA, wherein SEQ ID NO:39 is a clone designated herein as “DNA329092”.

[0100] FIG. 40 shows the amino acid sequence (SEQ ID NO:40) derived from the coding sequence of SEQ ID NO:39 shown in FIG. 39.

[0101] FIG. 41 shows a nucleotide sequence (SEQ ID NO:41) of a native sequence PRO49242 cDNA, wherein SEQ ID NO:41 is a clone designated herein as “DNA254127”.

[0102] FIG. 42 shows the amino acid sequence (SEQ ID NO:42) derived from the coding sequence of SEQ ID NO:41 shown in FIG. 41.

[0103] FIG. 43 shows a nucleotide sequence (SEQ ID NO:43) of a native sequence PRO4546 cDNA, wherein SEQ ID NO:43 is a clone designated herein as “DNA103216”.

[0104] FIG. 44 shows the amino acid sequence (SEQ ID NO:44) derived from the coding sequence of SEQ ID NO:43 shown in FIG. 43.

[0105] FIG. 45 shows a nucleotide sequence (SEQ ID NO:45) of a native sequence PRO38028 cDNA, wherein SEQ ID NO:45 is a clone designated herein as “DNA328356”.

[0106] FIG. 46 shows the amino acid sequence (SEQ ID NO:46) derived from the coding sequence of SEQ ID NO:45 shown in FIG. 45.

[0107] FIG. 47 shows a nucleotide sequence (SEQ ID NO:47) of a native sequence PRO65 cDNA, wherein SEQ ID NO:47 is a clone designated herein as “DNA324158”.

[0108] FIG. 48 shows the amino acid sequence (SEQ ID NO:48) derived from the coding sequence of SEQ ID NO:47 shown in FIG. 47.

[0109] FIG. 49 shows a nucleotide sequence (SEQ ID NO:49) of a native sequence PRO84745 cDNA, wherein SEQ ID NO:49 is a clone designated herein as “DNA329093”.

[0110] FIG. 50 shows the amino acid sequence (SEQ ID NO:50) derived from the coding sequence of SEQ ID NO:49 shown in FIG. 49.

[0111] FIG. 51 shows a nucleotide sequence (SEQ ID NO:51) of a native sequence PRO84746 cDNA, wherein SEQ ID NO:51 is a clone designated herein as “DNA329094”.

[0112] FIG. 52 shows the amino acid sequence (SEQ ID NO:52) derived from the coding sequence of SEQ ID NO:51 shown in FIG. 51.

[0113] FIG. 53 shows a nucleotide sequence (SEQ ID NO:53) of a native sequence PRO84223 cDNA, wherein SEQ ID NO:53 is a clone designated herein as “DNA328364”.

[0114] FIG. 54 shows the amino acid sequence (SEQ ID NO:54) derived from the coding sequence of SEQ ID NO:53 shown in FIG. 53.

[0115] FIG. 55 shows a nucleotide sequence (SEQ ID NO:55) of a native sequence PRO84670 cDNA, wherein SEQ ID NO:55 is a clone designated herein as “DNA328966”.

[0116] FIG. 56 shows the amino acid sequence (SEQ ID NO:56) derived from the coding sequence of SEQ ID NO:55 shown in FIG. 55.

[0117] FIG. 57 shows a nucleotide sequence (SEQ ID NO:57) of a native sequence PRO77352 cDNA, wherein SEQ ID NO:57 is a clone designated herein as “DNA329095”.

[0118] FIG. 58 shows the amino acid sequence (SEQ ID NO:58) derived from the coding sequence of SEQ ID NO:57 shown in FIG. 57.

[0119] FIG. 59 shows a nucleotide sequence (SEQ ID NO:59) of a native sequence PRO83815 cDNA, wherein SEQ ID NO:59 is a clone designated herein as “DNA327876”.

[0120] FIG. 60 shows the amino acid sequence (SEQ ID NO:60) derived from the coding sequence of SEQ ID NO:59 shown in FIG. 59.

[0121] FIG. 61 shows a nucleotide sequence (SEQ ID NO:61) of a native sequence PRO12926 cDNA, wherein SEQ ID NO:61 is a clone designated herein as “DNA153752”.

[0122] FIG. 62 shows the amino acid sequence (SEQ ID NO:62) derived from the coding sequence of SEQ ID NO:61 shown in FIG. 61.

[0123] FIG. 63 shows a nucleotide sequence (SEQ ID NO:63) of a native sequence PRO59084 cDNA, wherein SEQ ID NO:63 is a clone designated herein as “DNA270721”.

[0124] FIG. 64 shows the amino acid sequence (SEQ ID NO:64) derived from the coding sequence of SEQ ID NO:63 shown in FIG. 63.

[0125] FIG. 65 shows a nucleotide sequence (SEQ ID NO:65) of a native sequence PRO69520 cDNA, wherein SEQ ID NO:65 is a clone designated herein as “DNA287245”.

[0126] FIG. 66 shows the amino acid sequence (SEQ ID NO:66) derived from the coding sequence of SEQ ID NO:65 shown in FIG. 65.

[0127] FIG. 67 shows a nucleotide sequence (SEQ ID NO:67) of a native sequence PRO71134 cDNA, wherein SEQ ID NO:67 is a clone designated herein as “DNA327532”.

[0128] FIG. 68 shows the amino acid sequence (SEQ ID NO:68) derived from the coding sequence of SEQ ID NO:67 shown in FIG. 67.

[0129] FIG. 69 shows a nucleotide sequence (SEQ ID NO:69) of a native sequence PRO3632 cDNA, wherein SEQ ID NO:69 is a clone designated herein as “DNA97285”.

[0130] FIG. 70 shows the amino acid sequence (SEQ ID NO:70) derived from the coding sequence of SEQ ID NO:69 shown in FIG. 69.

[0131] FIG. 71 shows a nucleotide sequence (SEQ ID NO:71) of a native sequence PRO84747 cDNA, wherein SEQ ID NO:71 is a clone designated herein as “DNA329096”.

[0132] FIG. 72 shows the amino acid sequence (SEQ ID NO:72) derived from the coding sequence of SEQ ID NO:71 shown in FIG. 71.

[0133] FIG. 73 shows a nucleotide sequence (SEQ ID NO:73) of a native sequence PRO37518 cDNA, wherein SEQ ID NO:73 is a clone designated herein as “DNA227055”.

[0134] FIG. 74 shows the amino acid sequence (SEQ ID NO:74) derived from the coding sequence of SEQ ID NO:73 shown in FIG. 73.

[0135] FIG. 75 shows a nucleotide sequence (SEQ ID NO:75) of a native sequence PRO81277 cDNA, wherein SEQ ID NO:75 is a clone designated herein as “DNA324633”.

[0136] FIG. 76 shows the amino acid sequence (SEQ ID NO:76) derived from the coding sequence of SEQ ID NO:75 shown in FIG. 75.

[0137] FIG. 77 shows a nucleotide sequence (SEQ ID NO:77) of a native sequence PRO81277 cDNA, wherein SEQ ID NO:77 is a clone designated herein as “DNA324633”.

[0138] FIG. 78 shows the amino acid sequence (SEQ ID NO:78) derived from the coding sequence of SEQ ID NO:77 shown in FIG. 77.

[0139] FIG. 79 shows a nucleotide sequence (SEQ ID NO:79) of a native sequence PRO70258 cDNA, wherein SEQ ID NO:79 is a clone designated herein as “DNA324058”.

[0140] FIG. 80 shows the amino acid sequence (SEQ ID NO:80) derived from the coding sequence of SEQ ID NO:79 shown in FIG. 79.

[0141] FIG. 81 shows a nucleotide sequence (SEQ ID NO:81) of a native sequence PRO61271 cDNA, wherein SEQ ID NO:81 is a clone designated herein as “DNA327845”.

[0142] FIG. 82 shows the amino acid sequence (SEQ ID NO:82) derived from the coding sequence of SEQ ID NO:81 shown in FIG. 81.

[0143] FIG. 83 shows a nucleotide sequence (SEQ ID NO:83) of a native sequence PRO39268 cDNA, wherein SEQ ID NO:83 is a clone designated herein as “DNA287207”.

[0144] FIG. 84 shows the amino acid sequence (SEQ ID NO:84) derived from the coding sequence of SEQ ID NO:83 shown in FIG. 83.

[0145] FIG. 85 shows a nucleotide sequence (SEQ ID NO:85) of a native sequence PRO84748 cDNA, wherein SEQ ID NO:85 is a clone designated herein as “DNA329097”.

[0146] FIG. 86 shows the amino acid sequence (SEQ ID NO:86) derived from the coding sequence of SEQ ID NO:85 shown in FIG. 85.

[0147] FIG. 87 shows a nucleotide sequence (SEQ ID NO:87) of a native sequence PRO59895 cDNA, wherein SEQ ID NO:87 is a clone designated herein as “DNA271608”.

[0148] FIG. 88 shows the amino acid sequence (SEQ ID NO:88) derived from the coding sequence of SEQ ID NO:87 shown in FIG. 87.

[0149] FIG. 89 shows a nucleotide sequence (SEQ ID NO:89) of a native sequence PRO80773 cDNA, wherein SEQ ID NO:89 is a clone designated herein as “DNA324060”.

[0150] FIG. 90 shows the amino acid sequence (SEQ ID NO:90) derived from the coding sequence of SEQ ID NO:89 shown in FIG. 89.

[0151] FIG. 91 shows a nucleotide sequence (SEQ ID NO:91) of a native sequence PRO69492 cDNA, wherein SEQ ID NO:91 is a clone designated herein as “DNA287211”.

[0152] FIG. 92 shows the amino acid sequence (SEQ ID NO:92) derived from the coding sequence of SEQ ID NO:91 shown in FIG. 91.

[0153] FIG. 93 shows a nucleotide sequence (SEQ ID NO:93) of a native sequence PRO38258 cDNA, wherein SEQ ID NO:93 is a clone designated herein as “DNA227795”.

[0154] FIG. 94 shows the amino acid sequence (SEQ ID NO:94) derived from the coding sequence of SEQ ID NO:93 shown in FIG. 93.

[0155] FIG. 95 shows a nucleotide sequence (SEQ ID NO:95) of a native sequence PRO83005 cDNA, wherein SEQ ID NO:95 is a clone designated herein as “DNA326655”.

[0156] FIG. 96 shows the amino acid sequence (SEQ ID NO:96) derived from the coding sequence of SEQ ID NO:95 shown in FIG. 95.

[0157] FIG. 97 shows a nucleotide sequence (SEQ ID NO:97) of a native sequence PRO84749 cDNA, wherein SEQ ID NO:97 is a clone designated herein as “DNA329098”.

[0158] FIG. 98 shows the amino acid sequence (SEQ ID NO:98) derived from the coding sequence of SEQ ID NO:97 shown in FIG. 97.

[0159] FIG. 99 shows a nucleotide sequence (SEQ ID NO:99) of a native sequence PRO83581 cDNA, wherein SEQ ID NO:99 is a clone designated herein as “DNA327537”.

[0160] FIG. 100 shows the amino acid sequence (SEQ ID NO:100) derived from the coding sequence of SEQ ID NO:99 shown in FIG. 99.

[0161] FIG. 101 shows a nucleotide sequence (SEQ ID NO:101) of a native sequence PRO49642 cDNA, wherein SEQ ID NO:101 is a clone designated herein as “DNA254537”.

[0162] FIG. 102 shows the amino acid sequence (SEQ ID NO:102) derived from the coding sequence of SEQ ID NO:101 shown in FIG. 101.

[0163] FIG. 103 shows a nucleotide sequence (SEQ ID NO:103) of a native sequence PRO49675 cDNA, wherein SEQ ID NO:103 is a clone designated herein as “DNA254572”.

[0164] FIG. 104 shows the amino acid sequence (SEQ ID NO:104) derived from the coding sequence of SEQ ID NO:103 shown in FIG. 103.

[0165] FIG. 105 shows a nucleotide sequence (SEQ ID NO:105) of a native sequence PRO59358 cDNA, wherein SEQ ID NO:105 is a clone designated herein as “DNA271030”.

[0166] FIG. 106 shows the amino acid sequence (SEQ ID NO:106) derived from the coding sequence of SEQ ID NO:105 shown in FIG. 105.

[0167] FIG. 107 shows a nucleotide sequence (SEQ ID NO:107) of a native sequence PRO81477 cDNA, wherein SEQ ID NO:107 is a clone designated herein as “DNA324871”.

[0168] FIG. 108 shows the amino acid sequence (SEQ ID NO:108) derived from the coding sequence of SEQ ID NO:107 shown in FIG. 107.

[0169] FIG. 109 shows a nucleotide sequence (SEQ ID NO:109) of a native sequence PRO80814 cDNA, wherein SEQ ID NO:109 is a clone designated herein as “DNA324107”.

[0170] FIG. 110 shows the amino acid sequence (SEQ ID NO:110) derived from the coding sequence of SEQ ID NO:109 shown in FIG. 109.

[0171] FIG. 111 shows a nucleotide sequence (SEQ ID NO:111) of a native sequence PRO60127 cDNA, wherein SEQ ID NO:111 is a clone designated herein as “DNA329099”.

[0172] FIG. 112 shows the amino acid sequence (SEQ ID NO:112) derived from the coding sequence of SEQ ID NO:111 shown in FIG. 111.

[0173] FIG. 113 shows a nucleotide sequence (SEQ ID NO:113) of a native sequence PRO60127 cDNA, wherein SEQ ID NO:113 is a clone designated herein as “DNA271847”.

[0174] FIG. 114 shows the amino acid sequence (SEQ ID NO:114) derived from the coding sequence of SEQ ID NO:113 shown in FIG. 113.

[0175] FIG. 115 shows a nucleotide sequence (SEQ ID NO:115) of a native sequence PRO69473 cDNA, wherein SEQ ID NO:115 is a clone designated herein as “DNA287187”.

[0176] FIG. 116 shows the amino acid sequence (SEQ ID NO:116) derived from the coding sequence of SEQ ID NO:115 shown in FIG. 115.

[0177] FIG. 117 shows a nucleotide sequence (SEQ ID NO:117) of a native sequence PRO62041 cDNA, wherein SEQ ID NO:117 is a clone designated herein as “DNA274103”.

[0178] FIG. 118 shows the amino acid sequence (SEQ ID NO:118) derived from the coding sequence of SEQ ID NO:117 shown in FIG. 117.

[0179] FIG. 119 shows a nucleotide sequence (SEQ ID NO:119) of a native sequence cDNA, wherein SEQ ID NO:119 is a clone designated herein as “DNA328380”.

[0180] FIG. 120 shows a nucleotide sequence (SEQ ID NO:120) of a native sequence PRO61053 cDNA, wherein SEQ ID NO:120 is a clone designated herein as “DNA272974”.

[0181] FIG. 121 shows the amino acid sequence (SEQ ID NO:121) derived from the coding sequence of SEQ ID NO:120 shown in FIG. 120.

[0182] FIG. 122 shows a nucleotide sequence (SEQ ID NO:122) of a native sequence PRO57298 cDNA, wherein SEQ ID NO:122 is a clone designated herein as “DNA327255”.

[0183] FIG. 123 shows the amino acid sequence (SEQ ID NO:123) derived from the coding sequence of SEQ ID NO:122 shown in FIG. 122.

[0184] FIG. 124 shows a nucleotide sequence (SEQ ID NO:124) of a native sequence PRO38005 cDNA, wherein SEQ ID NO:124 is a clone designated herein as “DNA327540”.

[0185] FIG. 125 shows the amino acid sequence (SEQ ID NO:125) derived from the coding sequence of SEQ ID NO:124 shown in FIG. 124.

[0186] FIG. 126 shows a nucleotide sequence (SEQ ID NO:126) of a native sequence PRO36766 cDNA, wherein SEQ ID NO:126 is a clone designated herein as “DNA287217”.

[0187] FIG. 127 shows the amino acid sequence (SEQ ID NO:127) derived from the coding sequence of SEQ ID NO:126 shown in FIG. 126.

[0188] FIG. 128 shows a nucleotide sequence (SEQ ID NO:128) of a native sequence PRO84750 cDNA, wherein SEQ ID NO:128 is a clone designated herein as “DNA329100”.

[0189] FIG. 129 shows the amino acid sequence (SEQ ID NO:129) derived from the coding sequence of SEQ ID NO:128 shown in FIG. 128.

[0190] FIG. 130 shows a nucleotide sequence (SEQ ID NO:130) of a native sequence PRO82352 cDNA, wherein SEQ ID NO:130 is a clone designated herein as “DNA325896”.

[0191] FIG. 131 shows the amino acid sequence (SEQ ID NO:131) derived from the coding sequence of SEQ ID NO:130 shown in FIG. 130.

[0192] FIG. 132 shows a nucleotide sequence (SEQ ID NO:132) of a native sequence PRO71139 cDNA, wherein SEQ ID NO:132 is a clone designated herein as “DNA304713”.

[0193] FIG. 133 shows the amino acid sequence (SEQ ID NO:133) derived from the coding sequence of SEQ ID NO:132 shown in FIG. 132.

[0194] FIG. 134 shows a nucleotide sequence (SEQ ID NO:134) of a native sequence PRO2907 cDNA, wherein SEQ ID NO:134 is a clone designated herein as “DNA89242”.

[0195] FIG. 135 shows the amino acid sequence (SEQ ID NO:135) derived from the coding sequence of SEQ ID NO:134 shown in FIG. 134.

[0196] FIG. 136 shows a nucleotide sequence (SEQ ID NO:136) of a native sequence PRO84240 cDNA, wherein SEQ ID NO:136 is a clone designated herein as “DNA328388”.

[0197] FIG. 137 shows the amino acid sequence (SEQ ID NO:137) derived from the coding sequence of SEQ ID NO:136 shown in FIG. 136.

[0198] FIG. 138 shows a nucleotide sequence (SEQ ID NO:138) of a native sequence PRO11993 cDNA, wherein SEQ ID NO:138 is a clone designated herein as “DNA151697”.

[0199] FIG. 139 shows the amino acid sequence (SEQ ID NO:139) derived from the coding sequence of SEQ ID NO:138 shown in FIG. 138.

[0200] FIG. 140 shows a nucleotide sequence (SEQ ID NO:140) of a native sequence PRO84751 cDNA, wherein SEQ ID NO:140 is a clone designated herein as “DNA329101”.

[0201] FIG. 141 shows the amino acid sequence (SEQ ID NO:141) derived from the coding sequence of SEQ ID NO:140 shown in FIG. 140.

[0202] FIG. 142 shows a nucleotide sequence (SEQ ID NO:142) of a native sequence PRO69632 cDNA, wherein SEQ ID NO:142 is a clone designated herein as “DNA287372”.

[0203] FIG. 143 shows the amino acid sequence (SEQ ID NO:143) derived from the coding sequence of SEQ ID NO:142 shown in FIG. 142.

[0204] FIG. 144 shows a nucleotide sequence (SEQ ID NO:144) of a native sequence PRO81592 cDNA, wherein SEQ ID NO:144 is a clone designated herein as “DNA325001”.

[0205] FIG. 145 shows the amino acid sequence (SEQ ID NO:145) derived from the coding sequence of SEQ ID NO:144 shown in FIG. 144.

[0206] FIG. 146 shows a nucleotide sequence (SEQ ID NO:146) of a native sequence PRO83292 cDNA, wherein SEQ ID NO:146 is a clone designated herein as “DNA326984”.

[0207] FIG. 147 shows the amino acid sequence (SEQ ID NO:147) derived from the coding sequence of SEQ ID NO:146 shown in FIG. 146.

[0208] FIG. 148 shows a nucleotide sequence (SEQ ID NO:148) of a native sequence PRO615 cDNA, wherein SEQ ID NO:148 is a clone designated herein as “DNA329102”.

[0209] FIG. 149 shows the amino acid sequence (SEQ ID NO:149) derived from the coding sequence of SEQ ID NO:148 shown in FIG. 148.

[0210] FIG. 150 shows a nucleotide sequence (SEQ ID NO:150) of a native sequence PRO49824 cDNA, wherein SEQ ID NO:150 is a clone designated herein as “DNA254725”.

[0211] FIG. 151 shows the amino acid sequence (SEQ ID NO:151) derived from the coding sequence of SEQ ID NO:150 shown in FIG. 150.

[0212] FIG. 152 shows a nucleotide sequence (SEQ ID NO:152) of a native sequence PRO69484 cDNA, wherein SEQ ID NO:152 is a clone designated herein as “DNA287198”.

[0213] FIG. 153 shows the amino acid sequence (SEQ ID NO:153) derived from the coding sequence of SEQ ID NO:152 shown in FIG. 152.

[0214] FIG. 154 shows a nucleotide sequence (SEQ ID NO:154) of a native sequence PRO36173 cDNA, wherein SEQ ID NO:154 is a clone designated herein as “DNA225710”.

[0215] FIG. 155 shows the amino acid sequence (SEQ ID NO:155) derived from the coding sequence of SEQ ID NO:154 shown in FIG. 154.

[0216] FIG. 156 shows a nucleotide sequence (SEQ ID NO:156) of a native sequence PRO82678 cDNA, wherein SEQ ID NO:156 is a clone designated herein as “DNA326273”.

[0217] FIG. 157 shows the amino acid sequence (SEQ ID NO:157) derived from the coding sequence of SEQ ID NO:156 shown in FIG. 156.

[0218] FIG. 158 shows a nucleotide sequence (SEQ ID NO:158) of a native sequence PRO84752 cDNA, wherein SEQ ID NO:158 is a clone designated herein as “DNA329103”.

[0219] FIG. 159 shows the amino acid sequence (SEQ ID NO:159) derived from the coding sequence of SEQ ID NO:158 shown in FIG. 158.

[0220] FIG. 160 shows a nucleotide sequence (SEQ ID NO:160) of a native sequence PRO69550 cDNA, wherein SEQ ID NO:160 is a clone designated herein as “DNA329104”.

[0221] FIG. 161 shows the amino acid sequence (SEQ ID NO:161) derived from the coding sequence of SEQ ID NO:160 shown in FIG. 160.

[0222] FIG. 162 shows a nucleotide sequence (SEQ ID NO:162) of a native sequence PRO84753 cDNA, wherein SEQ ID NO:162 is a clone designated herein as “DNA329105”.

[0223] FIG. 163 shows the amino acid sequence (SEQ ID NO:163) derived from the coding sequence of SEQ ID NO:162 shown in FIG. 162.

[0224] FIG. 164 shows a nucleotide sequence (SEQ ID NO:164) of a native sequence PRO12890 cDNA, wherein SEQ ID NO:164 is a clone designated herein as “DNA151802”.

[0225] FIG. 165 shows the amino acid sequence (SEQ ID NO:165) derived from the coding sequence of SEQ ID NO:164 shown in FIG. 164.

[0226] FIG. 166 shows a nucleotide sequence (SEQ ID NO:166) of a native sequence PRO4780 cDNA, wherein SEQ ID NO:166 is a clone designated herein as “DNA103453”.

[0227] FIG. 167 shows the amino acid sequence (SEQ ID NO:167) derived from the coding sequence of SEQ ID NO:166 shown in FIG. 166.

[0228] FIG. 168 shows a nucleotide sequence (SEQ ID NO:168) of a native sequence PRO60513 cDNA, wherein SEQ ID NO:168 is a clone designated herein as “DNA272251”.

[0229] FIG. 169 shows the amino acid sequence (SEQ ID NO:169) derived from the coding sequence of SEQ ID NO:168 shown in FIG. 168.

[0230] FIG. 170 shows a nucleotide sequence (SEQ ID NO:170) of a native sequence PRO61616 cDNA, wherein SEQ ID NO:170 is a clone designated herein as “DNA273645”.

[0231] FIG. 171 shows the amino acid sequence (SEQ ID NO:171) derived from the coding sequence of SEQ ID NO:170 shown in FIG. 170.

[0232] FIG. 172 shows a nucleotide sequence (SEQ ID NO:172) of a native sequence PRO69463 cDNA, wherein SEQ ID NO:172 is a clone designated herein as “DNA287173”.

[0233] FIG. 173 shows the amino acid sequence (SEQ ID NO:173) derived from the coding sequence of SEQ ID NO:172 shown in FIG. 172.

[0234] FIG. 174 shows a nucleotide sequence (SEQ ID NO:174) of a native sequence PRO69595 cDNA, wherein SEQ ID NO:174 is a clone designated herein as “DNA287331”.

[0235] FIG. 175 shows the amino acid sequence (SEQ ID NO:175) derived from the coding sequence of SEQ ID NO:174 shown in FIG. 174.

[0236] FIG. 176 shows a nucleotide sequence (SEQ ID NO:176) of a native sequence PRO62075 cDNA, wherein SEQ ID NO:176 is a clone designated herein as “DNA274139”.

[0237] FIG. 177 shows the amino acid sequence (SEQ ID NO:177) derived from the coding sequence of SEQ ID NO:176 shown in FIG. 176.

[0238] FIG. 178 shows a nucleotide sequence (SEQ ID NO:178) of a native sequence PRO59281 cDNA, wherein SEQ ID NO:178 is a clone designated herein as “DNA270950”.

[0239] FIG. 179 shows the amino acid sequence (SEQ ID NO:179) derived from the coding sequence of SEQ ID NO:178 shown in FIG. 178.

[0240] FIG. 180 shows a nucleotide sequence (SEQ ID NO:180) of a native sequence PRO81979 cDNA, wherein SEQ ID NO:180 is a clone designated herein as “DNA329004”.

[0241] FIG. 181 shows the amino acid sequence (SEQ ID NO:181) derived from the coding sequence of SEQ ID NO:180 shown in FIG. 180.

[0242] FIG. 182 shows a nucleotide sequence (SEQ ID NO:182) of a native sequence PRO84252 cDNA, wherein SEQ ID NO:182 is a clone designated herein as “DNA328405”.

[0243] FIG. 183 shows the amino acid sequence (SEQ ID NO:183) derived from the coding sequence of SEQ ID NO:182 shown in FIG. 182.

[0244] FIG. 184 shows a nucleotide sequence (SEQ ID NO:184) of a native sequence PRO83360 cDNA, wherein SEQ ID NO:184 is a clone designated herein as “DNA329106”.

[0245] FIG. 185 shows the amino acid sequence (SEQ ID NO:185) derived from the coding sequence of SEQ ID NO:184 shown in FIG. 184.

[0246] FIG. 186 shows a nucleotide sequence (SEQ ID NO:186) of a native sequence PRO71133 cDNA, wherein SEQ ID NO:186 is a clone designated herein as “DNA304707”.

[0247] FIG. 187 shows the amino acid sequence (SEQ ID NO:187) derived from the coding sequence of SEQ ID NO:186 shown in FIG. 186.

[0248] FIG. 188 shows a nucleotide sequence (SEQ ID NO:188) of a native sequence PRO62518 cDNA, wherein SEQ ID NO188: is a clone designated herein as “DNA274745”.

[0249] FIG. 189 shows the amino acid sequence (SEQ ID NO:189) derived from the coding sequence of SEQ ID NO:188 shown in FIG. 188.

[0250] FIG. 190 shows a nucleotide sequence (SEQ ID NO:190) of a native sequence PRO4912 cDNA, wherein SEQ ID NO:190 is a clone designated herein as “DNA329002”.

[0251] FIG. 191 shows the amino acid sequence (SEQ ID NO:191) derived from the coding sequence of SEQ ID NO:190 shown in FIG. 190.

[0252] FIG. 192 shows a nucleotide sequence (SEQ ID NO:192) of a native sequence PRO4912 cDNA, wherein SEQ ID NO:192 is a clone designated herein as “DNA329002”.

[0253] FIG. 193 shows the amino acid sequence (SEQ ID NO:193) derived from the coding sequence of SEQ ID NO:192 shown in FIG. 192.

[0254] FIG. 194 shows a nucleotide sequence (SEQ ID NO:194) of a native sequence PRO59943 cDNA, wherein SEQ ID NO:194 is a clone designated herein as “DNA271656”.

[0255] FIG. 195 shows the amino acid sequence (SEQ ID NO:195) derived from the coding sequence of SEQ ID NO:194 shown in FIG. 194.

[0256] FIG. 196 shows a nucleotide sequence (SEQ ID NO:196) of a native sequence PRO84754 cDNA, wherein SEQ ID NO:196 is a clone designated herein as “DNA329107”.

[0257] FIG. 197 shows the amino acid sequence (SEQ ID NO:197) derived from the coding sequence of SEQ ID NO:196 shown in FIG. 196.

[0258] FIG. 198 shows a nucleotide sequence (SEQ ID NO:198) of a native sequence PRO84755 cDNA, wherein SEQ ID NO:198 is a clone designated herein as “DNA329108”.

[0259] FIG. 199 shows the amino acid sequence (SEQ ID NO:199) derived from the coding sequence of SEQ ID NO:198 shown in FIG. 198.

[0260] FIG. 200 shows a nucleotide sequence (SEQ ID NO:200) of a native sequence PRO81854 cDNA, wherein SEQ ID NO:200 is a clone designated herein as “DNA329109”.

[0261] FIG. 201 shows the amino acid sequence (SEQ ID NO:201) derived from the coding sequence of SEQ ID NO:200 shown in FIG. 200.

[0262] FIG. 202 shows a nucleotide sequence (SEQ ID NO:202) of a native sequence PRO11586 cDNA, wherein SEQ ID NO:202 is a clone designated herein as “DNA3291 10”.

[0263] FIG. 203 shows the amino acid sequence (SEQ ID NO:203) derived from the coding sequence of SEQ ID NO:202 shown in FIG. 202.

[0264] FIG. 204 shows a nucleotide sequence (SEQ ID NO:204) of a native sequence PRO cDNA, wherein SEQ ID NO:204 is a clone designated herein as “DNA”.

[0265] FIG. 205 shows the amino acid sequence (SEQ ID NO:205) derived from the coding sequence of SEQ ID NO:204 shown in FIG. 204.

[0266] FIG. 206 shows a nucleotide sequence (SEQ ID NO:206) of a native sequence PRO59309 cDNA, wherein SEQ ID NO:206 is a clone designated herein as “DNA270979”.

[0267] FIG. 207 shows the amino acid sequence (SEQ ID NO:207) derived from the coding sequence of SEQ ID NO:206 shown in FIG. 206.

[0268] FIG. 208 shows a nucleotide sequence (SEQ ID NO:208) of a native sequence PRO2338 cDNA, wherein SEQ ID NO:208 is a clone designated herein as “DNA88418”.

[0269] FIG. 209 shows the amino acid sequence (SEQ ID NO:209) derived from the coding sequence of SEQ ID NO:208 shown in FIG. 208.

[0270] FIG. 210 shows a nucleotide sequence (SEQ ID NO:210) of a native sequence PRO37063 cDNA, wherein SEQ ID NO:210 is a clone designated herein as “DNA226600”.

[0271] FIG. 211 shows the amino acid sequence (SEQ ID NO:211) derived from the coding sequence of SEQ ID NO:210 shown in FIG. 210.

[0272] FIG. 212 shows a nucleotide sequence (SEQ ID NO:212) of a native sequence PRO84757 cDNA, wherein SEQ ID NO:212 is a clone designated herein as “DNA329112”.

[0273] FIG. 213 shows the amino acid sequence (SEQ ID NO:213) derived from the coding sequence of SEQ ID NO:212 shown in FIG. 212.

[0274] FIG. 214 shows a nucleotide sequence (SEQ ID NO:214) of a native sequence PRO83076 cDNA, wherein SEQ ID NO:214 is a clone designated herein as “DNA326736”.

[0275] FIG. 215 shows the amino acid sequence (SEQ ID NO:215) derived from the coding sequence of SEQ ID NO:214 shown in FIG. 214.

[0276] FIG. 216 shows a nucleotide sequence (SEQ ID NO:216) of a native sequence PRO49881 cDNA, wherein SEQ ID NO:216 is a clone designated herein as “DNA254783”.

[0277] FIG. 217 shows the amino acid sequence (SEQ ID NO:217) derived from the coding sequence of SEQ ID NO:216 shown in FIG. 216.

[0278] FIG. 218 shows a nucleotide sequence (SEQ ID NO:218) of a native sequence PRO37073 cDNA, wherein SEQ ID NO:218 is a clone designated herein as “DNA304459”.

[0279] FIG. 219 shows the amino acid sequence (SEQ ID NO:219) derived from the coding sequence of SEQ ID NO:218 shown in FIG. 218.

[0280] FIG. 220 shows a nucleotide sequence (SEQ ID NO:220) of a native sequence PRO37073 cDNA, wherein SEQ ID NO:220 is a clone designated herein as “DNA304459”.

[0281] FIG. 221 shows the amino acid sequence (SEQ ID NO:221) derived from the coding sequence of SEQ ID NO:220 shown in FIG. 220.

[0282] FIG. 222 shows a nucleotide sequence (SEQ ID NO:222) of a native sequence PRO49210 cDNA, wherein SEQ ID NO:222 is a clone designated herein as “DNA253807”.

[0283] FIG. 223 shows the amino acid sequence (SEQ ID NO:223) derived from the coding sequence of SEQ ID NO:222 shown in FIG. 222.

[0284] FIG. 224 shows a nucleotide sequence (SEQ ID NO:224) of a native sequence PRO80498 cDNA, wherein SEQ ID NO:224 is a clone designated herein as “DNA323741”.

[0285] FIG. 225 shows the amino acid sequence (SEQ ID NO:225) derived from the coding sequence of SEQ ID NO:224 shown in FIG. 224.

[0286] FIG. 226 shows a nucleotide sequence (SEQ ID NO:226) of a native sequence PRO83586 cDNA, wherein SEQ ID NO:226 is a clone designated herein as “DNA327555”.

[0287] FIG. 227 shows the amino acid sequence (SEQ ID NO:227) derived from the coding sequence of SEQ ID NO:226 shown in FIG. 226.

[0288] FIG. 228 shows a nucleotide sequence (SEQ ID NO:228) of a native sequence PRO3647 cDNA, wherein SEQ ID NO:228 is a clone designated herein as “DNA97300”.

[0289] FIG. 229 shows the amino acid sequence (SEQ ID NO:229) derived from the coding sequence of SEQ ID NO:228 shown in FIG. 228.

[0290] FIG. 230 shows a nucleotide sequence (SEQ ID NO:231) of a native sequence PRO84262 cDNA, wherein SEQ ID NO:230 is a clone designated herein as “DNA328419”.

[0291] FIG. 231 shows the amino acid sequence (SEQ ID NO:231) derived from the coding sequence of SEQ ID NO:230 shown in FIG. 230.

[0292] FIG. 232 shows a nucleotide sequence (SEQ ID NO:232) of a native sequence PRO37941 cDNA, wherein SEQ ID NO:232 is a clone designated herein as “DNA227478”.

[0293] FIG. 233 shows the amino acid sequence (SEQ ID NO:233) derived from the coding sequence of SEQ ID NO:232 shown in FIG. 232.

[0294] FIG. 234 shows a nucleotide sequence (SEQ ID NO:234) of a native sequence PRO59324 cDNA, wherein SEQ ID NO:234 is a clone designated herein as “DNA270995”.

[0295] FIG. 235 shows the amino acid sequence (SEQ ID NO:235) derived from the coding sequence of SEQ ID NO:234 shown in FIG. 234.

[0296] FIG. 236 shows a nucleotide sequence (SEQ ID NO:236) of a native sequence PRO37534 cDNA, wherein SEQ ID NO:236 is a clone designated herein as “DNA227071”.

[0297] FIG. 237 shows the amino acid sequence (SEQ ID NO:237) derived from the coding sequence of SEQ ID NO:236 shown in FIG. 236.

[0298] FIG. 238 shows a nucleotide sequence (SEQ ID NO:238) of a native sequence PRO84758 cDNA, wherein SEQ ID NO:238 is a clone designated herein as “DNA329113”.

[0299] FIG. 239 shows the amino acid sequence (SEQ ID NO:239) derived from the coding sequence of SEQ ID NO:238 shown in FIG. 238.

[0300] FIG. 240 shows a nucleotide sequence (SEQ ID NO:240) of a native sequence PRO70425 cDNA, wherein SEQ ID NO:240 is a clone designated herein as “DNA290280”.

[0301] FIG. 241 shows the amino acid sequence (SEQ ID NO:241) derived from the coding sequence of SEQ ID NO:240 shown in FIG. 240.

[0302] FIG. 242 shows a nucleotide sequence (SEQ ID NO:242) of a native sequence PRO60991 cDNA, wherein SEQ ID NO:242 is a clone designated herein as “DNA272904”.

[0303] FIG. 243 shows the amino acid sequence (SEQ ID NO:243) derived from the coding sequence of SEQ ID NO:242 shown in FIG. 242.

[0304] FIG. 244 shows a nucleotide sequence (SEQ ID NO:244) of a native sequence PRO84759 cDNA, wherein SEQ ID NO:244 is a clone designated herein as “DNA329114”.

[0305] FIG. 245 shows the amino acid sequence (SEQ ID NO:245) derived from the coding sequence of SEQ ID NO:244 shown in FIG. 244.

[0306] FIG. 246 shows a nucleotide sequence (SEQ ID NO:246) of a native sequence PRO84760 cDNA, wherein SEQ ID NO:246 is a clone designated herein as “DNA329115”.

[0307] FIG. 247 shows the amino acid sequence (SEQ ID NO:247) derived from the coding sequence of SEQ ID NO:246 shown in FIG. 246.

[0308] FIG. 248 shows a nucleotide sequence (SEQ ID NO:248) of a native sequence PRO34726 cDNA, wherein SEQ ID NO:248 is a clone designated herein as “DNA220748”.

[0309] FIG. 249 shows the amino acid sequence (SEQ ID NO:249) derived from the coding sequence of SEQ ID NO:248 shown in FIG. 248.

[0310] FIG. 250 shows a nucleotide sequence (SEQ ID NO:250) of a native sequence PRO84761 cDNA, wherein SEQ ID NO:250 is a clone designated herein as “DNA329116”.

[0311] FIG. 251 shows the amino acid sequence (SEQ ID NO:251) derived from the coding sequence of SEQ ID NO:250 shown in FIG. 250.

[0312] FIG. 252 shows a nucleotide sequence (SEQ ID NO:252) of a native sequence cDNA, wherein SEQ ID NO:252 is a clone designated herein as “DNA329117”.

[0313] FIG. 253 shows a nucleotide sequence (SEQ ID NO:253) of a native sequence PRO37335 cDNA, wherein SEQ ID NO:253 is a clone designated herein as “DNA226872”.

[0314] FIG. 254 shows the amino acid sequence (SEQ ID NO:254) derived from the coding sequence of SEQ ID NO:253 shown in FIG. 253.

[0315] FIG. 255 shows a nucleotide sequence (SEQ ID NO:255) of a native sequence PRO37924 cDNA, wherein SEQ ID NO:255 is a clone designated herein as “DNA227461”.

[0316] FIG. 256 shows the amino acid sequence (SEQ ID NO:256) derived from the coding sequence of SEQ ID NO:255 shown in FIG. 255.

[0317] FIG. 257 shows a nucleotide sequence (SEQ ID NO:257) of a native sequence PRO38039 cDNA, wherein SEQ ID NO:257 is a clone designated herein as “DNA227576”.

[0318] FIG. 258 shows the amino acid sequence (SEQ ID NO:258) derived from the coding sequence of SEQ ID NO:257 shown in FIG. 257.

[0319] FIG. 259 shows a nucleotide sequence (SEQ ID NO:259) of a native sequence PRO82769 cDNA, wherein SEQ ID NO:259 is a clone designated herein as “DNA326373”.

[0320] FIG. 260 shows the amino acid sequence (SEQ ID NO:260) derived from the coding sequence of SEQ ID NO:259 shown in FIG. 259.

[0321] FIG. 261 shows a nucleotide sequence (SEQ ID NO:261) of a native sequence PRO83589 cDNA, wherein SEQ ID NO:261 is a clone designated herein as “DNA327559”.

[0322] FIG. 262 shows the amino acid sequence (SEQ ID NO:262) derived from the coding sequence of SEQ ID NO:261 shown in FIG. 261.

[0323] FIG. 263 shows a nucleotide sequence (SEQ ID NO:263) of a native sequence PRO59136 cDNA, wherein SEQ ID NO:263 is a clone designated herein as “DNA287167”.

[0324] FIG. 264 shows the amino acid sequence (SEQ ID NO:264) derived from the coding sequence of SEQ ID NO:263 shown in FIG. 263.

[0325] FIG. 265 shows a nucleotide sequence (SEQ ID NO:265) of a native sequence PRO69491 cDNA, wherein SEQ ID NO:265 is a clone designated herein as “DNA287625”.

[0326] FIG. 266 shows the amino acid sequence (SEQ ID NO:266) derived from the coding sequence of SEQ ID NO:265 shown in FIG. 265.

[0327] FIG. 267 shows a nucleotide sequence (SEQ ID NO:267) of a native sequence PRO80735 cDNA, wherein SEQ ID NO:267 is a clone designated herein as “DNA324015”.

[0328] FIG. 268 shows the amino acid sequence (SEQ ID NO:268) derived from the coding sequence of SEQ ID NO:267 shown in FIG. 267.

[0329] FIG. 269 shows a nucleotide sequence (SEQ ID NO:269) of a native sequence PRO83123 cDNA, wherein SEQ ID NO:269 is a clone designated herein as “DNA329118”.

[0330] FIG. 270 shows the amino acid sequence (SEQ ID NO:270) derived from the coding sequence of SEQ ID NO:269 shown in FIG. 269.

[0331] FIG. 271 shows a nucleotide sequence (SEQ ID NO:271) of a native sequence PRO2842 cDNA, wherein SEQ ID NO:271 is a clone designated herein as “DNA88562”.

[0332] FIG. 272 shows the amino acid sequence (SEQ ID NO:272) derived from the coding sequence of SEQ ID NO:271 shown in FIG. 271.

[0333] FIG. 273 shows a nucleotide sequence (SEQ ID NO:273) of a native sequence PRO60337 cDNA, wherein SEQ ID NO:273 is a clone designated herein as “DNA272066”.

[0334] FIG. 274 shows the amino acid sequence (SEQ ID NO:274) derived from the coding sequence of SEQ ID NO:273 shown in FIG. 273.

[0335] FIG. 275 shows a nucleotide sequence (SEQ ID NO:275) of a native sequence PRO11583 cDNA, wherein SEQ ID NO:275 is a clone designated herein as “DNA150805”.

[0336] FIG. 276 shows the amino acid sequence (SEQ ID NO:276) derived from the coding sequence of SEQ ID NO:275 shown in FIG. 275.

[0337] FIG. 277 shows a nucleotide sequence (SEQ ID NO:277) of a native sequence PRO80988 cDNA, wherein SEQ ID NO:277 is a clone designated herein as “DNA324310”.

[0338] FIG. 278 shows the amino acid sequence (SEQ ID NO:278) derived from the coding sequence of SEQ ID NO:277 shown in FIG. 277.

[0339] FIG. 279 shows a nucleotide sequence (SEQ ID NO:279) of a native sequence PRO63048 cDNA, wherein SEQ ID NO:279 is a clone designated herein as “DNA275385”.

[0340] FIG. 280 shows the amino acid sequence (SEQ ID NO:280) derived from the coding sequence of SEQ ID NO:279 shown in FIG. 279.

[0341] FIG. 281 shows a nucleotide sequence (SEQ ID NO:281) of a native sequence PRO37575 cDNA, wherein SEQ ID NO:281 is a clone designated herein as “DNA2271 12”.

[0342] FIG. 282 shows the amino acid sequence (SEQ ID NO:282) derived from the coding sequence of SEQ ID NO:281 shown in FIG. 281.

[0343] FIG. 283 shows a nucleotide sequence (SEQ ID NO:283) of a native sequence PRO62927 cDNA, wherein SEQ ID NO:283 is a clone designated herein as “DNA275240”.

[0344] FIG. 284 shows the amino acid sequence (SEQ ID NO:284) derived from the coding sequence of SEQ ID NO:283 shown in FIG. 283.

[0345] FIG. 285 shows a nucleotide sequence (SEQ ID NO:285) of a native sequence PRO4554 cDNA, wherein SEQ ID NO:285 is a clone designated herein as “DNA329119”.

[0346] FIG. 286 shows the amino acid sequence (SEQ ID NO:286) derived from the coding sequence of SEQ ID NO:285 shown in FIG. 285.

[0347] FIG. 287 shows a nucleotide sequence (SEQ ID NO:287) of a native sequence PRO2752 cDNA, wherein SEQ ID NO:287 is a clone designated herein as “DNA329120”.

[0348] FIG. 288 shows the amino acid sequence (SEQ ID NO:288) derived from the coding sequence of SEQ ID NO:287 shown in FIG. 287.

[0349] FIG. 289 shows a nucleotide sequence (SEQ ID NO:289) of a native sequence PRO62097 cDNA, wherein SEQ ID NO:289 is a clone designated herein as “DNA274167”.

[0350] FIG. 290 shows the amino acid sequence (SEQ ID NO:290) derived from the coding sequence of SEQ ID NO:289 shown in FIG. 289.

[0351] FIG. 291 shows a nucleotide sequence (SEQ ID NO:291) of a native sequence PRO62908 cDNA, wherein SEQ ID NO:291 is a clone designated herein as “DNA275214”.

[0352] FIG. 292 shows the amino acid sequence (SEQ ID NO:292) derived from the coding sequence of SEQ ID NO:291 shown in FIG. 291.

[0353] FIG. 293 shows a nucleotide sequence (SEQ ID NO:293) of a native sequence PRO8359.6 cDNA, wherein SEQ ID NO:293 is a clone designated herein as “DNA327567”.

[0354] FIG. 294 shows the amino acid sequence (SEQ ID NO:294) derived from the coding sequence of SEQ ID NO:293 shown in FIG. 293.

[0355] FIG. 295 shows a nucleotide sequence (SEQ ID NO:295) of a native sequence PRO36579 cDNA, wherein SEQ ID NO:295 is a clone designated herein as “DNA226116”.

[0356] FIG. 296 shows the amino acid sequence (SEQ ID NO:296) derived from the coding sequence of SEQ ID NO:295 shown in FIG. 295.

[0357] FIG. 297 shows a nucleotide sequence (SEQ ID NO:297) of a native sequence PRO60487 cDNA, wherein SEQ ID NO:297 is a clone designated herein as “DNA272225”.

[0358] FIG. 298 shows the amino acid sequence (SEQ ID NO:298) derived from the coding sequence of SEQ ID NO:297 shown in FIG. 297.

[0359] FIG. 299 shows a nucleotide sequence (SEQ ID NO:299) of a native sequence PRO84274 cDNA, wherein SEQ ID NO:299 is a clone designated herein as “DNA328440”.

[0360] FIG. 300 shows the amino acid sequence (SEQ ID NO:300) derived from the coding sequence of SEQ ID NO:299 shown in FIG. 299.

[0361] FIG. 301 shows a nucleotide sequence (SEQ ID NO:301) of a native sequence PRO84695 cDNA, wherein SEQ ID NO:301 is a clone designated herein as “DNA329020”.

[0362] FIG. 302 shows the amino acid sequence (SEQ ID NO:302) derived from the coding sequence of SEQ ID NO:301 shown in FIG. 301.

[0363] FIG. 303 shows a nucleotide sequence (SEQ ID NO:303) of a native sequence PRO84275 cDNA, wherein SEQ ID NO:303 is a clone designated herein as “DNA328442”.

[0364] FIG. 304 shows the amino acid sequence (SEQ ID NO:304) derived from the coding sequence of SEQ ID NO:303 shown in FIG. 303.

[0365] FIG. 305 shows a nucleotide sequence (SEQ ID NO:305) of a native sequence PRO49673 cDNA, wherein SEQ ID NO:305 is a clone designated herein as “DNA254570”.

[0366] FIG. 306 shows the amino acid sequence (SEQ ID NO:306) derived from the coding sequence of SEQ ID NO:305 shown in FIG. 305.

[0367] FIG. 307 shows a nucleotide sequence (SEQ ID NO:307) of a native sequence PRO84763 cDNA, wherein SEQ ID NO:307 is a clone designated herein as “DNA329121”.

[0368] FIG. 308 shows the amino acid sequence (SEQ ID NO:308) derived from the coding sequence of SEQ ID NO:307 shown in FIG. 307.

[0369] FIG. 309 shows a nucleotide sequence (SEQ ID NO:309) of a native sequence PRO84277 cDNA, wherein SEQ ID NO:309 is a clone designated herein as “DNA328444”.

[0370] FIG. 310 shows the amino acid sequence (SEQ ID NO:310) derived from the coding sequence of SEQ ID NO:309 shown in FIG. 309.

[0371] FIG. 311 shows a nucleotide sequence (SEQ ID NO:311) of a native sequence PRO62362 cDNA, wherein SEQ ID NO:311 is a clone designated herein as “DNA328448”.

[0372] FIG. 312 shows the amino acid sequence (SEQ ID NO:312) derived from the coding sequence of SEQ ID NO:311 shown in FIG. 311.

[0373] FIG. 313 shows a nucleotide sequence (SEQ ID NO:313) of a native sequence PRO81689 cDNA, wherein SEQ ID NO:313 is a clone designated herein as “DNA325115”.

[0374] FIG. 314 shows the amino acid sequence (SEQ ID NO:314) derived from the coding sequence of SEQ ID NO:313 shown in FIG. 313.

[0375] FIG. 315 shows a nucleotide sequence (SEQ ID NO:315) of a native sequence PRO58880 cDNA, wherein SEQ ID NO:315 is a clone designated herein as “DNA270502”.

[0376] FIG. 316 shows the amino acid sequence (SEQ ID NO:316) derived from the coding sequence of SEQ ID NO:315 shown in FIG. 315.

[0377] FIG. 317 shows a nucleotide sequence (SEQ ID NO:317) of a native sequence PRO1213 cDNA, wherein SEQ ID NO:317 is a clone designated herein as “DNA66487”.

[0378] FIG. 318 shows the amino acid sequence (SEQ ID NO:318) derived from the coding sequence of SEQ ID NO:317 shown in FIG. 317.

[0379] FIG. 319 shows a nucleotide sequence (SEQ ID NO:319) of a native sequence PRO83600 cDNA, wherein SEQ ID NO:319 is a clone designated herein as “DNA327576”.

[0380] FIG. 320 shows the amino acid sequence (SEQ ID NO:320) derived from the coding sequence of SEQ ID NO:319 shown in FIG. 319.

[0381] FIG. 321 shows a nucleotide sequence (SEQ ID NO:321) of a native sequence PRO21744 cDNA, wherein SEQ ID NO:321 is a clone designated herein as “DNA188225”.

[0382] FIG. 322 shows the amino acid sequence (SEQ ID NO:322) derived from the coding sequence of SEQ ID NO:321 shown in FIG. 321.

[0383] FIG. 323 shows a nucleotide sequence (SEQ ID NO:323) of a native sequence PRO84764 cDNA, wherein SEQ ID NO:323 is a clone designated herein as “DNA329122”.

[0384] FIG. 324 shows the amino acid sequence (SEQ ID NO:324) derived from the coding sequence of SEQ ID NO:323 shown in FIG. 323.

[0385] FIG. 325 shows a nucleotide sequence (SEQ ID NO:325) of a native sequence PRO84765 cDNA, wherein SEQ ID NO:325 is a clone designated herein as “DNA329123”.

[0386] FIG. 326 shows the amino acid sequence (SEQ ID NO:326) derived from the coding sequence of SEQ ID NO:325 shown in FIG. 325.

[0387] FIG. 327 shows a nucleotide sequence (SEQ ID NO:327) of a native sequence PRO84766 cDNA, wherein SEQ ID NO:327 is a clone designated herein as “DNA329124”.

[0388] FIG. 328 shows the amino acid sequence (SEQ ID NO:328) derived from the coding sequence of SEQ ID NO:327 shown in FIG. 327.

[0389] FIG. 329 shows a nucleotide sequence (SEQ ID NO:329) of a native sequence PRO64556 cDNA, wherein SEQ ID NO:329 is a clone designated herein as “DNA277809”.

[0390] FIG. 330 shows the amino acid sequence (SEQ ID NO:330) derived from the coding sequence of SEQ ID NO:329 shown in FIG. 329.

[0391] FIG. 331 shows a nucleotide sequence (SEQ ID NO:331) of a native sequence PRO83257 cDNA, wherein SEQ ID NO:331 is a clone designated herein as “DNA326939”.

[0392] FIG. 332 shows the amino acid sequence (SEQ ID NO:332) derived from the coding sequence of SEQ ID NO:331 shown in FIG. 331.

[0393] FIG. 333 shows a nucleotide sequence (SEQ ID NO:333) of a native sequence PRO71111 cDNA, wherein SEQ ID NO:333 is a clone designated herein as “DNA304685”.

[0394] FIG. 334 shows the amino acid sequence (SEQ ID NO:334) derived from the coding sequence of SEQ ID NO:333 shown in FIG. 333.

[0395] FIG. 335 shows a nucleotide sequence (SEQ ID NO:335) of a native sequence PRO84767 cDNA, wherein SEQ ID NO:335 is a clone designated herein as “DNA329125”.

[0396] FIG. 336 shows the amino acid sequence (SEQ ID NO:336) derived from the coding sequence of SEQ ID NO: shown in Figure.

[0397] FIG. 337 shows a nucleotide sequence (SEQ ID NO:337) of a native sequence PRO62626 cDNA, wherein SEQ ID NO:337 is a clone designated herein as “DNA274881”.

[0398] FIG. 338 shows the amino acid sequence (SEQ ID NO:338) derived from the coding sequence of SEQ ID NO:337 shown in FIG. 337.

[0399] FIG. 339 shows a nucleotide sequence (SEQ ID NO:339) of a native sequence PRO84768 cDNA, wherein SEQ ID NO:339 is a clone designated herein as “DNA329126”.

[0400] FIG. 340 shows the amino acid sequence (SEQ ID NO:340) derived from the coding sequence of SEQ ID NO:339 shown in FIG. 339.

[0401] FIG. 341 shows a nucleotide sequence (SEQ ID NO:341) of a native sequence PRO49244 cDNA, wherein SEQ ID NO:341 is a clone designated herein as “DNA254129”.

[0402] FIG. 342 shows the amino acid sequence (SEQ ID NO:342) derived from the coding sequence of SEQ ID NO:341 shown in FIG. 341.

[0403] FIG. 343 shows a nucleotide sequence (SEQ ID NO:343) of a native sequence PRO60906 cDNA, wherein SEQ ID NO:343 is a clone designated herein as “DNA272801”.

[0404] FIG. 344 shows the amino acid sequence (SEQ ID NO:344) derived from the coding sequence of SEQ ID NO:343 shown in FIG. 343.

[0405] FIG. 345 shows a nucleotide sequence (SEQ ID NO:345) of a native sequence PRO62479 cDNA, wherein SEQ ID NO:345 is a clone designated herein as “DNA274690”.

[0406] FIG. 346 shows the amino acid sequence (SEQ ID NO:346) derived from the coding sequence of SEQ ID NO:345 shown in FIG. 345.

[0407] FIG. 347 shows a nucleotide sequence (SEQ ID NO:347) of a native sequence PRO81599 cDNA, wherein SEQ ID NO:347 is a clone designated herein as “DNA329127”.

[0408] FIG. 348 shows the amino acid sequence (SEQ ID NO:348) derived from the coding sequence of SEQ ID NO:347 shown in FIG. 347.

[0409] FIG. 349 shows a nucleotide sequence (SEQ ID NO:349) of a native sequence PRO84769 cDNA, wherein SEQ ID NO:349 is a clone designated herein as “DNA329128”.

[0410] FIG. 350 shows the amino acid sequence (SEQ ID NO:350) derived from the coding sequence of SEQ ID NO:349 shown in FIG. 349.

[0411] FIG. 351 shows a nucleotide sequence (SEQ ID NO:351) of a native sequence PRO60248 cDNA, wherein SEQ ID NO:351 is a clone designated herein as “DNA271973”.

[0412] FIG. 352 shows the amino acid sequence (SEQ ID NO:352) derived from the coding sequence of SEQ ID NO:351 shown in FIG. 351.

[0413] FIG. 353 shows a nucleotide sequence (SEQ ID NO:353) of a native sequence PRO84288 cDNA, wherein SEQ ID NO:353 is a clone designated herein as “DNA329129”.

[0414] FIG. 354 shows the amino acid sequence (SEQ ID NO:354) derived from the coding sequence of SEQ ID NO:353 shown in FIG. 353.

[0415] FIG. 355 shows a nucleotide sequence (SEQ ID NO:355) of a native sequence PRO61349 cDNA, wherein SEQ ID NO:355 is a clone designated herein as “DNA273346”.

[0416] FIG. 356 shows the amino acid sequence (SEQ ID NO:356) derived from the coding sequence of SEQ ID NO:355 shown in FIG. 355.

[0417] FIG. 357 shows a nucleotide sequence (SEQ ID NO:357) of a native sequence PRO12742 cDNA, wherein SEQ ID NO:357 is a clone designated herein as “DNA151878”.

[0418] FIG. 358 shows the amino acid sequence (SEQ ID NO:358) derived from the coding sequence of SEQ ID NO:357 shown in FIG. 357.

[0419] FIG. 359 shows a nucleotide sequence (SEQ ID NO:359) of a native sequence PRO60936 cDNA, wherein SEQ ID NO:359 is a clone designated herein as “DNA272840”.

[0420] FIG. 360 shows the amino acid sequence (SEQ ID NO:360) derived from the coding sequence of SEQ ID NO:359 shown in FIG. 359.

[0421] FIG. 361 shows a nucleotide sequence (SEQ ID NO:361) of a native sequence PRO34252 cDNA, wherein SEQ ID NO:361 is a clone designated herein as “DNA216500”.

[0422] FIG. 362 shows the amino acid sequence (SEQ ID NO:362) derived from the coding sequence of SEQ ID NO:361 shown in FIG. 361.

[0423] FIG. 363 shows a nucleotide sequence (SEQ ID NO:363) of a native sequence PRO20124 cDNA, wherein SEQ ID NO:363 is a clone designated herein as “DNA329130”.

[0424] FIG. 364 shows the amino acid sequence (SEQ ID NO:364) derived from the coding sequence of SEQ ID NO:363 shown in FIG. 363.

[0425] FIG. 365 shows a nucleotide sequence (SEQ ID NO:365) of a native sequence PRO84770 cDNA, wherein SEQ ID NO:365 is a clone designated herein as “DNA329131”.

[0426] FIG. 366 shows the amino acid sequence (SEQ ID NO:366) derived from the coding sequence of SEQ ID NO:365 shown in FIG. 365.

[0427] FIG. 367 shows a nucleotide sequence (SEQ ID NO:367) of a native sequence PRO81877 cDNA, wherein SEQ ID NO:367 is a clone designated herein as “DNA325334”.

[0428] FIG. 368 shows the amino acid sequence (SEQ ID NO:368) derived from the coding sequence of SEQ ID NO:367 shown in FIG. 367.

[0429] FIG. 369 shows a nucleotide sequence (SEQ ID NO:369) of a native sequence PRO60742 cDNA, wherein SEQ ID NO:369 is a clone designated herein as “DNA272608”.

[0430] FIG. 370 shows the amino acid sequence (SEQ ID NO:370) derived from the coding sequence of SEQ ID NO:369 shown in FIG. 369.

[0431] FIG. 371 shows a nucleotide sequence (SEQ ID NO:371) of a native sequence PRO-80649 cDNA, wherein SEQ ID NO:371 is a clone designated herein as “DNA327584”.

[0432] FIG. 372 shows the amino acid sequence (SEQ ID NO:372) derived from the coding sequence of SEQ ID NO:371 shown in FIG. 371.

[0433] FIG. 373 shows a nucleotide sequence (SEQ ID NO:373) of a native sequence PRO83145 cDNA, wherein SEQ ID NO:373 is a clone designated herein as “DNA329132”.

[0434] FIG. 374 shows the amino acid sequence (SEQ ID NO:374) derived from the coding sequence of SEQ ID NO:373 shown in FIG. 373.

[0435] FIG. 375 shows a nucleotide sequence (SEQ ID NO:375) of a native sequence PRO84771 cDNA, wherein SEQ ID NO:375 is a clone designated herein as “DNA329133”.

[0436] FIG. 376 shows the amino acid sequence (SEQ ID NO:376) derived from the coding sequence of SEQ ID NO:375 shown in FIG. 375.

[0437] FIG. 377 shows a nucleotide sequence (SEQ ID NO:377) of a native sequence PRO83605 cDNA, wherein SEQ ID NO:377 is a clone designated herein as “DNA327585”.

[0438] FIG. 378 shows the amino acid sequence (SEQ ID NO:378) derived from the coding sequence of SEQ ID NO:377 shown in FIG. 377.

[0439] FIG. 379 shows a nucleotide sequence (SEQ ID NO:379) of a native sequence PRO71107 cDNA, wherein SEQ ID NO:379 is a clone designated herein as “DNA304681”.

[0440] FIG. 380 shows the amino acid sequence (SEQ ID NO:380) derived from the coding sequence of SEQ ID NO:379 shown in FIG. 379.

[0441] FIG. 381 shows a nucleotide sequence (SEQ ID NO:381) of a native sequence PRO59254 cDNA, wherein SEQ ID NO:381 is a clone designated herein as “DNA329134”.

[0442] FIG. 382 shows the amino acid sequence (SEQ ID NO:382) derived from the coding sequence of SEQ ID NO:381 shown in FIG. 381.

[0443] FIG. 383 shows a nucleotide sequence (SEQ ID NO:383) of a native sequence PRO84299 cDNA, wherein SEQ ID NO:383 is a clone designated herein as “DNA328473”.

[0444] FIG. 384 shows the amino acid sequence (SEQ ID NO:384) derived from the coding sequence of SEQ ID NO:383 shown in FIG. 383.

[0445] FIG. 385 shows a nucleotide sequence (SEQ ID NO:385) of a native sequence PRO37756 cDNA, wherein SEQ ID NO:385 is a clone designated herein as “DNA227293”.

[0446] FIG. 386 shows the amino acid sequence (SEQ ID NO:386) derived from the coding sequence of SEQ ID NO:385 shown in FIG. 385.

[0447] FIG. 387 shows a nucleotide sequence (SEQ ID NO:387) of a native sequence PRO58102 cDNA, wherein SEQ ID NO:387 is a clone designated herein as “DNA329135”.

[0448] FIG. 388 shows the amino acid sequence (SEQ ID NO:388) derived from the coding sequence of SEQ ID NO:387 shown in FIG. 387.

[0449] FIG. 389 shows a nucleotide sequence (SEQ ID NO:389) of a native sequence PRO37368 cDNA, wherein SEQ ID NO:389 is a clone designated herein as “DNA226905”.

[0450] FIG. 390 shows the amino acid sequence (SEQ ID NO:390) derived from the coding sequence of SEQ ID NO:389 shown in FIG. 389.

[0451] FIG. 391 shows a nucleotide sequence (SEQ ID NO:391) of a native sequence PRO84772 cDNA, wherein SEQ ID NO:391 is a clone designated herein as “DNA329136”.

[0452] FIG. 392 shows the amino acid sequence (SEQ ID NO:392) derived from the coding sequence of SEQ ID NO:391 shown in FIG. 391.

[0453] FIG. 393 shows a nucleotide sequence (SEQ ID NO:393) of a native sequence PRO12879 cDNA, wherein SEQ ID NO:393 is a clone designated herein as “DNA329137”.

[0454] FIG. 394 shows the amino acid sequence (SEQ ID NO:394) derived from the coding sequence of SEQ ID NO:393 shown in FIG. 393.

[0455] FIG. 395 shows a nucleotide sequence (SEQ ID NO:395) of a native sequence PRO38299 cDNA, wherein SEQ ID NO:395 is a clone designated herein as “DNA227836”.

[0456] FIG. 396 shows the amino acid sequence (SEQ ID NO:396) derived from the coding sequence of SEQ ID NO:395 shown in FIG. 395.

[0457] FIG. 397 shows a nucleotide sequence (SEQ ID NO:397) of a native sequence PRO84773 cDNA, wherein SEQ ID NO:397 is a clone designated herein as “DNA329138”.

[0458] FIG. 398 shows the amino acid sequence (SEQ ID NO:398) derived from the coding sequence of SEQ ID NO:397 shown in FIG. 397.

[0459] FIG. 399 shows a nucleotide sequence (SEQ ID NO:399) of a native sequence PRO84774 cDNA, wherein SEQ ID NO:399 is a clone designated herein as “DNA329139”.

[0460] FIG. 400 shows the amino acid sequence (SEQ ID NO:400) derived from the coding sequence of SEQ ID NO:399 shown in FIG. 399.

[0461] FIG. 401 shows a nucleotide sequence (SEQ ID NO:401) of a native sequence PRO60960 cDNA, wherein SEQ ID NO:401 is a clone designated herein as “DNA272867”.

[0462] FIG. 402 shows the amino acid sequence (SEQ ID NO:402) derived from the coding sequence of SEQ ID NO:401 shown in FIG. 401.

[0463] FIG. 403 shows a nucleotide sequence (SEQ ID NO:403) of a native sequence PRO12770 cDNA, wherein SEQ ID NO:403 is a clone designated herein as “DNA150430”.

[0464] FIG. 404 shows the amino acid sequence (SEQ ID NO:404) derived from the coding sequence of SEQ ID NO:403 shown in FIG. 403.

[0465] FIG. 405 shows a nucleotide sequence (SEQ ID NO:405) of a native sequence PRO71146 cDNA, wherein SEQ ID NO:405 is a clone designated herein as “DNA304720”.

[0466] FIG. 406 shows the amino acid sequence (SEQ ID NO:406) derived from the coding sequence of SEQ ID NO:405 shown in FIG. 405.

[0467] FIG. 407 shows a nucleotide sequence (SEQ ID NO:407) of a native sequence PRO60024 cDNA, wherein SEQ ID NO:407 is a clone designated herein as “DNA271740”.

[0468] FIG. 408 shows the amino acid sequence (SEQ ID NO:408) derived from the coding sequence of SEQ ID NO:407 shown in FIG. 407.

[0469] FIG. 409 shows a nucleotide sequence (SEQ ID NO:409) of a native sequence PRO60698 cDNA, wherein SEQ ID NO:409 is a clone designated herein as “DNA272449”.

[0470] FIG. 410 shows the amino acid sequence (SEQ ID NO:410) derived from the coding sequence of SEQ ID NO:409 shown in FIG. 409.

[0471] FIG. 411 shows a nucleotide sequence (SEQ ID NO:411) of a native sequence PRO84775 cDNA, wherein SEQ ID NO:411 is a clone designated herein as “DNA329140”.

[0472] FIG. 412 shows the amino acid sequence (SEQ ID NO:412) derived from the coding sequence of SEQ ID NO:411 shown in FIG. 411.

[0473] FIG. 413 shows a nucleotide sequence (SEQ ID NO:413) of a native sequence PRO59315 cDNA, wherein SEQ ID NO:413 is a clone designated herein as “DNA270985”.

[0474] FIG. 414 shows the amino acid sequence (SEQ ID NO:414) derived from the coding sequence of SEQ ID NO:413 shown in FIG. 413.

[0475] FIG. 415 shows a nucleotide sequence (SEQ ID NO:415) of a native sequence PRO80660 cDNA, wherein SEQ ID NO:415 is a clone designated herein as “DNA323927”.

[0476] FIG. 416 shows the amino acid sequence (SEQ ID NO:416) derived from the coding sequence of SEQ ID NO:415 shown in FIG. 415.

[0477] FIG. 417 shows a nucleotide sequence (SEQ ID NO:417) of a native sequence PRO51738 cDNA, wherein SEQ ID NO:417 is a clone designated herein as “DNA256807”.

[0478] FIG. 418 shows the amino acid sequence (SEQ ID NO:418) derived from the coding sequence of SEQ ID NO:417 shown in FIG. 417.

[0479] FIG. 419 shows a nucleotide sequence (SEQ ID NO:419) of a native sequence PRO84776 cDNA, wherein SEQ ID NO:419 is a clone designated herein as “DNA329141”.

[0480] FIG. 420 shows the amino acid sequence (SEQ ID NO:420) derived from the coding sequence of SEQ ID NO:419 shown in FIG. 419.

[0481] FIG. 421 shows a nucleotide sequence (SEQ ID NO:421) of a native sequence PRO84777 cDNA, wherein SEQ ID NO:421 is a clone designated herein as “DNA329142”.

[0482] FIG. 422 shows the amino acid sequence (SEQ ID NO:422) derived from the coding sequence of SEQ ID NO:421 shown in FIG. 421.

[0483] FIG. 423 shows a nucleotide sequence (SEQ ID NO:423) of a native sequence PRO60997 cDNA, wherein SEQ ID NO:423 is a clone designated herein as “DNA272911”.

[0484] FIG. 424 shows the amino acid sequence (SEQ ID NO:424) derived from the coding sequence of SEQ ID NO:423 shown in FIG. 423.

[0485] FIG. 425 shows a nucleotide sequence (SEQ ID NO:425) of a native sequence PRO84700 cDNA, wherein SEQ ID NO:425 is a clone designated herein as “DNA329033”.

[0486] FIG. 426 shows the amino acid sequence (SEQ ID NO:426) derived from the coding sequence of SEQ ID NO:425 shown in FIG. 425.

[0487] FIG. 427 shows a nucleotide sequence (SEQ ID NO:427) of a native sequence PRO84778 cDNA, wherein SEQ ID NO:427 is a clone designated herein as “DNA329143”.

[0488] FIG. 428 shows the amino acid sequence (SEQ ID NO:428) derived from the coding sequence of SEQ ID NO:427 shown in FIG. 427.

[0489] FIG. 429 shows a nucleotide sequence (SEQ ID NO:429) of a native sequence PRO69521 cDNA, wherein SEQ ID NO:429 is a clone designated herein as “DNA287246”.

[0490] FIG. 430 shows the amino acid sequence (SEQ ID NO:430) derived from the coding sequence of SEQ ID NO:429 shown in FIG. 429.

[0491] FIG. 431 shows a nucleotide sequence (SEQ ID NO:431) of a native sequence PRO84779 cDNA, wherein SEQ ID NO:431 is a clone designated herein as “DNA329144”.

[0492] FIG. 432 shows the amino acid sequence (SEQ ID NO:432) derived from the coding sequence of SEQ ID NO:431 shown in FIG. 431.

[0493] FIG. 433 shows a nucleotide sequence (SEQ ID NO:433) of a native sequence PRO80881 cDNA, wherein SEQ ID NO:433 is a clone designated herein as “DNA324183”.

[0494] FIG. 434 shows the amino acid sequence (SEQ ID NO:434) derived from the coding sequence of SEQ ID NO:433 shown in FIG. 433.

[0495] FIG. 435 shows a nucleotide sequence (SEQ ID NO:435) of a native sequence PRO37791 cDNA, wherein SEQ ID NO:435 is a clone designated herein as “DNA326322”.

[0496] FIG. 436 shows the amino acid sequence (SEQ ID NO:436) derived from the coding sequence of SEQ ID NO:435 shown in FIG. 435.

[0497] FIG. 437 shows a nucleotide sequence (SEQ ID NO:437) of a native sequence PRO37815 cDNA, wherein SEQ ID NO:437 is a clone designated herein as “DNA328513”.

[0498] FIG. 438 shows the amino acid sequence (SEQ ID NO:438) derived from the coding sequence of SEQ ID NO:437 shown in FIG. 437.

[0499] FIG. 439 shows a nucleotide sequence (SEQ ID NO:439) of a native sequence PRO1723 cDNA, wherein SEQ ID NO:439 is a clone designated herein as “DNA82376”.

[0500] FIG. 440 shows the amino acid sequence (SEQ ID NO:440) derived from the coding sequence of SEQ ID NO:439 shown in FIG. 439.

[0501] FIG. 441 shows a nucleotide sequence (SEQ ID NO:441) of a native sequence PRO2711 cDNA, wherein SEQ ID NO:441 is a clone designated herein as “DNA88239”.

[0502] FIG. 442 shows the amino acid sequence (SEQ ID NO:442) derived from the coding sequence of SEQ ID NO:441 shown in FIG. 441.

[0503] FIG. 443 shows a nucleotide sequence (SEQ ID NO:443) of a native sequence PRO36378 cDNA, wherein SEQ ID NO:443 is a clone designated herein as “DNA225915”.

[0504] FIG. 444 shows the amino acid sequence (SEQ ID NO:444) derived from the coding sequence of SEQ ID NO:443 shown in FIG. 443.

[0505] FIG. 445 shows a nucleotide sequence (SEQ ID NO:445) of a native sequence PRO84780 cDNA, wherein SEQ ID NO:445 is a clone designated herein as “DNA329145”.

[0506] FIG. 446 shows the amino acid sequence (SEQ ID NO:446) derived from the coding sequence of SEQ ID NO:445 shown in FIG. 445.

[0507] FIG. 447 shows a nucleotide sequence (SEQ ID NO:447) of a native sequence PRO70001 cDNA, wherein SEQ ID NO:447 is a clone designated herein as “DNA329146”.

[0508] FIG. 448 shows the amino acid sequence (SEQ ID NO:448) derived from the coding sequence of SEQ ID NO:447 shown in FIG. 447.

[0509] FIG. 449 shows a nucleotide sequence (SEQ ID NO:449) of a native sequence PRO37200 cDNA, wherein SEQ ID NO:449 is a clone designated herein as “DNA226737”.

[0510] FIG. 450 shows the amino acid sequence (SEQ ID NO:450) derived from the coding sequence of SEQ ID NO:449 shown in FIG. 449.

[0511] FIG. 451 shows a nucleotide sequence (SEQ ID NO:451) of a native sequence PRO84781 cDNA, wherein SEQ ID NO:451 is a clone designated herein as “DNA329147”.

[0512] FIG. 452 shows the amino acid sequence (SEQ ID NO:452) derived from the coding sequence of SEQ ID NO:451 shown in FIG. 451.

[0513] FIG. 453 shows a nucleotide sequence (SEQ ID NO:453) of a native sequence PRO34276 cDNA, wherein SEQ ID NO:453 is a clone designated herein as “DNA216689”.

[0514] FIG. 454 shows the amino acid sequence (SEQ ID NO:454) derived from the coding sequence of SEQ ID NO:453 shown in FIG. 453.

[0515] FIG. 455 shows a nucleotide sequence (SEQ ID NO:455) of a native sequence PRO12313 cDNA, wherein SEQ ID NO:455 is a clone designated herein as “DNA150529”.

[0516] FIG. 456 shows the amino acid sequence (SEQ ID NO:456) derived from the coding sequence of SEQ ID NO:455 shown in FIG. 455.

[0517] FIG. 457 shows a nucleotide sequence (SEQ ID NO:457) of a native sequence PRO61870 cDNA, wherein SEQ ID NO:457 is a clone designated herein as “DNA273919”.

[0518] FIG. 458 shows the amino acid sequence (SEQ ID NO:458) derived from the coding sequence of SEQ ID NO:457 shown in FIG. 457.

[0519] FIG. 459 shows a nucleotide sequence (SEQ ID NO:459) of a native sequence PRO37579 cDNA, wherein SEQ ID NO:459 is a clone designated herein as “DNA227116”.

[0520] FIG. 460 shows the amino acid sequence (SEQ ID NO:460) derived from the coding sequence of SEQ ID NO:459 shown in FIG. 459.

[0521] FIG. 461 shows a nucleotide sequence (SEQ ID NO:461) of a native sequence PRO60781 cDNA, wherein SEQ ID NO:461 is a clone designated herein as “DNA272655”.

[0522] FIG. 462 shows the amino acid sequence (SEQ ID NO:462) derived from the coding sequence of SEQ ID NO:461 shown in FIG. 461.

[0523] FIG. 463 shows a nucleotide sequence (SEQ ID NO:463) of a native sequence PRO84782 cDNA, wherein SEQ ID NO:463 is a clone designated herein as “DNA329148”.

[0524] FIG. 464 shows the amino acid sequence (SEQ ID NO:464) derived from the coding sequence of SEQ ID NO:463 shown in FIG. 463.

[0525] FIG. 465 shows a nucleotide sequence (SEQ ID NO:465) of a native sequence PRO12481 cDNA, wherein SEQ ID NO:465 is a clone designated herein as “DNA150812”.

[0526] FIG. 466 shows the amino acid sequence (SEQ ID NO:466) derived from the coding sequence of SEQ ID NO:465 shown in FIG. 465.

[0527] FIG. 467 shows a nucleotide sequence (SEQ ID NO:467) of a native sequence PRO4854 cDNA, wherein SEQ ID NO:467 is a clone designated herein as “DNA103527”.

[0528] FIG. 468 shows the amino acid sequence (SEQ ID NO:468) derived from the coding sequence of SEQ ID NO:467 shown in FIG. 467.

[0529] FIG. 469 shows a nucleotide sequence (SEQ ID NO:469) of a native sequence PRO37040 cDNA, wherein SEQ ID NO:469 is a clone designated herein as “DNA226577”.

[0530] FIG. 470 shows the amino acid sequence (SEQ ID NO:470) derived from the coding sequence of SEQ ID NO:469 shown in FIG. 469.

[0531] FIG. 471 shows a nucleotide sequence (SEQ ID NO:471) of a native sequence PRO61763 cDNA, wherein SEQ ID NO:471 is a clone designated herein as “DNA273802”.

[0532] FIG. 472 shows the amino acid sequence (SEQ ID NO:472) derived from the coding sequence of SEQ ID NO:471 shown in FIG. 471.

[0533] FIG. 473 shows a nucleotide sequence (SEQ ID NO:473) of a native sequence PRO20111 cDNA, wherein SEQ ID NO:473 is a clone designated herein as “DNA329149”.

[0534] FIG. 474 shows the amino acid sequence (SEQ ID NO:474) derived from the coding sequence of SEQ ID NO:473 shown in FIG. 473.

[0535] FIG. 475 shows a nucleotide sequence (SEQ ID NO:475) of a native sequence PRO4793 cDNA, wherein SEQ ID NO:475 is a clone designated herein as “DNA325800”.

[0536] FIG. 476 shows the amino acid sequence (SEQ ID NO:476) derived from the coding sequence of SEQ ID NO:475 shown in FIG. 475.

[0537] FIG. 477 shows a nucleotide sequence (SEQ ID NO:477) of a native sequence PRO84783 cDNA, wherein SEQ ID NO:477 is a clone designated herein as “DNA329150”.

[0538] FIG. 478 shows the amino acid sequence (SEQ ID NO:478) derived from the coding sequence of SEQ ID NO:477 shown in FIG. 477.

[0539] FIG. 479 shows a nucleotide sequence (SEQ ID NO:479) of a native sequence PRO84703 cDNA, wherein SEQ ID NO:479 is a clone designated herein as “DNA329036”.

[0540] FIG. 480 shows the amino acid sequence (SEQ ID NO:480) derived from the coding sequence of SEQ ID NO:479 shown in FIG. 479.

[0541] FIG. 481 shows a nucleotide sequence (SEQ ID NO:481) of a native sequence PRO12173 cDNA, wherein SEQ ID NO:481 is a clone designated herein as “DNA151067”.

[0542] FIG. 482 shows the amino acid sequence (SEQ ID NO:482) derived from the coding sequence of SEQ ID NO:481 shown in FIG. 481.

[0543] FIG. 483 shows a nucleotide sequence (SEQ ID NO:483) of a native sequence PRO36542 cDNA, wherein SEQ ID NO:483 is a clone designated herein as “DNA226079”.

[0544] FIG. 484 shows the amino acid sequence (SEQ ID NO:484) derived from the coding sequence of SEQ ID NO:483 shown in FIG. 483.

[0545] FIG. 485 shows a nucleotide sequence (SEQ ID NO:485) of a native sequence PRO37560 cDNA, wherein SEQ ID NO:485 is a clone designated herein as “DNA227097”.

[0546] FIG. 486 shows the amino acid sequence (SEQ ID NO:486) derived from the coding sequence of SEQ ID NO:485 shown in FIG. 485.

[0547] FIG. 487 shows a nucleotide sequence (SEQ ID NO:487) of a native sequence PRO84784 cDNA, wherein SEQ ID NO:487 is a clone designated herein as “DNA329151”.

[0548] FIG. 488 shows the amino acid sequence (SEQ ID NO:488) derived from the coding sequence of SEQ ID NO:487 shown in FIG. 487.

[0549] FIG. 489 shows a nucleotide sequence (SEQ ID NO:489) of a native sequence PRO84785 cDNA, wherein SEQ ID NO:489 is a clone designated herein as “DNA329152”.

[0550] FIG. 490 shows the amino acid sequence (SEQ ID NO:490) derived from the coding sequence of SEQ ID NO:489 shown in FIG. 489.

[0551] FIG. 491 shows a nucleotide sequence (SEQ ID NO:491) of a native sequence PRO81753 cDNA, wherein SEQ ID NO:491 is a clone designated herein as “DNA325192”.

[0552] FIG. 492 shows the amino acid sequence (SEQ ID NO:492) derived from the coding sequence of SEQ ID NO:491 shown in FIG. 491.

[0553] FIG. 493 shows a nucleotide sequence (SEQ ID NO:493) of a native sequence PRO84786 cDNA, wherein SEQ ID NO:493 is a clone designated herein as “DNA329153”.

[0554] FIG. 494 shows the amino acid sequence (SEQ ID NO:494) derived from the coding sequence of SEQ ID NO:493 shown in FIG. 493.

[0555] FIG. 495 shows a nucleotide sequence (SEQ ID NO:495) of a native sequence PRO69568 cDNA, wherein SEQ ID NO:495 is a clone designated herein as “DNA329154”.

[0556] FIG. 496 shows the amino acid sequence (SEQ ID NO:496) derived from the coding sequence of SEQ ID NO:495 shown in FIG. 495.

[0557] FIG. 497 shows a nucleotide sequence (SEQ ID NO:497) of a native sequence PRO1207 cDNA, wherein SEQ ID NO:497 is a clone designated herein as “DNA329155”.

[0558] FIG. 498 shows the amino acid sequence (SEQ ID NO:498) derived from the coding sequence of SEQ ID NO:497 shown in FIG. 497.

[0559] FIG. 499 shows a nucleotide sequence (SEQ ID NO:499) of a native sequence PRO84787 cDNA, wherein SEQ ID NO:499 is a clone designated herein as “DNA329156”.

[0560] FIG. 500 shows the amino acid sequence (SEQ ID NO:500) derived from the coding sequence of SEQ ID NO:499 shown in FIG. 499.

[0561] FIG. 501 shows a nucleotide sequence (SEQ ID NO:501) of a native sequence PRO49183 cDNA, wherein SEQ ID NO:501 is a clone designated herein as “DNA253585”.

[0562] FIG. 502 shows the amino acid sequence (SEQ ID NO:502) derived from the coding sequence of SEQ ID NO:501 shown in FIG. 501.

[0563] FIG. 503 shows a nucleotide sequence (SEQ ID NO:503) of a native sequence PRO60670 cDNA, wherein SEQ ID NO:503 is a clone designated herein as “DNA272417”.

[0564] FIG. 504 shows the amino acid sequence (SEQ ID NO:504) derived from the coding sequence of SEQ ID NO:503 shown in FIG. 503.

[0565] FIG. 505 shows a nucleotide sequence (SEQ ID NO:505) of a native sequence PRO62861 cDNA, wherein SEQ ID NO:505 is a clone designated herein as “DNA329157”.

[0566] FIG. 506 shows the amino acid sequence (SEQ ID NO:506) derived from the coding sequence of SEQ ID NO:505 shown in FIG. 505.

[0567] FIG. 507 shows a nucleotide sequence (SEQ ID NO:507) of a native sequence PRO2536 cDNA, wherein SEQ ID NO:507 is a clone designated herein as “DNA76503”.

[0568] FIG. 508 shows the amino acid sequence (SEQ ID NO:508) derived from the coding sequence of SEQ ID NO:507 shown in FIG. 507.

[0569] FIG. 509 shows a nucleotide sequence (SEQ ID NO:509) of a native sequence PRO38477 cDNA, wherein SEQ ID NO:509 is a clone designated herein as “DNA228014”.

[0570] FIG. 510 shows the amino acid sequence (SEQ ID NO:510) derived from the coding sequence of SEQ ID NO:509 shown in FIG. 509.

[0571] FIG. 511 shows a nucleotide sequence (SEQ ID NO:511) of a native sequence PRO12243 cDNA, wherein SEQ ID NO:511 is a clone designated herein as “DNA150427”.

[0572] FIG. 512 shows the amino acid sequence (SEQ ID NO:512) derived from the coding sequence of SEQ ID NO:511 shown in FIG. 511.

[0573] FIG. 513 shows a nucleotide sequence (SEQ ID NO:513) of a native sequence PRO84788 cDNA, wherein SEQ ID NO:513 is a clone designated herein as “DNA329158”.

[0574] FIG. 514 shows the amino acid sequence (SEQ ID NO:514) derived from the coding sequence of SEQ ID NO:513 shown in FIG. 513.

[0575] FIG. 515 shows a nucleotide sequence (SEQ ID NO:515) of a native sequence PRO4660 cDNA, wherein SEQ ID NO:515 is a clone designated herein as “DNA329159”.

[0576] FIG. 516 shows the amino acid sequence (SEQ ID NO:516) derived from the coding sequence of SEQ ID NO:515 shown in FIG. 515.

[0577] FIG. 517 shows a nucleotide sequence (SEQ ID NO:517) of a native sequence PRO81585 cDNA, wherein SEQ ID NO:517 is a clone designated herein as “DNA324991”.

[0578] FIG. 518 shows the amino acid sequence (SEQ ID NO:518) derived from the coding sequence of SEQ ID NO:517 shown in FIG. 517.

[0579] FIG. 519 shows a nucleotide sequence (SEQ ID NO:519) of a native sequence PRO83635 cDNA, wherein SEQ ID NO:519 is a clone designated herein as “DNA327632”.

[0580] FIG. 520 shows the amino acid sequence (SEQ ID NO:520) derived from the coding sequence of SEQ ID NO:519 shown in Figure.

[0581] FIG. 521 shows a nucleotide sequence (SEQ ID NO:521) of a native sequence PRO21960 cDNA, wherein SEQ ID NO:521 is a clone designated herein as “DNA192060”.

[0582] FIG. 522 shows the amino acid sequence (SEQ ID NO:522) derived from the coding sequence of SEQ ID NO:521 shown in FIG. 521.

[0583] FIG. 523 shows a nucleotide sequence (SEQ ID NO:523) of a native sequence PRO62760 cDNA, wherein SEQ ID NO:523 is a clone designated herein as “DNA299899”.

[0584] FIG. 524 shows the amino acid sequence (SEQ ID NO:524) derived from the coding sequence of SEQ ID NO:523 shown in FIG. 523.

[0585] FIG. 525 shows a nucleotide sequence (SEQ ID NO:525) of a native sequence PRO84789 cDNA, wherein SEQ ID NO:525 is a clone designated herein as “DNA329160”.

[0586] FIG. 526 shows the amino acid sequence (SEQ ID NO:526) derived from the coding sequence of SEQ ID NO:525 shown in FIG. 525.

[0587] FIG. 527 shows a nucleotide sequence (SEQ ID NO:527) of a native sequence PRO21708 cDNA, wherein SEQ ID NO:527 is a clone designated herein as “DNA188333”.

[0588] FIG. 528 shows the amino acid sequence (SEQ ID NO:528) derived from the coding sequence of SEQ ID NO:527 shown in FIG. 527.

[0589] FIG. 529 shows a nucleotide sequence (SEQ ID NO:529) of a native sequence PRO37544 cDNA, wherein SEQ ID NO:529 is a clone designated herein as “DNA227081”.

[0590] FIG. 530 shows the amino acid sequence (SEQ ID NO:530) derived from the coding sequence of SEQ ID NO:529 shown in Figure.

[0591] FIG. 531 shows a nucleotide sequence (SEQ ID NO:531) of a native sequence PRO37910 cDNA, wherein SEQ ID NO:531 is a clone designated herein as “DNA227447”.

[0592] FIG. 532 shows the amino acid sequence (SEQ ID NO:532) derived from the coding sequence of SEQ ID NO:531 shown in FIG. 531.

[0593] FIG. 533 shows a nucleotide sequence (SEQ ID NO:533) of a native sequence PRO21834 cDNA, wherein SEQ ID NO:533 is a clone designated herein as “DNA188301”.

[0594] FIG. 534 shows the amino acid sequence (SEQ ID NO:534) derived from the coding sequence of SEQ ID NO:533 shown in FIG. 533.

[0595] FIG. 535 shows a nucleotide sequence (SEQ ID NO:535) of a native sequence PRO37636 cDNA, wherein SEQ ID NO:535 is a clone designated herein as “DNA227173”.

[0596] FIG. 536 shows the amino acid sequence (SEQ ID NO:536) derived from the coding sequence of SEQ ID NO:535 shown in FIG. 535.

[0597] FIG. 537 shows a nucleotide sequence (SEQ ID NO:537) of a native sequence PRO84790 cDNA, wherein SEQ ID NO:537 is a clone designated herein as “DNA329161”.

[0598] FIG. 538 shows the amino acid sequence (SEQ ID NO:538) derived from the coding sequence of SEQ ID NO:537 shown in FIG. 537.

[0599] FIG. 539 shows a nucleotide sequence (SEQ ID NO:539) of a native sequence PRO21885 cDNA, wherein SEQ ID NO:539 is a clone designated herein as “DNA188355”.

[0600] FIG. 540 shows the amino acid sequence (SEQ ID NO:540) derived from the coding sequence of SEQ ID NO:539 shown in FIG. 539.

[0601] FIG. 541 shows a nucleotide sequence (SEQ ID NO:541) of a native sequence PRO51301 cDNA, wherein SEQ ID NO:541 is a clone designated herein as “DNA256257”.

[0602] FIG. 542 shows the amino acid sequence (SEQ ID NO:542) derived from the coding sequence of SEQ ID NO:541 shown in FIG. 541.

[0603] FIG. 543 shows a nucleotide sequence (SEQ ID NO:543) of a native sequence PRO60077 cDNA, wherein SEQ ID NO:543 is a clone designated herein as “DNA329162”.

[0604] FIG. 544 shows the amino acid sequence (SEQ ID NO:544) derived from the coding sequence of SEQ ID NO:543 shown in FIG. 543.

[0605] FIG. 545 shows a nucleotide sequence (SEQ ID NO:545) of a native sequence PRO83644 cDNA, wherein SEQ ID NO:545 is a clone designated herein as “DNA327643”.

[0606] FIG. 546 shows the amino acid sequence (SEQ ID NO:546) derived from the coding sequence of SEQ ID NO:545 shown in FIG. 545.

[0607] FIG. 547 shows a nucleotide sequence (SEQ ID NO:547) of a native sequence cDNA, wherein SEQ ID NO:547 is a clone designated herein as “DNA329163”.

[0608] FIG. 548 shows a nucleotide sequence (SEQ ID NO:548) of a native sequence PRO84792 cDNA, wherein SEQ ID NO:548 is a clone designated herein as “DNA329164”.

[0609] FIG. 549 shows the amino acid sequence (SEQ ID NO:549) derived from the coding sequence of SEQ ID NO:548 shown in FIG. 548.

[0610] FIG. 550 shows a nucleotide sequence (SEQ ID NO:550) of a native sequence PRO81000 cDNA, wherein SEQ ID NO:550 is a clone designated herein as “DNA324324”.

[0611] FIG. 551 shows the amino acid sequence (SEQ ID NO:551) derived from the coding sequence of SEQ ID NO:550 shown in FIG. 550.

[0612] FIG. 552 shows a nucleotide sequence (SEQ ID NO:552) of a native sequence PRO37843 cDNA, wherein SEQ ID NO:552 is a clone designated herein as “DNA328570”.

[0613] FIG. 553 shows the amino acid sequence (SEQ ID NO:553) derived from the coding sequence of SEQ ID NO:552 shown in FIG. 552.

[0614] FIG. 554 shows a nucleotide sequence (SEQ ID NO:554) of a native sequence PRO63054 cDNA, wherein SEQ ID NO:554 is a clone designated herein as “DNA329165”.

[0615] FIG. 555 shows the amino acid sequence (SEQ ID NO:555) derived from the coding sequence of SEQ ID NO:554 shown in FIG. 554.

[0616] FIG. 556 shows a nucleotide sequence (SEQ ID NO:556) of a native sequence PRO12374 cDNA, wherein SEQ ID NO:556 is a clone designated herein as “DNA150621”.

[0617] FIG. 557 shows the amino acid sequence (SEQ ID NO:557) derived from the coding sequence of SEQ ID NO:556 shown in FIG. 556.

[0618] FIG. 558 shows a nucleotide sequence (SEQ ID NO:558) of a native sequence PRO2541 cDNA, wherein SEQ ID NO:558 is a clone designated herein as “DNA76517”.

[0619] FIG. 559 shows the amino acid sequence (SEQ ID NO:559) derived from the coding sequence of SEQ ID NO:558 shown in FIG. 558.

[0620] FIG. 560 shows a nucleotide sequence (SEQ ID NO:560) of a native sequence PRO4940 cDNA, wherein SEQ ID NO:560 is a clone designated herein as “DNA328576”.

[0621] FIG. 561 shows the amino acid sequence (SEQ ID NO:561) derived from the coding sequence of SEQ ID NO:560 shown in FIG. 560.

[0622] FIG. 562 shows a nucleotide sequence (SEQ ID NO:562) of a native sequence PRO2524 cDNA, wherein SEQ ID NO:562 is a clone designated herein as “DNA75525”.

[0623] FIG. 563 shows the amino acid sequence (SEQ ID NO:563) derived from the coding sequence of SEQ ID NO:562 shown in FIG. 562.

[0624] FIG. 564 shows a nucleotide sequence (SEQ ID NO:564) of a native sequence PRO59203 cDNA, wherein SEQ ID NO:564 is a clone designated herein as “DNA270867”.

[0625] FIG. 565 shows the amino acid sequence (SEQ ID NO:565) derived from the coding sequence of SEQ ID NO:564 shown in FIG. 564.

[0626] FIG. 566 shows a nucleotide sequence (SEQ ID NO:566) of a native sequence PRO2022 cDNA, wherein SEQ ID NO:566 is a clone designated herein as “DNA76516”.

[0627] FIG. 567 shows the amino acid sequence (SEQ ID NO:567) derived from the coding sequence of SEQ ID NO:566 shown in FIG. 566.

[0628] FIG. 568 shows a nucleotide sequence (SEQ ID NO:568) of a native sequence PRO58425 cDNA, wherein SEQ ID NO:568 is a clone designated herein as “DNA329047”.

[0629] FIG. 569 shows the amino acid sequence (SEQ ID NO:569) derived from the coding sequence of SEQ ID NO:568 shown in FIG. 568.

[0630] FIG. 570 shows a nucleotide sequence (SEQ ID NO:570) of a native sequence PRO4611 cDNA, wherein SEQ ID NO:570 is a clone designated herein as “DNA103281”.

[0631] FIG. 571 shows the amino acid sequence (SEQ ID NO:571) derived from the coding sequence of SEQ ID NO:570 shown in FIG. 570.

[0632] FIG. 572 shows a nucleotide sequence (SEQ ID NO:572) of a native sequence PRO84793 cDNA, wherein SEQ ID NO:572 is a clone designated herein as “DNA329166”.

[0633] FIG. 573 shows the amino acid sequence (SEQ ID NO:573) derived from the coding sequence of SEQ ID NO:572 shown in FIG. 572.

[0634] FIG. 574 shows a nucleotide sequence (SEQ ID NO:574) of a native sequence PRO2068 cDNA, wherein SEQ ID NO:574 is a clone designated herein as “DNA83063”.

[0635] FIG. 575 shows the amino acid sequence (SEQ ID NO:575) derived from the coding sequence of SEQ ID NO:574 shown in FIG. 574.

[0636] FIG. 576 shows a nucleotide sequence (SEQ ID NO:576) of a native sequence PRO12876 cDNA, wherein SEQ ID NO:576 is a clone designated herein as “DNA151420”.

[0637] FIG. 577 shows the amino acid sequence (SEQ ID NO:577) derived from the coding sequence of SEQ ID NO:576 shown in FIG. 576.

[0638] FIG. 578 shows a nucleotide sequence (SEQ ID NO:578) of a native sequence PRO38147 cDNA, wherein SEQ ID NO:578 is a clone designated herein as “DNA327657”.

[0639] FIG. 579 shows the amino acid sequence (SEQ ID NO:579) derived from the coding sequence of SEQ ID NO:578 shown in FIG. 578.

[0640] FIG. 580 shows a nucleotide sequence (SEQ ID NO:580) of a native sequence PRO4933 cDNA, wherein SEQ ID NO:580 is a clone designated herein as “DNA329167”.

[0641] FIG. 581 shows the amino acid sequence (SEQ ID NO:581) derived from the coding sequence of SEQ ID NO:580 shown in FIG. 580.

[0642] FIG. 582 shows a nucleotide sequence (SEQ ID NO:582) of a native sequence PRO12612 cDNA, wherein SEQ ID NO:582 is a clone designated herein as “DNA329005”.

[0643] FIG. 583 shows the amino acid sequence (SEQ ID NO:583) derived from the coding sequence of SEQ ID NO:582 shown in FIG. 582.

[0644] FIG. 584 shows a nucleotide sequence (SEQ ID NO:584) of a native sequence PRO84794 cDNA, wherein SEQ ID NO:584 is a clone designated herein as “DNA329168”.

[0645] FIG. 585 shows the amino acid sequence (SEQ ID NO:585) derived from the coding sequence of SEQ ID NO:584 shown in FIG. 584.

[0646] FIG. 586 shows a nucleotide sequence (SEQ ID NO:586) of a native sequence PRO36521 cDNA, wherein SEQ ID NO:586 is a clone designated herein as “DNA226058”.

[0647] FIG. 587 shows the amino acid sequence (SEQ ID NO:587) derived from the coding sequence of SEQ ID NO:586 shown in FIG. 586.

[0648] FIG. 588 shows a nucleotide sequence (SEQ ID NO:588) of a native sequence PRO34330 cDNA, wherein SEQ ID NO:588 is a clone designated herein as “DNA218278”.

[0649] FIG. 589 shows the amino acid sequence (SEQ ID NO:589) derived from the coding sequence of SEQ ID NO:588 shown in FIG. 588.

[0650] FIG. 590 shows a nucleotide sequence (SEQ ID NO:590) of a native sequence PRO37671 cDNA, wherein SEQ ID NO:590 is a clone designated herein as “DNA227208”.

[0651] FIG. 591 shows the amino acid sequence (SEQ ID NO:591) derived from the coding sequence of SEQ ID NO:590 shown in FIG. 590.

[0652] FIG. 592 shows a nucleotide sequence (SEQ ID NO:592) of a native sequence PRO1610 cDNA, wherein SEQ ID NO:592 is a clone designated herein as “DNA329169”.

[0653] FIG. 593 shows the amino acid sequence (SEQ ID NO:593) derived from the coding sequence of SEQ ID NO:592 shown in FIG. 592.

[0654] FIG. 594 shows a nucleotide sequence (SEQ ID NO:594) of a native sequence PRO24922 cDNA, wherein SEQ ID NO:594 is a clone designated herein as “DNA196424”.

[0655] FIG. 595 shows the amino acid sequence (SEQ ID NO:595) derived from the coding sequence of SEQ ID NO:594 shown in FIG. 594.

[0656] FIG. 596 shows a nucleotide sequence (SEQ ID NO:596) of a native sequence PRO83069 cDNA, wherein SEQ ID NO:596 is a clone designated herein as “DNA326727”.

[0657] FIG. 597 shows the amino acid sequence (SEQ ID NO:597) derived from the coding sequence of SEQ ID NO:596 shown in FIG. 596.

[0658] FIG. 598 shows a nucleotide sequence (SEQ ID NO:598) of a native sequence PRO70938 cDNA, wherein SEQ ID NO:598 is a clone designated herein as “DNA329170”.

[0659] FIG. 599 shows the amino acid sequence (SEQ ID NO:599) derived from the coding sequence of SEQ ID NO:598 shown in FIG. 598.

[0660] FIG. 600 shows a nucleotide sequence (SEQ ID NO:600) of a native sequence PRO84795 cDNA, wherein SEQ ID NO:600 is a clone designated herein as “DNA329171”.

[0661] FIG. 601 shows the amino acid sequence (SEQ ID NO:601) derived from the coding sequence of SEQ ID NO:600 shown in FIG. 600.

[0662] FIG. 602 shows a nucleotide sequence (SEQ ID NO:602) of a native sequence PRO84796 cDNA, wherein SEQ ID NO:602 is a clone designated herein as “DNA329172”.

[0663] FIG. 603 shows the amino acid sequence (SEQ ID NO:603) derived from the coding sequence of SEQ ID NO:602 shown in FIG. 602.

[0664] FIG. 604 shows a nucleotide sequence (SEQ ID NO:604) of a native sequence PRO83141 cDNA, wherein SEQ ID NO:604 is a clone designated herein as “DNA329173”.

[0665] FIG. 605 shows the amino acid sequence (SEQ ID NO:605) derived from the coding sequence of SEQ ID NO:604 shown in FIG. 604.

[0666] FIG. 606 shows a nucleotide sequence (SEQ ID NO:606) of a native sequence PRO2768 cDNA, wherein SEQ ID NO:606 is a clone designated herein as “DNA88374”.

[0667] FIG. 607 shows the amino acid sequence (SEQ ID NO:607) derived from the coding sequence of SEQ ID NO:606 shown in FIG. 606.

[0668] FIG. 608 shows a nucleotide sequence (SEQ ID NO:608) of a native sequence PRO84797 cDNA, wherein SEQ ID NO:608 is a clone designated herein as “DNA329174”.

[0669] FIG. 609 shows the amino acid sequence (SEQ ID NO:609) derived from the coding sequence of SEQ ID NO:608 shown in FIG. 608.

[0670] FIG. 610 shows a nucleotide sequence (SEQ ID NO:610) of a native sequence PRO49572 cDNA, wherein SEQ ID NO:610 is a clone designated herein as “DNA254464”.

[0671] FIG. 611 shows the amino acid sequence (SEQ ID NO:611) derived from the coding sequence of SEQ ID NO:610 shown in FIG. 610.

[0672] FIG. 612 shows a nucleotide sequence (SEQ ID NO:612) of a native sequence PRO2693 cDNA, wherein SEQ ID NO:612 is a clone designated herein as “DNA88195”.

[0673] FIG. 613 shows the amino acid sequence (SEQ ID NO:613) derived from the coding sequence of SEQ ID NO:612 shown in FIG. 612.

[0674] FIG. 614 shows a nucleotide sequence (SEQ ID NO:614) of a native sequence PRO60433 cDNA, wherein SEQ ID NO:614 is a clone designated herein as “DNA272165”.

[0675] FIG. 615 shows the amino acid sequence (SEQ ID NO:615) derived from the coding sequence of SEQ ID NO:614 shown in FIG. 614.

[0676] FIG. 616 shows a nucleotide sequence (SEQ ID NO:616) of a native sequence PRO51592 cDNA, wherein SEQ ID NO:616 is a clone designated herein as “DNA256561”.

[0677] FIG. 617 shows the amino acid sequence (SEQ ID NO:617) derived from the coding sequence of SEQ ID NO:616 shown in FIG. 616.

[0678] FIG. 618 shows a nucleotide sequence (SEQ ID NO:618) of a native sequence PRO84798 cDNA, wherein SEQ ID NO:618 is a clone designated herein as “DNA329175”.

[0679] FIG. 619 shows the amino acid sequence (SEQ ID NO:619) derived from the coding sequence of SEQ ID NO:618 shown in FIG. 618.

[0680] FIG. 620 shows a nucleotide sequence (SEQ ID NO:620) of a native sequence PRO7 cDNA, wherein SEQ ID NO: is a clone designated herein as “DNA35629”.

[0681] FIG. 621 shows the amino acid sequence (SEQ ID NO:621) derived from the coding sequence of SEQ ID NO:620 shown in FIG. 620.

[0682] FIG. 622 shows a nucleotide sequence (SEQ ID NO:622) of a native sequence PRO84376 cDNA, wherein SEQ ID NO:622 is a clone designated herein as “DNA328591”.

[0683] FIG. 623 shows the amino acid sequence (SEQ ID NO:623) derived from the coding sequence of SEQ ID NO:622 shown in FIG. 622.

[0684] FIG. 624 shows a nucleotide sequence (SEQ ID NO:624) of a native sequence PRO38213 cDNA, wherein SEQ ID NO:624 is a clone designated herein as “DNA227750”.

[0685] FIG. 625 shows the amino acid sequence (SEQ ID NO:625) derived from the coding sequence of SEQ ID NO:624 shown in FIG. 624.

[0686] FIG. 626 shows a nucleotide sequence (SEQ ID NO:626) of a native sequence PRO61201 cDNA, wherein SEQ ID NO:626 is a clone designated herein as “DNA273159”.

[0687] FIG. 627 shows the amino acid sequence (SEQ ID NO:627) derived from the coding sequence of SEQ ID NO:626 shown in FIG. 626.

[0688] FIG. 628 shows a nucleotide sequence (SEQ ID NO:628) of a native sequence PRO84799 cDNA, wherein SEQ ID NO:628 is a clone designated herein as “DNA329176”.

[0689] FIG. 629 shows the amino acid sequence (SEQ ID NO:629) derived from the coding sequence of SEQ ID NO:628 shown in FIG. 628.

[0690] FIG. 630 shows a nucleotide sequence (SEQ ID NO:630) of a native sequence PRO34451 cDNA, wherein SEQ ID NO:630 is a clone designated herein as “DNA218655”.

[0691] FIG. 631 shows the amino acid sequence (SEQ ID NO:631) derived from the coding sequence of SEQ ID NO:630 shown in FIG. 630.

[0692] FIG. 632 shows a nucleotide sequence (SEQ ID NO:632) of a native sequence PRO83661 cDNA, wherein SEQ ID NO:632 is a clone designated herein as “DNA327674”.

[0693] FIG. 633 shows the amino acid sequence (SEQ ID NO:633) derived from the coding sequence of SEQ ID NO:632 shown in FIG. 632.

[0694] FIG. 634 shows a nucleotide sequence (SEQ ID NO:634) of a native sequence PRO84800 cDNA, wherein SEQ ID NO:634 is a clone designated herein as “DNA329177”.

[0695] FIG. 635 shows the amino acid sequence (SEQ ID NO:635) derived from the coding sequence of SEQ ID NO:634 shown in FIG. 634.

[0696] FIG. 636 shows a nucleotide sequence (SEQ ID NO:636) of a native sequence PRO38214 cDNA, wherein SEQ ID NO:636 is a clone designated herein as “DNA227751”.

[0697] FIG. 637 shows the amino acid sequence (SEQ ID NO:637) derived from the coding sequence of SEQ ID NO:636 shown in FIG. 636.

[0698] FIG. 638 shows a nucleotide sequence (SEQ ID NO:638) of a native sequence PRO36999 cDNA, wherein SEQ ID NO:638 is a clone designated herein as “DNA226536”.

[0699] FIG. 639 shows the amino acid sequence (SEQ ID NO:639) derived from the coding sequence of SEQ ID NO:638 shown in FIG. 638.

[0700] FIG. 640 shows a nucleotide sequence (SEQ ID NO:640) of a native sequence PRO36859 cDNA, wherein SEQ ID NO:640 is a clone designated herein as “DNA226396”.

[0701] FIG. 641 shows the amino acid sequence (SEQ ID NO:641) derived from the coding sequence of SEQ ID NO:640 shown in FIG. 640.

[0702] FIG. 642 shows a nucleotide sequence (SEQ ID NO:642) of a native sequence PRO73 cDNA, wherein SEQ ID NO:642 is a clone designated herein as “DNA36718”.

[0703] FIG. 643 shows the amino acid sequence (SEQ ID NO:643) derived from the coding sequence of SEQ ID NO:642 shown in FIG. 642.

[0704] FIG. 644 shows a nucleotide sequence (SEQ ID NO:644) of a native sequence PRO848001 cDNA, wherein SEQ ID NO:644 is a clone designated herein as “DNA329178”.

[0705] FIG. 645 shows the amino acid sequence (SEQ ID NO:645) derived from the coding sequence of SEQ ID NO:644 shown in FIG. 644.

[0706] FIG. 646 shows a nucleotide sequence (SEQ ID NO:646) of a native sequence PRO84381 cDNA, wherein SEQ ID NO:646 is a clone designated herein as “DNA328597”.

[0707] FIG. 647 shows the amino acid sequence (SEQ ID NO:647) derived from the coding sequence of SEQ ID NO:646 shown in FIG. 646.

[0708] FIG. 648 shows a nucleotide sequence (SEQ ID NO:648) of a native sequence PRO2023 cDNA, wherein SEQ ID NO:648 is a clone designated herein as “DNA304473”.

[0709] FIG. 649 shows the amino acid sequence (SEQ ID NO:649) derived from the coding sequence of SEQ ID NO:648 shown in Figure.

[0710] FIG. 650 shows a nucleotide sequence (SEQ ID NO:650) of a native sequence PRO84383 cDNA, wherein SEQ ID NO:650 is a clone designated herein as “DNA328600”.

[0711] FIG. 651 shows the amino acid sequence (SEQ ID NO:651) derived from the coding sequence of SEQ ID NO:650 shown in FIG. 650.

[0712] FIG. 652 shows a nucleotide sequence (SEQ ID NO:652) of a native sequence PRO84384 cDNA, wherein SEQ ID NO:652 is a clone designated herein as “DNA328601”.

[0713] FIG. 653 shows the amino acid sequence (SEQ ID NO:653) derived from the coding sequence of SEQ ID NO:652 shown in FIG. 652.

[0714] FIG. 654 shows a nucleotide sequence (SEQ ID NO:654) of a native sequence PRO36800 cDNA, wherein SEQ ID NO:654 is a clone designated herein as “DNA226337”.

[0715] FIG. 655 shows the amino acid sequence (SEQ ID NO:655) derived from the coding sequence of SEQ ID NO:654 shown in FIG. 654.

[0716] FIG. 656 shows a nucleotide sequence (SEQ ID NO:656) of a native sequence PRO37797 cDNA, wherein SEQ ID NO:656 is a clone designated herein as “DNA227334”.

[0717] FIG. 657 shows the amino acid sequence (SEQ ID NO:657) derived from the coding sequence of SEQ ID NO:656 shown in FIG. 656.

[0718] FIG. 658 shows a nucleotide sequence (SEQ ID NO:658) of a native sequence PRO24924 cDNA, wherein SEQ ID NO:658 is a clone designated herein as “DNA196426”.

[0719] FIG. 659 shows the amino acid sequence (SEQ ID NO:659) derived from the coding sequence of SEQ ID NO:658 shown in FIG. 658.

[0720] FIG. 660 shows a nucleotide sequence (SEQ ID NO:660) of a native sequence PRO84802 cDNA, wherein SEQ ID NO:660 is a clone designated herein as “DNA329179”.

[0721] FIG. 661 shows the amino acid sequence (SEQ ID NO:661) derived from the coding sequence of SEQ ID NO:660 shown in FIG. 660.

[0722] FIG. 662 shows a nucleotide sequence (SEQ ID NO:662) of a native sequence PRO37393 cDNA, wherein SEQ ID NO:662 is a clone designated herein as “DNA226930”.

[0723] FIG. 663 shows the amino acid sequence (SEQ ID NO:663) derived from the coding sequence of SEQ ID NO:662 shown in FIG. 662.

[0724] FIG. 664 shows a nucleotide sequence (SEQ ID NO:664) of a native sequence PRO84803 cDNA, wherein SEQ ID NO:664 is a clone designated herein as “DNA329180”.

[0725] FIG. 665 shows the amino acid sequence (SEQ ID NO:665) derived from the coding sequence of SEQ ID NO:664 shown in FIG. 664.

[0726] FIG. 666 shows a nucleotide sequence (SEQ ID NO:666) of a native sequence PRO84804 cDNA, wherein SEQ ID NO:666 is a clone designated herein as “DNA329181”.

[0727] FIG. 667 shows the amino acid sequence (SEQ ID NO:667) derived from the coding sequence of SEQ ID NO:666 shown in FIG. 666.

[0728] FIG. 668 shows a nucleotide sequence (SEQ ID NO:668) of a native sequence PRO84805 cDNA, wherein SEQ ID NO:668 is a clone designated herein as “DNA329182”.

[0729] FIG. 669 shows the amino acid sequence (SEQ ID NO:669) derived from the coding sequence of SEQ ID NO:668 shown in FIG. 668.

[0730] FIG. 670 shows a nucleotide sequence (SEQ ID NO:670) of a native sequence PRO21795 cDNA, wherein SEQ ID NO:670 is a clone designated herein as “DNA188271”.

[0731] FIG. 671 shows the amino acid sequence (SEQ ID NO:671) derived from the coding sequence of SEQ ID NO:670 shown in FIG. 670.

[0732] FIG. 672 shows a nucleotide sequence (SEQ ID NO:672) of a native sequence PRO34286 cDNA, wherein SEQ ID NO:672 is a clone designated herein as “DNA217244”.

[0733] FIG. 673 shows the amino acid sequence (SEQ ID NO:673) derived from the coding sequence of SEQ ID NO:672 shown in FIG. 672.

[0734] FIG. 674 shows a nucleotide sequence (SEQ ID NO:674) of a native sequence PRO34287 cDNA, wherein SEQ ID NO:674 is a clone designated herein as “DNA217245”.

[0735] FIG. 675 shows the amino acid sequence (SEQ ID NO:675) derived from the coding sequence of SEQ ID NO:674 shown in FIG. 674.

[0736] FIG. 676 shows a nucleotide sequence (SEQ ID NO:676) of a native sequence PRO34447 cDNA, wherein SEQ ID NO:676 is a clone designated herein as “DNA218651”.

[0737] FIG. 677 shows the amino acid sequence (SEQ ID NO:377) derived from the coding sequence of SEQ ID NO:676 shown in FIG. 676.

[0738] FIG. 678 shows a nucleotide sequence (SEQ ID NO:678) of a native sequence PRO36753 cDNA, wherein SEQ ID NO:678 is a clone designated herein as “DNA226290”.

[0739] FIG. 679 shows the amino acid sequence (SEQ ID NO:679) derived from the coding sequence of SEQ ID NO:678 shown in FIG. 678.

[0740] FIG. 680 shows a nucleotide sequence (SEQ ID NO:680) of a native sequence PRO84806 cDNA, wherein SEQ ID NO:680 is a clone designated herein as “DNA329183”.

[0741] FIG. 681 shows the amino acid sequence (SEQ ID NO:681) derived from the coding sequence of SEQ ID NO:680 shown in FIG. 680.

[0742] FIG. 682 shows a nucleotide sequence (SEQ ID NO:682) of a native sequence PRO84807 cDNA, wherein SEQ ID NO:682 is a clone designated herein as “DNA329184”.

[0743] FIG. 683 shows the amino acid sequence (SEQ ID NO:683) derived from the coding sequence of SEQ ID NO:682 shown in FIG. 682.

[0744] FIG. 684 shows a nucleotide sequence (SEQ ID NO:684) of a native sequence PRO37687 cDNA, wherein SEQ ID NO:684 is a clone designated herein as “DNA227224”.

[0745] FIG. 685 shows the amino acid sequence (SEQ ID NO:685) derived from the coding sequence of SEQ ID NO:684 shown in FIG. 684.

[0746] FIG. 686 shows a nucleotide sequence (SEQ ID NO:686) of a native sequence PRO61770 cDNA, wherein SEQ ID NO:686 is a clone designated herein as “DNA329185”.

[0747] FIG. 687 shows the amino acid sequence (SEQ ID NO:687) derived from the coding sequence of SEQ ID NO:686 shown in FIG. 686.

[0748] FIG. 688 shows a nucleotide sequence (SEQ ID NO:688) of a native sequence PRO80638 cDNA, wherein SEQ ID NO:688 is a clone designated herein as “DNA323896”.

[0749] FIG. 689 shows the amino acid sequence (SEQ ID NO:689) derived from the coding sequence of SEQ ID NO:688 shown in FIG. 688.

[0750] FIG. 690 shows a nucleotide sequence (SEQ ID NO:690) of a native sequence PRO84391 cDNA, wherein SEQ ID NO:690 is a clone designated herein as “DNA328609”.

[0751] FIG. 691 shows the amino acid sequence (SEQ ID NO:691) derived from the coding sequence of SEQ ID NO:690 shown in FIG. 690.

[0752] FIG. 692 shows a nucleotide sequence (SEQ ID NO:692) of a native sequence PRO81872 cDNA, wherein SEQ ID NO:692 is a clone designated herein as “DNA325329”.

[0753] FIG. 693 shows the amino acid sequence (SEQ ID NO:693) derived from the coding sequence of SEQ ID NO:692 shown in FIG. 692.

[0754] FIG. 694 shows a nucleotide sequence (SEQ ID NO:694) of a native sequence PRO72 cDNA, wherein SEQ ID NO:694 is a clone designated herein as “DNA36717”.

[0755] FIG. 695 shows the amino acid sequence (SEQ ID NO:695) derived from the coding sequence of SEQ ID NO:694 shown in FIG. 694.

[0756] FIG. 696 shows a nucleotide sequence (SEQ ID NO:696) of a native sequence PRO84393 cDNA, wherein SEQ ID NO:696 is a clone designated herein as “DNA328611”.

[0757] FIG. 697 shows the amino acid sequence (SEQ ID NO:697) derived from the coding sequence of SEQ ID NO:696 shown in FIG. 696.

[0758] FIG. 698 shows a nucleotide sequence (SEQ ID NO:698) of a native sequence PRO82391 cDNA, wherein SEQ ID NO:698 is a clone designated herein as “DNA325944”.

[0759] FIG. 699 shows the amino acid sequence (SEQ ID NO:699) derived from the coding sequence of SEQ ID NO:698 shown in FIG. 698.

[0760] FIG. 700 shows a nucleotide sequence (SEQ ID NO:700) of a native sequence PRO9824 cDNA, wherein SEQ ID NO:700 is a clone designated herein as “DNA327689”.

[0761] FIG. 701 shows the amino acid sequence (SEQ ID NO:701) derived from the coding sequence of SEQ ID NO:700 shown in FIG. 700.

[0762] FIG. 702 shows a nucleotide sequence (SEQ ID NO:702) of a native sequence PRO84808 cDNA, wherein SEQ ID NO:702 is a clone designated herein as “DNA329186”.

[0763] FIG. 703 shows the amino acid sequence (SEQ ID NO:703) derived from the coding sequence of SEQ ID NO:702 shown in FIG. 702.

[0764] FIG. 704 shows a nucleotide sequence (SEQ ID NO:704) of a native sequence PRO84809 cDNA, wherein SEQ ID NO:704 is a clone designated herein as “DNA329187”.

[0765] FIG. 705 shows the amino acid sequence (SEQ ID NO:705) derived from the coding sequence of SEQ ID NO:704 shown in FIG. 704.

[0766] FIG. 706 shows a nucleotide sequence (SEQ ID NO:706) of a native sequence PRO61545 cDNA, wherein SEQ ID NO:706 is a clone designated herein as “DNA273567”.

[0767] FIG. 707 shows the amino acid sequence (SEQ ID NO:707) derived from the coding sequence of SEQ ID NO:706 shown in FIG. 706.

[0768] FIG. 708 shows a nucleotide sequence (SEQ ID NO:708) of a native sequence PRO66271 cDNA, wherein SEQ ID NO:708 is a clone designated herein as “DNA281431”.

[0769] FIG. 709 shows the amino acid sequence (SEQ ID NO:709) derived from the coding sequence of SEQ ID NO:708 shown in FIG. 708.

[0770] FIG. 710 shows a nucleotide sequence (SEQ ID NO:710) of a native sequence PRO84810 cDNA, wherein SEQ ID NO:710 is a clone designated herein as “DNA329188”.

[0771] FIG. 711 shows the amino acid sequence (SEQ ID NO:711) derived from the coding sequence of SEQ ID NO:710 shown in FIG. 710.

[0772] FIG. 712 shows a nucleotide sequence (SEQ ID NO:712) of a native sequence PRO59579 cDNA, wherein SEQ ID NO:712 is a clone designated herein as “DNA271268”.

[0773] FIG. 713 shows the amino acid sequence (SEQ ID NO:713) derived from the coding sequence of SEQ ID NO:712 shown in FIG. 712.

[0774] FIG. 714 shows a nucleotide sequence (SEQ ID NO:714) of a native sequence PRO69487 cDNA, wherein SEQ ID NO:714 is a clone designated herein as “DNA287203”.

[0775] FIG. 715 shows the amino acid sequence (SEQ ID NO:715) derived from the coding sequence of SEQ ID NO:714 shown in FIG. 714.

[0776] FIG. 716 shows a nucleotide sequence (SEQ ID NO:716) of a native sequence PRO71112 cDNA, wherein SEQ ID NO:716 is a clone designated herein as “DNA304686”.

[0777] FIG. 717 shows the amino acid sequence (SEQ ID NO:717) derived from the coding sequence of SEQ ID NO:716 shown in FIG. 716.

[0778] FIG. 718 shows a nucleotide sequence (SEQ ID NO:718) of a native sequence PRO84401 cDNA, wherein SEQ ID NO:718 is a clone designated herein as “DNA328619”.

[0779] FIG. 719 shows the amino acid sequence (SEQ ID NO:719) derived from the coding sequence of SEQ ID NO:718 shown in FIG. 718.

[0780] FIG. 720 shows a nucleotide sequence (SEQ ID NO:720) of a native sequence PRO69475 cDNA, wherein SEQ ID NO:720 is a clone designated herein as “DNA287189”.

[0781] FIG. 721 shows the amino acid sequence (SEQ ID NO:721) derived from the coding sequence of SEQ ID NO:720 shown in FIG. 720.

[0782] FIG. 722 shows a nucleotide sequence (SEQ ID NO:722) of a native sequence PRO84710 cDNA, wherein SEQ ID NO:722 is a clone designated herein as “DNA329048”.

[0783] FIG. 723 shows the amino acid sequence (SEQ ID NO:723) derived from the coding sequence of SEQ ID NO:722 shown in FIG. 722.

[0784] FIG. 724 shows a nucleotide sequence (SEQ ID NO:724) of a native sequence PRO3645 cDNA, wherein SEQ ID NO:724 is a clone designated herein as “DNA97298”.

[0785] FIG. 725 shows the amino acid sequence (SEQ ID NO:725) derived from the coding sequence of SEQ ID NO:724 shown in FIG. 724.

[0786] FIG. 726 shows a nucleotide sequence (SEQ ID NO:726) of a native sequence PRO83679 cDNA, wherein SEQ ID NO:726 is a clone designated herein as “DNA327696”.

[0787] FIG. 727 shows the amino acid sequence (SEQ ID NO:727) derived from the coding sequence of SEQ ID NO:726 shown in FIG. 726.

[0788] FIG. 728 shows a nucleotide sequence (SEQ ID NO:728) of a native sequence PRO69684 cDNA, wherein SEQ ID NO:728 is a clone designated herein as “DNA287427”.

[0789] FIG. 729 shows the amino acid sequence (SEQ ID NO:729) derived from the coding sequence of SEQ ID NO:728 shown in FIG. 728.

[0790] FIG. 730 shows a nucleotide sequence (SEQ ID NO:730) of a native sequence PRO69498 cDNA, wherein SEQ ID NO:730 is a clone designated herein as “DNA287219”.

[0791] FIG. 731 shows the amino acid sequence (SEQ ID NO:731) derived from the coding sequence of SEQ ID NO:730 shown in FIG. 730.

[0792] FIG. 732 shows a nucleotide sequence (SEQ ID NO:732) of a native sequence PRO4911 cDNA, wherein SEQ ID NO:732 is a clone designated herein as “DNA329189”.

[0793] FIG. 733 shows the amino acid sequence (SEQ ID NO:733) derived from the coding sequence of SEQ ID NO:732 shown in FIG. 732.

[0794] FIG. 734 shows a nucleotide sequence (SEQ ID NO:734) of a native sequence PRO82935 cDNA, wherein SEQ ID NO:734 is a clone designated herein as “DNA326573”.

[0795] FIG. 735 shows the amino acid sequence (SEQ ID NO:735) derived from the coding sequence of SEQ ID NO:734 shown in FIG. 734.

[0796] FIG. 736 shows a nucleotide sequence (SEQ ID NO:736) of a native sequence PRO84403 cDNA, wherein SEQ ID NO:736 is a clone designated herein as “DNA328621”.

[0797] FIG. 737 shows the amino acid sequence (SEQ ID NO:737) derived from the coding sequence of SEQ ID NO:736 shown in FIG. 736.

[0798] FIG. 738 shows a nucleotide sequence (SEQ ID NO:738) of a native sequence PRO84811 cDNA, wherein SEQ ID NO:738 is a clone designated herein as “DNA329190”.

[0799] FIG. 739 shows the amino acid sequence (SEQ ID NO:739) derived from the coding sequence of SEQ ID NO:738 shown in FIG. 738.

[0800] FIG. 740 shows a nucleotide sequence (SEQ ID NO:740) of a native sequence PRO10404 cDNA, wherein SEQ ID NO:740 is a clone designated herein as “DNA287169”.

[0801] FIG. 741 shows the amino acid sequence (SEQ ID NO:741) derived from the coding sequence of SEQ ID NO:740 shown in FIG. 740.

[0802] FIG. 742 shows a nucleotide sequence (SEQ ID NO:742) of a native sequence PRO61502 cDNA, wherein SEQ ID NO:742 is a clone designated herein as “DNA273521”.

[0803] FIG. 743 shows the amino acid sequence (SEQ ID NO:743) derived from the coding sequence of SEQ ID NO:742 shown in FIG. 742.

[0804] FIG. 744 shows a nucleotide sequence (SEQ ID NO:744) of a native sequence PRO83682 cDNA, wherein SEQ ID NO:744 is a clone designated herein as “DNA327699”.

[0805] FIG. 745 shows the amino acid sequence (SEQ ID NO:745) derived from the coding sequence of SEQ ID NO:744 shown in Figure.

[0806] FIG. 746 shows a nucleotide sequence (SEQ ID NO:746) of a native sequence PRO80665 cDNA, wherein SEQ ID NO:746 is a clone designated herein as “DNA329191”.

[0807] FIG. 747 shows the amino acid sequence (SEQ ID NO:747) derived from the coding sequence of SEQ ID NO:746 shown in FIG. 746.

[0808] FIG. 748 shows a nucleotide sequence (SEQ ID NO:748) of a native sequence PRO38019 cDNA, wherein SEQ ID NO:748 is a clone designated herein as “DNA227556”.

[0809] FIG. 749 shows the amino acid sequence (SEQ ID NO:749) derived from the coding sequence of SEQ ID NO:748 shown in FIG. 748.

[0810] FIG. 750 shows a nucleotide sequence (SEQ ID NO:750) of a native sequence PRO38337 cDNA, wherein SEQ ID NO:750 is a clone designated herein as “DNA227874”.

[0811] FIG. 751 shows the amino acid sequence (SEQ ID NO:751) derived from the coding sequence of SEQ ID NO:750 shown in FIG. 750.

[0812] FIG. 752 shows a nucleotide sequence (SEQ ID NO:752) of a native sequence PRO83683 cDNA, wherein SEQ ID NO:752 is a clone designated herein as “DNA327700”.

[0813] FIG. 753 shows the amino acid sequence (SEQ ID NO:753) derived from the coding sequence of SEQ ID NO:752 shown in FIG. 752.

[0814] FIG. 754 shows a nucleotide sequence (SEQ ID NO:754) of a native sequence PRO82667 cDNA, wherein SEQ ID NO:754 is a clone designated herein as “DNA327701”.

[0815] FIG. 755 shows the amino acid sequence (SEQ ID NO:755) derived from the coding sequence of SEQ ID NO:754 shown in FIG. 754.

[0816] FIG. 756 shows a nucleotide sequence (SEQ ID NO:756) of a native sequence PRO83684 cDNA, wherein SEQ ID NO:756 is a clone designated herein as “DNA327702”.

[0817] FIG. 757 shows the amino acid sequence (SEQ ID NO:757) derived from the coding sequence of SEQ ID NO:756 shown in FIG. 576.

[0818] FIG. 758 shows a nucleotide sequence (SEQ ID NO:758) of a native sequence PRO70339 cDNA, wherein SEQ ID NO:758 is a clone designated herein as “DNA290237”.

[0819] FIG. 759 shows the amino acid sequence (SEQ ID NO:759) derived from the coding sequence of SEQ ID NO:758 shown in FIG. 758.

[0820] FIG. 760 shows a nucleotide sequence (SEQ ID NO:760) of a native sequence PRO82739 cDNA, wherein SEQ ID NO:760 is a clone designated herein as “DNA326343”.

[0821] FIG. 761 shows the amino acid sequence (SEQ ID NO:761) derived from the coding sequence of SEQ ID NO:760 shown in FIG. 760.

[0822] FIG. 762 shows a nucleotide sequence (SEQ ID NO:762) of a native sequence PRO84407 cDNA, wherein SEQ ID NO:762 is a clone designated herein as “DNA328629”.

[0823] FIG. 763 shows the amino acid sequence (SEQ ID NO:763) derived from the coding sequence of SEQ ID NO:762 shown in FIG. 762.

[0824] FIG. 764 shows a nucleotide sequence (SEQ ID NO:764) of a native sequence PRO84812 cDNA, wherein SEQ ID NO:764 is a clone designated herein as “DNA329192”.

[0825] FIG. 765 shows the amino acid sequence (SEQ ID NO:765) derived from the coding sequence of SEQ ID NO:764 shown in FIG. 764.

[0826] FIG. 766 shows a nucleotide sequence (SEQ ID NO:766) of a native sequence PRO84411 cDNA, wherein SEQ ID NO:766 is a clone designated herein as “DNA328633”.

[0827] FIG. 767 shows the amino acid sequence (SEQ ID NO:767) derived from the coding sequence of SEQ ID NO:766 shown in FIG. 766.

[0828] FIG. 768 shows a nucleotide sequence (SEQ ID NO:768) of a native sequence PRO83795 cDNA, wherein SEQ ID NO:768 is a clone designated herein as “DNA327851”.

[0829] FIG. 769 shows the amino acid sequence (SEQ ID NO:769) derived from the coding sequence of SEQ ID NO:768 shown in FIG. 768.

[0830] FIG. 770 shows a nucleotide sequence (SEQ ID NO:770) of a native sequence PRO83688 cDNA, wherein SEQ ID NO:770 is a clone designated herein as “DNA327706”.

[0831] FIG. 771 shows the amino acid sequence (SEQ ID NO:771) derived from the coding sequence of SEQ ID NO:770 shown in FIG. 770.

[0832] FIG. 772 shows a nucleotide sequence (SEQ ID NO:772) of a native sequence PRO84413 cDNA, wherein SEQ ID NO:772 is a clone designated herein as “DNA328635”.

[0833] FIG. 773 shows the amino acid sequence (SEQ ID NO:773) derived from the coding sequence of SEQ ID NO:772 shown in FIG. 772.

[0834] FIG. 774 shows a nucleotide sequence (SEQ ID NO:774) of a native sequence PRO62131 cDNA, wherein SEQ ID NO:774 is a clone designated herein as “DNA274202”.

[0835] FIG. 775 shows the amino acid sequence (SEQ ID NO:775) derived from the coding sequence of SEQ ID NO:774 shown in FIG. 774.

[0836] FIG. 776 shows a nucleotide sequence (SEQ ID NO:776) of a native sequence PRO84813 cDNA, wherein SEQ ID NO:776 is a clone designated herein as “DNA329193”.

[0837] FIG. 777 shows the amino acid sequence (SEQ ID NO:777) derived from the coding sequence of SEQ ID NO:776 shown in FIG. 776.

[0838] FIG. 778 shows a nucleotide sequence (SEQ ID NO:778) of a native sequence PRO84814 cDNA, wherein SEQ ID NO:778 is a clone designated herein as “DNA329194”.

[0839] FIG. 779 shows the amino acid sequence (SEQ ID NO:779) derived from the coding sequence of SEQ ID NO:778 shown in FIG. 778.

[0840] FIG. 780 shows a nucleotide sequence (SEQ ID NO:780) of a native sequence PRO82573 cDNA, wherein SEQ ID NO:780 is a clone designated herein as “DNA329195”.

[0841] FIG. 781 shows the amino acid sequence (SEQ ID NO:781) derived from the coding sequence of SEQ ID NO:780 shown in FIG. 780.

[0842] FIG. 782 shows a nucleotide sequence (SEQ ID NO:782) of a native sequence PRO81832 cDNA, wherein SEQ ID NO:782 is a clone designated herein as “DNA325285”.

[0843] FIG. 783 shows the amino acid sequence (SEQ ID NO:783) derived from the coding sequence of SEQ ID NO:782 shown in FIG. 782.

[0844] FIG. 784 shows a nucleotide sequence (SEQ ID NO:784) of a native sequence PRO84815 cDNA, wherein SEQ ID NO:784 is a clone designated herein as “DNA329196”.

[0845] FIG. 785 shows the amino acid sequence (SEQ ID NO:785) derived from the coding sequence of SEQ ID NO:784 shown in FIG. 784.

[0846] FIG. 786 shows a nucleotide sequence (SEQ ID NO:786) of a native sequence PRO84418 cDNA, wherein SEQ ID NO:786 is a clone designated herein as “DNA328642”.

[0847] FIG. 787 shows the amino acid sequence (SEQ ID NO:787) derived from the coding sequence of SEQ ID NO:786 shown in FIG. 786.

[0848] FIG. 788 shows a nucleotide sequence (SEQ ID NO:788) of a native sequence PRO84419 cDNA, wherein SEQ ID NO:788 is a clone designated herein as “DNA328643”.

[0849] FIG. 789 shows the amino acid sequence (SEQ ID NO:789) derived from the coding sequence of SEQ ID NO:788 shown in FIG. 788.

[0850] FIG. 790 shows a nucleotide sequence (SEQ ID NO:790) of a native sequence PRO81387 cDNA, wherein SEQ ID NO:790 is a clone designated herein as “DNA324766”.

[0851] FIG. 791 shows the amino acid sequence (SEQ ID NO:791) derived from the coding sequence of SEQ ID NO:790 shown in FIG. 790.

[0852] FIG. 792 shows a nucleotide sequence (SEQ ID NO:792) of a native sequence PRO82674 cDNA, wherein SEQ ID NO:792 is a clone designated herein as “DNA326267”.

[0853] FIG. 793 shows the amino acid sequence (SEQ ID NO:793) derived from the coding sequence of SEQ ID NO:792 shown in FIG. 792.

[0854] FIG. 794 shows a nucleotide sequence (SEQ ID NO:794) of a native sequence PRO59443 cDNA, wherein SEQ ID NO:794 is a clone designated herein as “DNA329197”.

[0855] FIG. 795 shows the amino acid sequence (SEQ ID NO:795) derived from the coding sequence of SEQ ID NO:794 shown in FIG. 794.

[0856] FIG. 796 shows a nucleotide sequence (SEQ ID NO:796) of a native sequence PRO59258 cDNA, wherein SEQ ID NO:796 is a clone designated herein as “DNA329198”.

[0857] FIG. 797 shows the amino acid sequence (SEQ ID NO:797) derived from the coding sequence of SEQ ID NO:796 shown in FIG. 796.

[0858] FIG. 798 shows a nucleotide sequence (SEQ ID NO:798) of a native sequence PRO84816 cDNA, wherein SEQ ID NO:798 is a clone designated herein as “DNA329199”.

[0859] FIG. 799 shows the amino acid sequence (SEQ ID NO:799) derived from the coding sequence of SEQ ID NO:798 shown in FIG. 798.

[0860] FIG. 800 shows a nucleotide sequence (SEQ ID NO:800) of a native sequence PRO84424 cDNA, wherein SEQ ID NO:800 is a clone designated herein as “DNA328649”.

[0861] FIG. 801 shows the amino acid sequence (SEQ ID NO:801) derived from the coding sequence of SEQ ID NO:800 shown in FIG. 800.

[0862] FIG. 802 shows a nucleotide sequence (SEQ ID NO:802) of a native sequence PRO58159 cDNA, wherein SEQ ID NO:802 is a clone designated herein as “DNA269750”.

[0863] FIG. 803 shows the amino acid sequence (SEQ ID NO:803) derived from the coding sequence of SEQ ID NO:802 shown in FIG. 802.

[0864] FIG. 804 shows a nucleotide sequence (SEQ ID NO:804) of a native sequence PRO84817 cDNA, wherein SEQ ID NO:804 is a clone designated herein as “DNA329200”.

[0865] FIG. 805 shows the amino acid sequence (SEQ ID NO:805) derived from the coding sequence of SEQ ID NO:804 shown in FIG. 804.

[0866] FIG. 806 shows a nucleotide sequence (SEQ ID NO:806) of a native sequence PRO62821 cDNA, wherein SEQ ID NO:806 is a clone designated herein as “DNA275106”.

[0867] FIG. 807 shows the amino acid sequence (SEQ ID NO:807) derived from the coding sequence of SEQ ID NO:806 shown in FIG. 806.

[0868] FIG. 808 shows a nucleotide sequence (SEQ ID NO:808) of a native sequence PRO58042 cDNA, wherein SEQ ID NO:808 is a clone designated herein as “DNA269630”.

[0869] FIG. 809 shows the amino acid sequence (SEQ ID NO:809) derived from the coding sequence of SEQ ID NO:808 shown in FIG. 808.

[0870] FIG. 810A-B shows a nucleotide sequence (SEQ ID NO:810) of a native sequence PRO84432 cDNA, wherein SEQ ID NO:810 is a clone designated herein as “DNA328658”.

[0871] FIG. 811 shows the amino acid sequence (SEQ ID NO:811) derived from the coding sequence of SEQ ID NO:810 shown in FIG. 810A-B.

[0872] FIG. 812 shows a nucleotide sequence (SEQ ID NO:812) of a native sequence PRO49214 cDNA, wherein SEQ ID NO:812 is a clone designated herein as “DNA253811”.

[0873] FIG. 813 shows the amino acid sequence (SEQ ID NO:813) derived from the coding sequence of SEQ ID NO:812 shown in FIG. 812.

[0874] FIG. 814 shows a nucleotide sequence (SEQ ID NO:814) of a native sequence PRO36183 cDNA, wherein SEQ ID NO:814 is a clone designated herein as “DNA328663”.

[0875] FIG. 815 shows the amino acid sequence (SEQ ID NO:815) derived from the coding sequence of SEQ ID NO:814 shown in FIG. 814.

[0876] FIG. 816 shows a nucleotide sequence (SEQ ID NO:816) of a native sequence PRO84818 cDNA, wherein SEQ ID NO:816 is a clone designated herein as “DNA329201”.

[0877] FIG. 817 shows the amino acid sequence (SEQ ID NO:817) derived from the coding sequence of SEQ ID NO:816 shown in FIG. 816.

[0878] FIG. 818 shows a nucleotide sequence (SEQ ID NO:818) of a native sequence PRO70367 cDNA, wherein SEQ ID NO:818 is a clone designated herein as “DNA329202”.

[0879] FIG. 819 shows the amino acid sequence (SEQ ID NO:819) derived from the coding sequence of SEQ ID NO:818 shown in FIG. 818.

[0880] FIG. 820 shows a nucleotide sequence (SEQ ID NO:820) of a native sequence PRO84819 cDNA, wherein SEQ ID NO:820 is a clone designated herein as “DNA329203”.

[0881] FIG. 821 shows the amino acid sequence (SEQ ID NO:821) derived from the coding sequence of SEQ ID NO:820 shown in FIG. 820.

[0882] FIG. 822 shows a nucleotide sequence (SEQ ID NO:822) of a native sequence PRO60104 cDNA, wherein SEQ ID NO:822 is a clone designated herein as “DNA271823”.

[0883] FIG. 823 shows the amino acid sequence (SEQ ID NO:823) derived from the coding sequence of SEQ ID NO:822 shown in FIG. 822.

[0884] FIG. 824 shows a nucleotide sequence (SEQ ID NO:824) of a native sequence PRO84382 cDNA, wherein SEQ ID NO:824 is a clone designated herein as “DNA328599”.

[0885] FIG. 825 shows the amino acid sequence (SEQ ID NO:825) derived from the coding sequence of SEQ ID NO:824 shown in FIG. 824.

[0886] FIG. 826 shows a nucleotide sequence (SEQ ID NO:826) of a native sequence PRO cDNA, wherein SEQ ID NO:826 is a clone designated herein as “DNA”.

[0887] FIG. 827 shows the amino acid sequence (SEQ ID NO:827) derived from the coding sequence of SEQ ID NO:826 shown in FIG. 826.

[0888] FIG. 828 shows a nucleotide sequence (SEQ ID NO:828) of a native sequence PRO cDNA, wherein SEQ ID NO:828 is a clone designated herein as “DNA”.

[0889] FIG. 829 shows the amino acid sequence (SEQ ID NO:829) derived from the coding sequence of SEQ ID NO:828 shown in FIG. 828.

[0890] FIG. 830 shows a nucleotide sequence (SEQ ID NO:830) of a native sequence PRO84820 cDNA, wherein SEQ ID NO:830 is a clone designated herein as “DNA329204”.

[0891] FIG. 831 shows the amino acid sequence (SEQ ID NO:831) derived from the coding sequence of SEQ ID NO:830 shown in FIG. 830.

[0892] FIG. 832 shows a nucleotide sequence (SEQ ID NO:832) of a native sequence PRO34255 cDNA, wherein SEQ ID NO:832 is a clone designated herein as “DNA216503”.

[0893] FIG. 833 shows the amino acid sequence (SEQ ID NO:833) derived from the coding sequence of SEQ ID NO:832 shown in FIG. 832.

[0894] FIG. 834 shows a nucleotide sequence (SEQ ID NO:834) of a native sequence PRO84821 cDNA, wherein SEQ ID NO:834 is a clone designated herein as “DNA329205”.

[0895] FIG. 835 shows the amino acid sequence (SEQ ID NO:835) derived from the coding sequence of SEQ ID NO:834 shown in FIG. 834.

[0896] FIG. 836 shows a nucleotide sequence (SEQ ID NO:836) of a native sequence PRO36899 cDNA, wherein SEQ ID NO:836 is a clone designated herein as “DNA226436”.

[0897] FIG. 837 shows the amino acid sequence (SEQ ID NO:837) derived from the coding sequence of SEQ ID NO:836 shown in FIG. 836.

[0898] FIG. 838 shows a nucleotide sequence (SEQ ID NO:838) of a native sequence PRO84822 cDNA, wherein SEQ ID NO:838 is a clone designated herein as “DNA329206”.

[0899] FIG. 839 shows the amino acid sequence (SEQ ID NO:839) derived from the coding sequence of SEQ ID NO:838 shown in FIG. 838.

[0900] FIG. 840 shows a nucleotide sequence (SEQ ID NO:840) of a native sequence PRO61801 cDNA, wherein SEQ ID NO:840 is a clone designated herein as “DNA327732”.

[0901] FIG. 841 shows the amino acid sequence (SEQ ID NO:841) derived from the coding sequence of SEQ ID NO:840 shown in FIG. 840.

[0902] FIG. 842 shows a nucleotide sequence (SEQ ID NO:842) of a native sequence PRO84448 cDNA, wherein SEQ ID NO:842 is a clone designated herein as “DNA328676”.

[0903] FIG. 843 shows the amino acid sequence (SEQ ID NO:843) derived from the coding sequence of SEQ ID NO:842 shown in FIG. 842.

[0904] FIG. 844 shows a nucleotide sequence (SEQ ID NO:844) of a native sequence PRO84448 cDNA, wherein SEQ ID NO:844 is a clone designated herein as “DNA328676”.

[0905] FIG. 845 shows the amino acid sequence (SEQ ID NO:845) derived from the coding sequence of SEQ ID NO:844 shown in FIG. 844.

[0906] FIG. 846 shows a nucleotide sequence (SEQ ID NO:846) of a native sequence PRO84449 cDNA, wherein SEQ ID NO:846 is a clone designated herein as “DNA328677”.

[0907] FIG. 847 shows the amino acid sequence (SEQ ID NO:847) derived from the coding sequence of SEQ ID NO:846 shown in FIG. 846.

[0908] FIG. 848 shows a nucleotide sequence (SEQ ID NO:848) of a native sequence PRO220 cDNA, wherein SEQ ID NO:848 is a clone designated herein as “DNA329207”.

[0909] FIG. 849 shows the amino acid sequence (SEQ ID NO:849) derived from the coding sequence of SEQ ID NO:848 shown in FIG. 848.

[0910] FIG. 850 shows a nucleotide sequence (SEQ ID NO:850) of a native sequence PRO36583 cDNA, wherein SEQ ID NO:850 is a clone designated herein as “DNA226120”.

[0911] FIG. 851 shows the amino acid sequence (SEQ ID NO:851) derived from the coding sequence of SEQ ID NO:850 shown in FIG. 850.

[0912] FIG. 852 shows a nucleotide sequence (SEQ ID NO:852) of a native sequence PRO84823 cDNA, wherein SEQ ID NO:852 is a clone designated herein as “DNA329208”.

[0913] FIG. 853 shows the amino acid sequence (SEQ ID NO:853) derived from the coding sequence of SEQ ID NO:852 shown in FIG. 852.

[0914] FIG. 854 shows a nucleotide sequence (SEQ ID NO:854) of a native sequence PRO63226 cDNA, wherein SEQ ID NO:854 is a clone designated herein as “DNA326562”.

[0915] FIG. 855 shows the amino acid sequence (SEQ ID NO:855) derived from the coding sequence of SEQ ID NO:854 shown in FIG. 854.

[0916] FIG. 856 shows a nucleotide sequence (SEQ ID NO:856) of a native sequence cDNA, wherein SEQ ID NO:856 is a clone designated herein as “DNA154921”.

[0917] FIG. 857A-B shows a nucleotide sequence (SEQ ID NO:857) of a native sequence PRO37597 cDNA, wherein SEQ ID NO:857 is a clone designated herein as “DNA227134”.

[0918] FIG. 858 shows the amino acid sequence (SEQ ID NO:858) derived from the coding sequence of SEQ ID NO:857 shown in FIG. 857A-B.

[0919] FIG. 859A-B shows a nucleotide sequence (SEQ ID NO:859) of a native sequence PRO84824 cDNA, wherein SEQ ID NO:859 is a clone designated herein as “DNA329209”.

[0920] FIG. 860 shows the amino acid sequence (SEQ ID NO:860) derived from the coding sequence of SEQ ID NO:859 shown in FIG. 859A-B.

[0921] FIG. 861 shows a nucleotide sequence (SEQ ID NO:861) of a native sequence PRO37121 cDNA, wherein SEQ ID NO:861 is a clone designated herein as “DNA226658”.

[0922] FIG. 862 shows the amino acid sequence (SEQ ID NO:862) derived from the coding sequence of SEQ ID NO:861 shown in FIG. 861.

[0923] FIG. 863 shows a nucleotide sequence (SEQ ID NO:863) of a native sequence PRO82342 cDNA, wherein SEQ ID NO:863 is a clone designated herein as “DNA325886”.

[0924] FIG. 864 shows the amino acid sequence (SEQ ID NO:864) derived from the coding sequence of SEQ ID NO:863 shown in FIG. 863.

[0925] FIG. 865 shows a nucleotide sequence (SEQ ID NO:865) of a native sequence PRO22818 cDNA, wherein SEQ ID NO:865 is a clone designated herein as “DNA329210”.

[0926] FIG. 866 shows the amino acid sequence (SEQ ID NO:866) derived from the coding sequence of SEQ ID NO:865 shown in FIG. 865.

[0927] FIG. 867 shows a nucleotide sequence (SEQ ID NO:867) of a native sequence PRO64 cDNA, wherein SEQ ID NO:867 is a clone designated herein as “DNA328686”.

[0928] FIG. 868 shows the amino acid sequence (SEQ ID NO:868) derived from the coding sequence of SEQ ID NO:867 shown in FIG. 867.

[0929] FIG. 869 shows a nucleotide sequence (SEQ ID NO:869) of a native sequence PRO2081 cDNA, wherein SEQ ID NO:869 is a clone designated herein as “DNA287620”.

[0930] FIG. 870 shows the amino acid sequence (SEQ ID NO:870) derived from the coding sequence of SEQ ID NO:869 shown in FIG. 869.

[0931] FIG. 871 shows a nucleotide sequence (SEQ ID NO:871) of a native sequence PRO7078 cDNA, wherein SEQ ID NO:871 is a clone designated herein as “DNA329211”.

[0932] FIG. 872 shows the amino acid sequence (SEQ ID NO:872) derived from the coding sequence of SEQ ID NO:871 shown in FIG. 871.

[0933] FIG. 873 shows a nucleotide sequence (SEQ ID NO:873) of a native sequence PRO80521 cDNA, wherein SEQ ID NO:873 is a clone designated herein as “DNA323769”.

[0934] FIG. 874 shows the amino acid sequence (SEQ ID NO:874) derived from the coding sequence of SEQ ID NO:873 shown in FIG. 873.

[0935] FIG. 875 shows a nucleotide sequence (SEQ ID NO:875) of a native sequence PRO84825 cDNA, wherein SEQ ID NO:875 is a clone designated herein as “DNA329212”.

[0936] FIG. 876 shows the amino acid sequence (SEQ ID NO:876) derived from the coding sequence of SEQ ID NO:875 shown in FIG. 875.

[0937] FIG. 877 shows a nucleotide sequence (SEQ ID NO:877) of a native sequence PRO34295 cDNA, wherein SEQ ID NO:877 is a clone designated herein as “DNA217253”.

[0938] FIG. 878 shows the amino acid sequence (SEQ ID NO:878) derived from the coding sequence of SEQ ID NO:877 shown in FIG. 877.

[0939] FIG. 879 shows a nucleotide sequence (SEQ ID NO:879) of a native sequence PRO2313 cDNA, wherein SEQ ID NO:879 is a clone designated herein as “DNA329213”.

[0940] FIG. 880 shows the amino acid sequence (SEQ ID NO:880) derived from the coding sequence of SEQ ID NO:879 shown in FIG. 879.

[0941] FIG. 881A-B shows a nucleotide sequence (SEQ ID NO:881) of a native sequence PRO84826 cDNA, wherein SEQ ID NO:881 is a clone designated herein as “DNA329214”.

[0942] FIG. 882 shows the amino acid sequence (SEQ ID NO:882) derived from the coding sequence of SEQ ID NO:881 shown in FIG. 881A-B.

[0943] FIG. 883 shows a nucleotide sequence (SEQ ID NO:883) of a native sequence PRO71063 cDNA, wherein SEQ ID NO:883 is a clone designated herein as “DNA304499”.

[0944] FIG. 884 shows the amino acid sequence (SEQ ID NO:884) derived from the coding sequence of SEQ ID NO:883 shown in FIG. 883.

[0945] FIG. 885 shows a nucleotide sequence (SEQ ID NO:885) of a native sequence PRO35991 cDNA, wherein SEQ ID NO:885 is a clone designated herein as “DNA225528”.

[0946] FIG. 886 shows the amino acid sequence (SEQ ID NO:886) derived from the coding sequence of SEQ ID NO:885 shown in FIG. 885.

[0947] FIG. 887 shows a nucleotide sequence (SEQ ID NO:887) of a native sequence PRO7424 cDNA, wherein SEQ ID NO:887 is a clone designated herein as “DNA329215”.

[0948] FIG. 888 shows the amino acid sequence (SEQ ID NO:888) derived from the coding sequence of SEQ ID NO:887 shown in FIG. 887.

[0949] FIG. 889 shows a nucleotide sequence (SEQ ID NO:889) of a native sequence PRO36857 cDNA, wherein SEQ ID NO:889 is a clone designated herein as “DNA226394”.

[0950] FIG. 890 shows the amino acid sequence (SEQ ID NO:890) derived from the coding sequence of SEQ ID NO:889 shown in FIG. 889.

[0951] FIG. 891 shows a nucleotide sequence (SEQ ID NO:891) of a native sequence PRO61638 cDNA, wherein SEQ ID NO:891 is a clone designated herein as “DNA323902”.

[0952] FIG. 892 shows the amino acid sequence (SEQ ID NO:892) derived from the coding sequence of SEQ ID NO:891 shown in FIG. 891.

[0953] FIG. 893 shows a nucleotide sequence (SEQ ID NO:893) of a native sequence PRO84827 cDNA, wherein SEQ ID NO:893 is a clone designated herein as “DNA329216”.

[0954] FIG. 894 shows the amino acid sequence (SEQ ID NO:894) derived from the coding sequence of SEQ ID NO:893 shown in FIG. 893.

[0955] FIG. 895 shows a nucleotide sequence (SEQ ID NO:895) of a native sequence PRO84828 cDNA, wherein SEQ ID NO:895 is a clone designated herein as “DNA329217”.

[0956] FIG. 896 shows the amino acid sequence (SEQ ID NO:896) derived from the coding sequence of SEQ ID NO:895 shown in FIG. 895.

[0957] FIG. 897 shows a nucleotide sequence (SEQ ID NO:897) of a native sequence PRO84829 cDNA, wherein SEQ ID NO:897 is a clone designated herein as “DNA329218”.

[0958] FIG. 898 shows the amino acid sequence (SEQ ID NO:898) derived from the coding sequence of SEQ ID NO:897 shown in FIG. 897.

[0959] FIG. 899 shows a nucleotide sequence (SEQ ID NO:899) of a native sequence PRO83721 cDNA, wherein SEQ ID NO:899 is a clone designated herein as “DNA327747”.

[0960] FIG. 900 shows the amino acid sequence (SEQ ID NO:900) derived from the coding sequence of SEQ ID NO:899 shown in FIG. 899.

[0961] FIG. 901 shows a nucleotide sequence (SEQ ID NO:901) of a native sequence PRO38923 cDNA, wherein SEQ ID NO:901 is a clone designated herein as “DNA237817”.

[0962] FIG. 902 shows the amino acid sequence (SEQ ID NO:902) derived from the coding sequence of SEQ ID NO:901 shown in FIG. 901.

[0963] FIG. 903 shows a nucleotide sequence (SEQ ID NO:903) of a native sequence PRO81278 cDNA, wherein SEQ ID NO:903 is a clone designated herein as “DNA329219”.

[0964] FIG. 904 shows the amino acid sequence (SEQ ID NO:904) derived from the coding sequence of SEQ ID NO:903 shown in FIG. 903.

[0965] FIG. 905A-C shows a nucleotide sequence (SEQ ID NO:905) of a native sequence PRO84830 cDNA, wherein SEQ ID NO:905 is a clone designated herein as “DNA329220”.

[0966] FIG. 906 shows the amino acid sequence (SEQ ID NO:906) derived from the coding sequence of SEQ ID NO:905 shown in FIG. 905A-C.

[0967] FIG. 907 shows a nucleotide sequence (SEQ ID NO:907) of a native sequence PRO50026 cDNA, wherein SEQ ID NO:907 is a clone designated herein as “DNA254936”.

[0968] FIG. 908 shows the amino acid sequence (SEQ ID NO:908) derived from the coding sequence of SEQ ID NO:907 shown in FIG. 907.

[0969] FIG. 909 shows a nucleotide sequence (SEQ ID NO:909) of a native sequence PRO61971 cDNA, wherein SEQ ID NO:909 is a clone designated herein as “DNA274027”.

[0970] FIG. 910 shows the amino acid sequence (SEQ ID NO:910) derived from the coding sequence of SEQ ID NO:909 shown in FIG. 909.

[0971] FIG. 911 shows a nucleotide sequence (SEQ ID NO:911) of a native sequence PRO4555 cDNA, wherein SEQ ID NO:911 is a clone designated herein as “DNA329221”.

[0972] FIG. 912 shows the amino acid sequence (SEQ ID NO:912) derived from the coding sequence of SEQ ID NO:911 shown in FIG. 911.

[0973] FIG. 913 shows a nucleotide sequence (SEQ ID NO:913) of a native sequence PRO61480 cDNA, wherein SEQ ID NO:913 is a clone designated herein as “DNA329222”.

[0974] FIG. 914 shows the amino acid sequence (SEQ ID NO:914) derived from the coding sequence of SEQ ID NO:913 shown in FIG. 913.

[0975] FIG. 915 shows a nucleotide sequence (SEQ ID NO:915) of a native sequence PRO71178 cDNA, wherein SEQ ID NO:915 is a clone designated herein as “DNA304765”.

[0976] FIG. 916 shows the amino acid sequence (SEQ ID NO:916) derived from the coding sequence of SEQ ID NO:915 shown in FIG. 915.

[0977] FIG. 917 shows a nucleotide sequence (SEQ ID NO:917) of a native sequence PRO4723 cDNA, wherein SEQ ID NO:917 is a clone designated herein as “DNA103395”.

[0978] FIG. 918 shows the amino acid sequence (SEQ ID NO:918) derived from the coding sequence of SEQ ID NO:917 shown in FIG. 917.

[0979] FIG. 919A-B shows a nucleotide sequence (SEQ ID NO:919) of a native sequence PRO62786 cDNA, wherein SEQ ID NO:919 is a clone designated herein as “DNA275066”.

[0980] FIG. 920 shows the amino acid sequence (SEQ ID NO:920) derived from the coding sequence of SEQ ID NO:919 shown in FIG. 919A-B.

[0981] FIG. 921 shows a nucleotide sequence (SEQ ID NO:921) of a native sequence PRO83725 cDNA, wherein SEQ ID NO:921 is a clone designated herein as “DNA327755”.

[0982] FIG. 922 shows the amino acid sequence (SEQ ID NO:922) derived from the coding sequence of SEQ ID NO:921 shown in FIG. 921.

[0983] FIG. 923 shows a nucleotide sequence (SEQ ID NO:923) of a native sequence PRO84831 cDNA, wherein SEQ ID NO:923 is a clone designated herein as “DNA329223”.

[0984] FIG. 924 shows the amino acid sequence (SEQ ID NO:924) derived from the coding sequence of SEQ ID NO:923 shown in FIG. 923.

[0985] FIG. 925 shows a nucleotide sequence (SEQ ID NO:925) of a native sequence PRO37041 cDNA, wherein SEQ ID NO:925 is a clone designated herein as “DNA226578”.

[0986] FIG. 926 shows the amino acid sequence (SEQ ID NO:926) derived from the coding sequence of SEQ ID NO:925 shown in FIG. 925.

[0987] FIG. 927 shows a nucleotide sequence (SEQ ID NO:927) of a native sequence PRO84832 cDNA, wherein SEQ ID NO:927 is a clone designated herein as “DNA329224”.

[0988] FIG. 928 shows the amino acid sequence (SEQ ID NO:928) derived from the coding sequence of SEQ ID NO:927 shown in FIG. 927.

[0989] FIG. 929 shows a nucleotide sequence (SEQ ID NO:929) of a native sequence PRO10347 cDNA, wherein SEQ ID NO:929 is a clone designated herein as “DNA328706”.

[0990] FIG. 930 shows the amino acid sequence (SEQ ID NO:930) derived from the coding sequence of SEQ ID NO:929 shown in FIG. 929.

[0991] FIG. 931 shows a nucleotide sequence (SEQ ID NO:931) of a native sequence PRO84833 cDNA, wherein SEQ ID NO:931 is a clone designated herein as “DNA329225”.

[0992] FIG. 932 shows the amino acid sequence (SEQ ID NO:932) derived from the coding sequence of SEQ ID NO:931 shown in FIG. 931.

[0993] FIG. 933A-B shows a nucleotide sequence (SEQ ID NO:933) of a native sequence PRO60388 cDNA, wherein SEQ ID NO:933 is a clone designated herein as “DNA329226”.

[0994] FIG. 934 shows the amino acid sequence (SEQ ID NO:934) derived from the coding sequence of SEQ ID NO:933 shown in FIG. 933A-B.

[0995] FIG. 935 shows a nucleotide sequence (SEQ ID NO:935) of a native sequence PRO2023 cDNA, wherein SEQ ID NO:935 is a clone designated herein as “DNA304473”.

[0996] FIG. 936 shows the amino acid sequence (SEQ ID NO:936) derived from the coding sequence of SEQ ID NO:935 shown in FIG. 935.

[0997] FIG. 937A-B shows a nucleotide sequence (SEQ ID NO:937) of a native sequence PRO34751 cDNA, wherein SEQ ID NO:937 is a clone designated herein as “DNA328685”.

[0998] FIG. 938 shows the amino acid sequence (SEQ ID NO:938) derived from the coding sequence of SEQ ID NO:937 shown in FIG. 937A-B.

[0999] FIG. 939A-B shows a nucleotide sequence (SEQ ID NO:939) of a native sequence PRO81785 cDNA, wherein SEQ ID NO:939 is a clone designated herein as “DNA325227”.

[1000] FIG. 940 shows the amino acid sequence (SEQ ID NO:940) derived from the coding sequence of SEQ ID NO:939 shown in FIG. 939A-B.

[1001] FIG. 941A-B shows a nucleotide sequence (SEQ ID NO:941) of a native sequence cDNA, wherein SEQ ID NO:941 is a clone designated herein as “DNA272195”.

[1002] FIG. 942A-B shows a nucleotide sequence (SEQ ID NO:942) of a native sequence PRO82307 cDNA, wherein SEQ ID NO:942 is a clone designated herein as “DNA329227”.

[1003] FIG. 943 shows the amino acid sequence (SEQ ID NO:943) derived from the coding sequence of SEQ ID NO:942 shown in FIG. 942A-B.

[1004] FIG. 944 shows a nucleotide sequence (SEQ ID NO:944) of a native sequence PRO82388 cDNA, wherein SEQ ID NO:944 is a clone designated herein as “DNA325941”.

[1005] FIG. 945 shows the amino acid sequence (SEQ ID NO:945) derived from the coding sequence of SEQ ID NO:944 shown in FIG. 944.

[1006] FIG. 946 shows a nucleotide sequence (SEQ ID NO:946) of a native sequence PRO69480 cDNA, wherein SEQ ID NO:946 is a clone designated herein as “DNA287194”.

[1007] FIG. 947 shows the amino acid sequence (SEQ ID NO:947) derived from the coding sequence of SEQ ID NO:946 shown in FIG. 946.

[1008] FIG. 948A-C shows a nucleotide sequence (SEQ ID NO:948) of a native sequence PRO84834 cDNA, wherein SEQ ID NO:948 is a clone designated herein as “DNA329228”.

[1009] FIG. 949 shows the amino acid sequence (SEQ ID NO:949) derived from the coding sequence of SEQ ID NO:948 shown in FIG. 948A-C.

[1010] FIG. 950 shows a nucleotide sequence (SEQ ID NO:950) of a native sequence PRO69690 cDNA, wherein SEQ ID NO:950 is a clone designated herein as “DNA287433”.

[1011] FIG. 951 shows the amino acid sequence (SEQ ID NO:951) derived from the coding sequence of SEQ ID NO:950 shown in FIG. 950.

[1012] FIG. 952 shows a nucleotide sequence (SEQ ID NO:952) of a native sequence PRO4710 cDNA, wherein SEQ ID NO:952 is a clone designated herein as “DNA103380”.

[1013] FIG. 953 shows the amino acid sequence (SEQ ID NO:953) derived from the coding sequence of SEQ ID NO:952 shown in FIG. 952.

[1014] FIG. 954A-B shows a nucleotide sequence (SEQ ID NO:954) of a native sequence PRO12560 cDNA, wherein SEQ ID NO:954 is a clone designated herein as “DNA150956”.

[1015] FIG. 955 shows the amino acid sequence (SEQ ID NO:955) derived from the coding sequence of SEQ ID NO:954 shown in FIG. 954A-B.

[1016] FIG. 956A-B shows a nucleotide sequence (SEQ ID NO:956) of a native sequence cDNA, wherein SEQ ID NO:956 is a clone designated herein as “DNA150829”.

[1017] FIG. 957A-B shows a nucleotide sequence (SEQ ID NO:957) of a native sequence PRO84835 cDNA, wherein SEQ ID NO:957 is a clone designated herein as “DNA329229”.

[1018] FIG. 958 shows the amino acid sequence (SEQ ID NO:958) derived from the coding sequence of SEQ ID NO:957 shown in FIG. 957A-B.

[1019] FIG. 959 shows a nucleotide sequence (SEQ ID NO:959) of a native sequence PRO84836 cDNA, wherein SEQ ID NO:959 is a clone designated herein as “DNA329230”.

[1020] FIG. 960 shows the amino acid sequence (SEQ ID NO:960) derived from the coding sequence of SEQ ID NO:959 shown in FIG. 959.

[1021] FIG. 961 shows a nucleotide sequence (SEQ ID NO:961) of a native sequence cDNA, wherein SEQ ID NO:961 is a clone designated herein as “DNA150980”.

[1022] FIG. 962 shows a nucleotide sequence (SEQ ID NO:962) of a native sequence PRO84475 cDNA, wherein SEQ ID NO:962 is a clone designated herein as “DNA328719”.

[1023] FIG. 963 shows the amino acid sequence (SEQ ID NO:963) derived from the coding sequence of SEQ ID NO:962 shown in FIG. 962.

[1024] FIG. 964 shows a nucleotide sequence (SEQ ID NO:964) of a native sequence PRO59425 cDNA, wherein SEQ ID NO:964 is a clone designated herein as “DNA271103”.

[1025] FIG. 965 shows the amino acid sequence (SEQ ID NO:965) derived from the coding sequence of SEQ ID NO:964 shown in FIG. 964.

[1026] FIG. 966 shows a nucleotide sequence (SEQ ID NO:966) of a native sequence cDNA, wherein SEQ ID NO:966 is a clone designated herein as “DNA207620”.

[1027] FIG. 967 shows a nucleotide sequence (SEQ ID NO:967) of a native sequence PRO83141 cDNA, wherein SEQ ID NO:967 is a clone designated herein as “DNA326808”.

[1028] FIG. 968 shows the amino acid sequence (SEQ ID NO:968) derived from the coding sequence of SEQ ID NO:967 shown in FIG. 967.

[1029] FIG. 969A-B shows a nucleotide sequence (SEQ ID NO:969) of a native sequence PRO6323 cDNA, wherein SEQ ID NO:969 is a clone designated herein as “DNA124122”.

[1030] FIG. 970 shows the amino acid sequence (SEQ ID NO:970) derived from the coding sequence of SEQ ID NO:969 shown in FIG. 969A-B.

[1031] FIG. 971A-B shows a nucleotide sequence (SEQ ID NO:971) of a native sequence PRO6323 cDNA, wherein SEQ ID NO:971 is a clone designated herein as “DNA124122”.

[1032] FIG. 972 shows the amino acid sequence (SEQ ID NO:972) derived from the coding sequence of SEQ ID NO:971 shown in FIG. 971A-B.

[1033] FIG. 973 shows a nucleotide sequence (SEQ ID NO:973) of a native sequence PRO69476 cDNA, wherein SEQ ID NO:973 is a clone designated herein as “DNA287190”.

[1034] FIG. 974 shows the amino acid sequence (SEQ ID NO:974) derived from the coding sequence of SEQ ID NO:973 shown in FIG. 973.

[1035] FIG. 975 shows a nucleotide sequence (SEQ ID NO:975) of a native sequence PRO84837 cDNA, wherein SEQ ID NO:975 is a clone designated herein as “DNA329231”.

[1036] FIG. 976 shows the amino acid sequence (SEQ ID NO:976) derived from the coding sequence of SEQ ID NO:975 shown in FIG. 975.

[1037] FIG. 977A-B shows a nucleotide sequence (SEQ ID NO:977) of a native sequence PRO12554 cDNA, wherein SEQ ID NO:977 is a clone designated herein as “DNA150950”.

[1038] FIG. 978 shows the amino acid sequence (SEQ ID NO:978) derived from the coding sequence of SEQ ID NO:977 shown in FIG. 977A-B.

[1039] FIG. 979 shows a nucleotide sequence (SEQ ID NO:979) of a native sequence PRO11708 cDNA, wherein SEQ ID NO:979 is a clone designated herein as “DNA151330”.

[1040] FIG. 980 shows the amino acid sequence (SEQ ID NO:980) derived from the coding sequence of SEQ ID NO:979 shown in FIG. 979.

[1041] FIG. 981 shows a nucleotide sequence (SEQ ID NO:981) of a native sequence cDNA, wherein SEQ ID NO:981 is a clone designated herein as “DNA329232”.

[1042] FIG. 982 shows a nucleotide sequence (SEQ ID NO:982) of a native sequence PRO71082 cDNA, wherein SEQ ID NO:982 is a clone designated herein as “DNA304655”.

[1043] FIG. 983 shows the amino acid sequence (SEQ ID NO:983) derived from the coding sequence of SEQ ID NO:982 shown in FIG. 982.

[1044] FIG. 984 shows a nucleotide sequence (SEQ ID NO:984) of a native sequence PRO84485 cDNA, wherein SEQ ID NO:984 is a clone designated herein as “DNA328732”.

[1045] FIG. 985 shows the amino acid sequence (SEQ ID NO:985) derived from the coding sequence of SEQ ID NO:984 shown in FIG. 984.

[1046] FIG. 986 shows a nucleotide sequence (SEQ ID NO:986) of a native sequence PRO84839 cDNA, wherein SEQ ID NO:986 is a clone designated herein as “DNA329233”.

[1047] FIG. 987 shows the amino acid sequence (SEQ ID NO:987) derived from the coding sequence of SEQ ID NO:986 shown in FIG. 986.

[1048] FIG. 988 shows a nucleotide sequence (SEQ ID NO:988) of a native sequence cDNA, wherein SEQ ID NO:988 is a clone designated herein as “DNA329234”.

[1049] FIG. 989A-D shows a nucleotide sequence (SEQ ID NO:989) of a native sequence PRO84490 cDNA, wherein SEQ ID NO:989 is a clone designated herein as “DNA328737”.

[1050] FIG. 990 shows the amino acid sequence (SEQ ID NO:990) derived from the coding sequence of SEQ ID NO:989 shown in FIG. 989A-D.

[1051] FIG. 991 shows a nucleotide sequence (SEQ ID NO:991) of a native sequence PRO81715 cDNA, wherein SEQ ID NO:991 is a clone designated herein as “DNA329235”.

[1052] FIG. 992 shows the amino acid sequence (SEQ ID NO:992) derived from the coding sequence of SEQ ID NO:991 shown in FIG. 991.

[1053] FIG. 993A-C shows a nucleotide sequence (SEQ ID NO:993) of a native sequence PRO84841 cDNA, wherein SEQ ID NO:993 is a clone designated herein as “DNA329236”.

[1054] FIG. 994 shows the amino acid sequence (SEQ ID NO:994) derived from the coding sequence of SEQ ID NO:993 shown in FIG. 993A-C.

[1055] FIG. 995 shows a nucleotide sequence (SEQ ID NO:995) of a native sequence PRO84841 cDNA, wherein SEQ ID NO:995 is a clone designated herein as “DNA329236”.

[1056] FIG. 996 shows the amino acid sequence (SEQ ID NO:996) derived from the coding sequence of SEQ ID NO:995 shown in FIG. 995.

[1057] FIG. 997 shows a nucleotide sequence (SEQ ID NO:997) of a native sequence PRO11833 cDNA, wherein SEQ ID NO:997 is a clone designated herein as “DNA151487”.

[1058] FIG. 998 shows the amino acid sequence (SEQ ID NO:998) derived from the coding sequence of SEQ ID NO:997 shown in FIG. 997.

[1059] FIG. 999A-B shows a nucleotide sequence (SEQ ID NO:999) of a native sequence PRO84842 cDNA, wherein SEQ ID NO:999 is a clone designated herein as “DNA329237”.

[1060] FIG. 1000 shows the amino acid sequence (SEQ ID NO:1000) derived from the coding sequence of SEQ ID NO:999 shown in FIG. 999A-B.

[1061] FIG. 1001 shows a nucleotide sequence (SEQ ID NO:1001) of a native sequence PRO84843 cDNA, wherein SEQ ID NO:1001 is a clone designated herein as “DNA329238”.

[1062] FIG. 1002 shows the amino acid sequence (SEQ ID NO:1002) derived from the coding sequence of SEQ ID NO:1001 shown in FIG. 1001.

[1063] FIG. 1003A-B shows a nucleotide sequence (SEQ ID NO:1003) of a native sequence cDNA, wherein SEQ ID NO:1003 is a clone designated herein as “DNA327778”.

[1064] FIG. 1004A-B shows a nucleotide sequence (SEQ ID NO:1004) of a native sequence cDNA, wherein SEQ ID NO:1004 is a clone designated herein as “DNA287360”.

[1065] FIG. 1005A-B shows a nucleotide sequence (SEQ ID NO:1005) of a native sequence cDNA, wherein SEQ ID NO:1005 is a clone designated herein as “DNA270118”.

[1066] FIG. 1006A-B shows a nucleotide sequence (SEQ ID NO:1006) of a native sequence PRO59570 cDNA, wherein SEQ ID NO:1006 is a clone designated herein as “DNA328748”.

[1067] FIG. 1007 shows the amino acid sequence (SEQ ID NO:1007) derived from the coding sequence of SEQ ID NO:1006 shown in FIG. 1006A-B.

[1068] FIG. 1008 shows a nucleotide sequence (SEQ ID NO:1008) of a native sequence PRO84500 cDNA, wherein SEQ ID NO:1008 is a clone designated herein as “DNA328750”.

[1069] FIG. 1009 shows the amino acid sequence (SEQ ID NO:1009) derived from the coding sequence of SEQ ID NO:1008 shown in FIG. 1008.

[1070] FIG. 1010A-B shows a nucleotide sequence (SEQ ID NO:1010) of a native sequence PRO84502 cDNA, wherein SEQ ID NO:1010 is a clone designated herein as “DNA328753”.

[1071] FIG. 1011 shows the amino acid sequence (SEQ ID NO:1011) derived from the coding sequence of SEQ ID NO:1010 shown in FIG. 1010A-B.

[1072] FIG. 1012 shows a nucleotide sequence (SEQ ID NO:1012) of a native sequence PRO69549 cDNA, wherein SEQ ID NO:1012 is a clone designated herein as “DNA325596”.

[1073] FIG. 1013 shows the amino acid sequence (SEQ ID NO:1013) derived from the coding sequence of SEQ ID NO:1012 shown in FIG. 1012.

[1074] FIG. 1014 shows a nucleotide sequence (SEQ ID NO:1014) of a native sequence PRO84844 cDNA, wherein SEQ ID NO:1014 is a clone designated herein as “DNA329239”.

[1075] FIG. 1015 shows the amino acid sequence (SEQ ID NO:1015) derived from the coding sequence of SEQ ID NO:1014 shown in FIG. 1014.

[1076] FIG. 1016A-B shows a nucleotide sequence (SEQ ID NO:1016) of a native sequence PRO84845 cDNA, wherein SEQ ID NO:1016 is a clone designated herein as “DNA329240”.

[1077] FIG. 1017 shows the amino acid sequence (SEQ ID NO:1017) derived from the coding sequence of SEQ ID NO:1016 shown in FIG. 1016.

[1078] FIG. 1018 shows a nucleotide sequence (SEQ ID NO:1018) of a native sequence PRO84846 cDNA, wherein SEQ ID NO:1018 is a clone designated herein as “DNA329241”.

[1079] FIG. 1019 shows the amino acid sequence (SEQ ID NO:1019) derived from the coding sequence of SEQ ID NO:1018 shown in FIG. 1018.

[1080] FIG. 1020A-B shows a nucleotide sequence (SEQ ID NO:1020) of a native sequence PRO84847 cDNA, wherein SEQ ID NO:1020 is a clone designated herein as “DNA329242”.

[1081] FIG. 1021 shows the amino acid sequence (SEQ ID NO:1021) derived from the coding sequence of SEQ ID NO:1020 shown in FIG. 1020.

[1082] FIG. 1022 shows a nucleotide sequence (SEQ ID NO:1022) of a native sequence PRO84848 cDNA, wherein SEQ ID NO:1022 is a clone designated herein as “DNA329243”.

[1083] FIG. 1023 shows the amino acid sequence (SEQ ID NO:1023) derived from the coding sequence of SEQ ID NO:1022 shown in FIG. 1022.

[1084] FIG. 1024A-C shows a nucleotide sequence (SEQ ID NO:1024) of a native sequence PRO84849 cDNA, wherein SEQ ID NO:1024 is a clone designated herein as “DNA329244”.

[1085] FIG. 1025 shows the amino acid sequence (SEQ ID NO:1025) derived from the coding sequence of SEQ ID NO:1024 shown in FIG. 1024.

[1086] FIG. 1026A-B shows a nucleotide sequence (SEQ ID NO:1026) of a native sequence cDNA, wherein SEQ ID NO:1026 is a clone designated herein as “DNA328758”.

[1087] FIG. 1027 shows a nucleotide sequence (SEQ ID NO:1027) of a native sequence cDNA, wherein SEQ ID NO:1027 is a clone designated herein as “DNA329245”.

[1088] FIG. 1028A-B shows a nucleotide sequence (SEQ ID NO:1028) of a native sequence cDNA, wherein SEQ ID NO:1028 is a clone designated herein as “DNA329246”.

[1089] FIG. 1029 shows a nucleotide sequence (SEQ ID NO:1029) of a native sequence PRO69509 cDNA, wherein SEQ ID NO:1029 is a clone designated herein as “DNA287230”.

[1090] FIG. 1030 shows the amino acid sequence (SEQ ID NO:1030) derived from the coding sequence of SEQ ID NO:1029 shown in FIG. 1029.

[1091] FIG. 1031 shows a nucleotide sequence (SEQ ID NO:1031) of a native sequence cDNA, wherein SEQ ID NO:1031 is a clone designated herein as “DNA228053”.

[1092] FIG. 1032 shows a nucleotide sequence (SEQ ID NO:1032) of a native sequence PRO69541 cDNA, wherein SEQ ID NO:1032 is a clone designated herein as “DNA287270”.

[1093] FIG. 1033 shows the amino acid sequence (SEQ ID NO:1033) derived from the coding sequence of SEQ ID NO:1032 shown in FIG. 1032.

[1094] FIG. 1034A-C shows a nucleotide sequence (SEQ ID NO:1034) of a native sequence PRO59767 cDNA, wherein SEQ ID NO:1034 is a clone designated herein as “DNA329247”.

[1095] FIG. 1035 shows the amino acid sequence (SEQ ID NO:1035) derived from the coding sequence of SEQ ID NO:1034 shown in FIG. 1034.

[1096] FIG. 1036A-B shows a nucleotide sequence (SEQ ID NO:1036) of a native sequence PRO84850 cDNA, wherein SEQ ID NO:1036 is a clone designated herein as “DNA329248”.

[1097] FIG. 1037 shows the amino acid sequence (SEQ ID NO:1037) derived from the coding sequence of SEQ ID NO:1036 shown in FIG. 1036.

[1098] FIG. 1038 shows a nucleotide sequence (SEQ ID NO:1038) of a native sequence PRO50349 cDNA, wherein SEQ ID NO:1038 is a clone designated herein as “DNA255273”.

[1099] FIG. 1039 shows the amino acid sequence (SEQ ID NO:1039) derived from the coding sequence of SEQ ID NO:1038 shown in FIG. 1038.

[1100] FIG. 1040 shows a nucleotide sequence (SEQ ID NO:1040) of a native sequence PRO10641 cDNA, wherein SEQ ID NO:1040 is a clone designated herein as “DNA329249”.

[1101] FIG. 1041 shows the amino acid sequence (SEQ ID NO:1041) derived from the coding sequence of SEQ ID NO:1040 shown in FIG. 1040.

[1102] FIG. 1042A-B shows a nucleotide sequence (SEQ ID NO:1042) of a native sequence PRO84851 cDNA, wherein SEQ ID NO:1042 is a clone designated herein as “DNA329250”.

[1103] FIG. 1043 shows the amino acid sequence (SEQ ID NO:1043) derived from the coding sequence of SEQ ID NO:1042 shown in FIG. 1042.

[1104] FIG. 1044A-B shows a nucleotide sequence (SEQ ID NO:1044) of a native sequence cDNA, wherein SEQ ID NO:1044 is a clone designated herein as “DNA329251”.

[1105] FIG. 1045 shows a nucleotide sequence (SEQ ID NO:1045) of a native sequence PRO49375 cDNA, wherein SEQ ID NO:1045 is a clone designated herein as “DNA254264”.

[1106] FIG. 1046 shows the amino acid sequence (SEQ ID NO:1046) derived from the coding sequence of SEQ ID NO:1045 shown in FIG. 1045.

[1107] FIG. 1047 shows a nucleotide sequence (SEQ ID NO:1047) of a native sequence PRO83763 cDNA, wherein SEQ ID NO:1047 is a clone designated herein as “DNA327800”.

[1108] FIG. 1048 shows the amino acid sequence (SEQ ID NO:1048) derived from the coding sequence of SEQ ID NO:1047 shown in FIG. 1047.

[1109] FIG. 1049 shows a nucleotide sequence (SEQ ID NO:1049) of a native sequence PRO82188 cDNA, wherein SEQ ID NO:1049 is a clone designated herein as “DNA325704”.

[1110] FIG. 1050 shows the amino acid sequence (SEQ ID NO:1050) derived from the coding sequence of SEQ ID NO:1049 shown in FIG. 1049.

[1111] FIG. 1051 shows a nucleotide sequence (SEQ ID NO:1051) of a native sequence cDNA, wherein SEQ ID NO:1051 is a clone designated herein as “DNA328771”.

[1112] FIG. 1052A-B shows a nucleotide sequence (SEQ ID NO:1052) of a native sequence PRO84852 cDNA, wherein SEQ ID NO:1052 is a clone designated herein as “DNA329252”.

[1113] FIG. 1053 shows the amino acid sequence (SEQ ID NO:1053) derived from the coding sequence of SEQ ID NO:1052 shown in FIG. 1052.

[1114] FIG. 1054 shows a nucleotide sequence (SEQ ID NO:1054) of a native sequence PRO37804 cDNA, wherein SEQ ID NO:1054 is a clone designated herein as “DNA227341”.

[1115] FIG. 1055 shows the amino acid sequence (SEQ ID NO:1055) derived from the coding sequence of SEQ ID NO:1054 shown in FIG. 1054.

[1116] FIG. 1056 shows a nucleotide sequence (SEQ ID NO:1056) of a native sequence PRO60536 cDNA, wherein SEQ ID NO:1056 is a clone designated herein as “DNA328774”.

[1117] FIG. 1057 shows the amino acid sequence (SEQ ID NO:1057) derived from the coding sequence of SEQ ID NO:1056 shown in FIG. 1056.

[1118] FIG. 1058 shows a nucleotide sequence (SEQ ID NO:1058) of a native sequence cDNA, wherein SEQ ID NO:1058 is a clone designated herein as “DNA151041”.

[1119] FIG. 1059 shows a nucleotide sequence (SEQ ID NO:1059) of a native sequence PRO83768 cDNA, wherein SEQ ID NO:1059 is a clone designated herein as “DNA327807”.

[1120] FIG. 1060 shows the amino acid sequence (SEQ ID NO:1060) derived from the coding sequence of SEQ ID NO:1059 shown in FIG. 1059.

[1121] FIG. 1061 shows a nucleotide sequence (SEQ ID NO:1061) of a native sequence PRO2 cDNA, wherein SEQ ID NO:1061 is a clone designated herein as “DNA51782”.

[1122] FIG. 1062 shows the amino acid sequence (SEQ ID NO:1062) derived from the coding sequence of SEQ ID NO:1061 shown in FIG. 1061.

[1123] FIG. 1063 shows a nucleotide sequence (SEQ ID NO:1063) of a native sequence PRO10498 cDNA, wherein SEQ ID NO:1063 is a clone designated herein as “DNA324224”.

[1124] FIG. 1064 shows the amino acid sequence (SEQ ID NO:1064) derived from the coding sequence of SEQ ID NO:1063 shown in FIG. 1063.

[1125] FIG. 1065 shows a nucleotide sequence (SEQ ID NO:1065) of a native sequence PRO84853 cDNA, wherein SEQ ID NO:1065 is a clone designated herein as “DNA329253”.

[1126] FIG. 1066 shows the amino acid sequence (SEQ ID NO:1066) derived from the coding sequence of SEQ ID NO:1065 shown in FIG. 1065.

[1127] FIG. 1067 shows a nucleotide sequence (SEQ ID NO:1067) of a native sequence PRO84854 cDNA, wherein SEQ ID NO:1067 is a clone designated herein as “DNA329254”.

[1128] FIG. 1068 shows the amino acid sequence (SEQ ID NO:1068) derived from the coding sequence of SEQ ID NO:1067 shown in FIG. 1067.

[1129] FIG. 1069A-B shows a nucleotide sequence (SEQ ID NO:1069) of a native sequence PRO60550 cDNA, wherein SEQ ID NO:1069 is a clone designated herein as “DNA272292”.

[1130] FIG. 1070 shows the amino acid sequence (SEQ ID NO:1070) derived from the coding sequence of SEQ ID NO:1069 shown in FIG. 1069.

[1131] FIG. 1071 shows a nucleotide sequence (SEQ ID NO:1071) of a native sequence PRO84855 cDNA, wherein SEQ ID NO:1071 is a clone designated herein as “DNA329255”.

[1132] FIG. 1072 shows the amino acid sequence (SEQ ID NO:1072) derived from the coding sequence of SEQ ID NO:1071 shown in FIG. 1071.

[1133] FIG. 1073A-B shows a nucleotide sequence (SEQ ID NO:1073) of a native sequence PRO84856 cDNA, wherein SEQ ID NO:1073 is a clone designated herein as “DNA329256”.

[1134] FIG. 1074 shows the amino acid sequence (SEQ ID NO:1074) derived from the coding sequence of SEQ ID NO:1073 shown in FIG. 1073.

[1135] FIG. 1075 shows a nucleotide sequence (SEQ ID NO:1075) of a native sequence PRO2398 cDNA, wherein SEQ ID NO:1075 is a clone designated herein as “DNA88530”.

[1136] FIG. 1076 shows the amino acid sequence (SEQ ID NO:1076) derived from the coding sequence of SEQ ID NO:1075 shown in FIG. 1075.

[1137] FIG. 1077 shows a nucleotide sequence (SEQ ID NO:1077) of a native sequence PRO2634 cDNA, wherein SEQ ID NO:1077 is a clone designated herein as “DNA88054”.

[1138] FIG. 1078 shows the amino acid sequence (SEQ ID NO:1078) derived from the coding sequence of SEQ ID NO:1077 shown in FIG. 1077.

[1139] FIG. 1079 shows a nucleotide sequence (SEQ ID NO:1079) of a native sequence PRO83772 cDNA, wherein SEQ ID NO:1079 is a clone designated herein as “DNA327811”.

[1140] FIG. 1080 shows the amino acid sequence (SEQ ID NO:1080) derived from the coding sequence of SEQ ID NO:1079 shown in FIG. 1079.

[1141] FIG. 1081 shows a nucleotide sequence (SEQ ID NO:1081) of a native sequence PRO12564 cDNA, wherein SEQ ID NO:1081 is a clone designated herein as “DNA150971”.

[1142] FIG. 1082 shows the amino acid sequence (SEQ ID NO:1082) derived from the coding sequence of SEQ ID NO:1081 shown in FIG. 1081.

[1143] FIG. 1083A-B shows a nucleotide sequence (SEQ ID NO:1083) of a native sequence PRO84857 cDNA, wherein SEQ ID NO:1083 is a clone designated herein as “DNA329257”.

[1144] FIG. 1084 shows the amino acid sequence (SEQ ID NO:1084) derived from the coding sequence of SEQ ID NO:1083 shown in FIG. 1083.

[1145] FIG. 1085 shows a nucleotide sequence (SEQ ID NO:1085) of a native sequence PRO38069 cDNA, wherein SEQ ID NO:1085 is a clone designated herein as “DNA227606”.

[1146] FIG. 1086 shows the amino acid sequence (SEQ ID NO:1086) derived from the coding sequence of SEQ ID NO:1085 shown in FIG. 1085.

[1147] FIG. 1087 shows a nucleotide sequence (SEQ ID NO:1087) of a native sequence PRO71203 cDNA, wherein SEQ ID NO:1087 is a clone designated herein as “DNA304791”.

[1148] FIG. 1088 shows the amino acid sequence (SEQ ID NO:1088) derived from the coding sequence of SEQ ID NO:1087 shown in FIG. 1087.

[1149] FIG. 1089 shows a nucleotide sequence (SEQ ID NO:1089) of a native sequence PRO10586 cDNA, wherein SEQ ID NO:1089 is a clone designated herein as “DNA329258”.

[1150] FIG. 1090 shows the amino acid sequence (SEQ ID NO:1090) derived from the coding sequence of SEQ ID NO:1089 shown in FIG. 1089.

[1151] FIG. 1091 shows a nucleotide sequence (SEQ ID NO:1091) of a native sequence PRO34267 cDNA, wherein SEQ ID NO:1091 is a clone designated herein as “DNA216515”.

[1152] FIG. 1092 shows the amino acid sequence (SEQ ID NO:1092) derived from the coding sequence of SEQ ID NO:1091 shown in FIG. 1091.

[1153] FIG. 1093A-B shows a nucleotide sequence (SEQ ID NO:1093) of a native sequence PRO85430 cDNA, wherein SEQ ID NO:1093 is a clone designated herein as “DNA328784”.

[1154] FIG. 1094 shows the amino acid sequence (SEQ ID NO:1094) derived from the coding sequence of SEQ ID NO:1093 shown in FIG. 1093.

[1155] FIG. 1095 shows a nucleotide sequence (SEQ ID NO:1095) of a native sequence PRO1573 cDNA, wherein SEQ ID NO:1095 is a clone designated herein as “DNA327817”.

[1156] FIG. 1096 shows the amino acid sequence (SEQ ID NO:1096) derived from the coding sequence of SEQ ID NO:1095 shown in FIG. 1095.

[1157] FIG. 1097 shows a nucleotide sequence (SEQ ID NO:1097) of a native sequence PRO12646 cDNA, wherein SEQ ID NO:1097 is a clone designated herein as “DNA151222”.

[1158] FIG. 1098 shows the amino acid sequence (SEQ ID NO:1098) derived from the coding sequence of SEQ ID NO:1097 shown in FIG. 1097.

[1159] FIG. 1099 shows a nucleotide sequence (SEQ ID NO:1099) of a native sequence cDNA, wherein SEQ ID NO:1099 is a clone designated herein as “DNA329259”.

[1160] FIG. 1100 shows a nucleotide sequence (SEQ ID NO:1100) of a native sequence PRO83851 cDNA, wherein SEQ ID NO:1100 is a clone designated herein as “DNA327916”.

[1161] FIG. 1101 shows the amino acid sequence (SEQ ID NO:1101) derived from the coding sequence of SEQ ID NO:1100 shown in FIG. 1100.

[1162] FIG. 1102A-B shows a nucleotide sequence (SEQ ID NO:1102) of a native sequence PRO84858 cDNA, wherein SEQ ID NO:1102 is a clone designated herein as “DNA329260”.

[1163] FIG. 1103 shows the amino acid sequence (SEQ ID NO:1103) derived from the coding sequence of SEQ ID NO:1102 shown in FIG. 1102.

[1164] FIG. 1104A-B shows a nucleotide sequence (SEQ ID NO:1104) of a native sequence PRO84859 cDNA, wherein SEQ ID NO:1104 is a clone designated herein as “DNA329261”.

[1165] FIG. 1105 shows the amino acid sequence (SEQ ID NO:1105) derived from the coding sequence of SEQ ID NO:1104 shown in FIG. 1104.

[1166] FIG. 1106 shows a nucleotide sequence (SEQ ID NO:1106) of a native sequence PRO1721 cDNA, wherein SEQ ID NO:1106 is a clone designated herein as “DNA328799”.

[1167] FIG. 1107 shows the amino acid sequence (SEQ ID NO:1107) derived from the coding sequence of SEQ ID NO:1106 shown in FIG. 1106.

[1168] FIG. 1108 shows a nucleotide sequence (SEQ ID NO:1108) of a native sequence PRO84860 cDNA, wherein SEQ ID NO:1108 is a clone designated herein as “DNA329262”.

[1169] FIG. 1109 shows the amino acid sequence (SEQ ID NO:1109) derived from the coding sequence of SEQ ID NO:1108 shown in FIG. 1108.

[1170] FIG. 1110 shows a nucleotide sequence (SEQ ID NO:1110) of a native sequence PRO84861 cDNA, wherein SEQ ID NO:1110 is a clone designated herein as “DNA329263”.

[1171] FIG. 1111 shows the amino acid sequence (SEQ ID NO:1111) derived from the coding sequence of SEQ ID NO:1110 shown in FIG. 1110.

[1172] FIG. 1112 shows a nucleotide sequence (SEQ ID NO:1112) of a native sequence PRO60325 cDNA, wherein SEQ ID NO:1112 is a clone designated herein as “DNA326136”.

[1173] FIG. 1113 shows the amino acid sequence (SEQ ID NO:1113) derived from the coding sequence of SEQ ID NO:1112 shown in FIG. 1112.

[1174] FIG. 1114A-B shows a nucleotide sequence (SEQ ID NO:1114) of a native sequence cDNA, wherein SEQ ID NO:1114 is a clone designated herein as “DNA327827”.

[1175] FIG. 1115 shows a nucleotide sequence (SEQ ID NO:1115) of a native sequence PRO2178 cDNA, wherein SEQ ID NO:1115 is a clone designated herein as “DNA88121”.

[1176] FIG. 1116 shows the amino acid sequence (SEQ ID NO:1116) derived from the coding sequence of SEQ ID NO:1115 shown in FIG. 1115.

[1177] FIG. 1117A-B shows a nucleotide sequence (SEQ ID NO:1117) of a native sequence PRO12587 cDNA, wherein SEQ ID NO:1117 is a clone designated herein as “DNA151045”.

[1178] FIG. 1118 shows the amino acid sequence (SEQ ID NO:1118) derived from the coding sequence of SEQ ID NO:1117 shown in FIG. 1117.

[1179] FIG. 1119 shows a nucleotide sequence (SEQ ID NO:1119) of a native sequence PRO9819 cDNA, wherein SEQ ID NO:1119 is a clone designated herein as “DNA325174”.

[1180] FIG. 1120 shows the amino acid sequence (SEQ ID NO:1120) derived from the coding sequence of SEQ ID NO:1119 shown in FIG. 1119.

[1181] FIG. 1121 shows a nucleotide sequence (SEQ ID NO:1121) of a native sequence cDNA, wherein SEQ ID NO:1121 is a clone designated herein as “DNA329264”.

[1182] FIG. 1122 shows a nucleotide sequence (SEQ ID NO:1122) of a native sequence PRO84547 cDNA, wherein SEQ ID NO:1122 is a clone designated herein as “DNA328805”.

[1183] FIG. 1123 shows the amino acid sequence (SEQ ID NO:1123) derived from the coding sequence of SEQ ID NO:1122 shown in FIG. 1122.

[1184] FIG. 1124 shows a nucleotide sequence (SEQ ID NO:1124) of a native sequence PRO66288 cDNA, wherein SEQ ID NO:1124 is a clone designated herein as “DNA281449”.

[1185] FIG. 1125 shows the amino acid sequence (SEQ ID NO:1125) derived from the coding sequence of SEQ ID NO:1124 shown in FIG. 1124.

[1186] FIG. 1126 shows a nucleotide sequence (SEQ ID NO:1126) of a native sequence cDNA, wherein SEQ ID NO:1126 is a clone designated herein as “DNA329265”.

[1187] FIG. 1127 shows a nucleotide sequence (SEQ ID NO:1127) of a native sequence PRO12845 cDNA, wherein SEQ ID NO:1127 is a clone designated herein as “DNA329266”.

[1188] FIG. 1128 shows the amino acid sequence (SEQ ID NO:1128) derived from the coding sequence of SEQ ID NO:1127 shown in FIG. 1127.

[1189] FIG. 1129 shows a nucleotide sequence (SEQ ID NO:1129) of a native sequence PRO69518 cDNA, wherein SEQ ID NO:1129 is a clone designated herein as “DNA287243”.

[1190] FIG. 1130 shows the amino acid sequence (SEQ ID NO:1130) derived from the coding sequence of SEQ ID NO:1129 shown in FIG. 1129.

[1191] FIG. 1131 shows a nucleotide sequence (SEQ ID NO:1131) of a native sequence PRO2274 cDNA, wherein SEQ ID NO:1131 is a clone designated herein as “DNA88296”.

[1192] FIG. 1132 shows the amino acid sequence (SEQ ID NO:1132) derived from the coding sequence of SEQ ID NO:1131 shown in FIG. 1131.

[1193] FIG. 1133 shows a nucleotide sequence (SEQ ID NO:1133) of a native sequence PRO58102 cDNA, wherein SEQ ID NO:1133 is a clone designated herein as “DNA269692”.

[1194] FIG. 1134 shows the amino acid sequence (SEQ ID NO:1134) derived from the coding sequence of SEQ ID NO:1133 shown in FIG. 1133.

[1195] FIG. 1135 shows a nucleotide sequence (SEQ ID NO:1135) of a native sequence PRO21800 cDNA, wherein SEQ ID NO:1135 is a clone designated herein as “DNA188275”.

[1196] FIG. 1136 shows the amino acid sequence (SEQ ID NO:1136) derived from the coding sequence of SEQ ID NO:1135 shown in FIG. 1135.

[1197] FIG. 1137A-B shows a nucleotide sequence (SEQ ID NO:1137) of a native sequence PRO81897 cDNA, wherein SEQ ID NO: 1137 is a clone designated herein as “DNA325359”.

[1198] FIG. 1138 shows the amino acid sequence (SEQ ID NO:1138) derived from the coding sequence of SEQ ID NO:1137 shown in FIG. 1137.

[1199] FIG. 1139 shows a nucleotide sequence (SEQ ID NO:1139) of a native sequence cDNA, wherein SEQ ID NO:1139 is a clone designated herein as “DNA329267”.

[1200] FIG. 1140 shows a nucleotide sequence (SEQ ID NO:1140) of a native sequence cDNA, wherein SEQ ID NO:1140 is a clone designated herein as “DNA270839”.

[1201] FIG. 1141 shows a nucleotide sequence (SEQ ID NO:1141) of a native sequence PRO62882 cDNA, wherein SEQ ID NO:1141 is a clone designated herein as “DNA275181”.

[1202] FIG. 1142 shows the amino acid sequence (SEQ ID NO:1142) derived from the coding sequence of SEQ ID NO:1141 shown in FIG. 1141.

[1203] FIG. 1143A-C shows a nucleotide sequence (SEQ ID NO:1143) of a native sequence PRO84864 cDNA, wherein SEQ ID NO:1143 is a clone designated herein as “DNA329268”.

[1204] FIG. 1144 shows the amino acid sequence (SEQ ID NO:1144) derived from the coding sequence of SEQ ID NO:1143 shown in FIG. 1143.

[1205] FIG. 1145A-B shows a nucleotide sequence (SEQ ID NO:1145) of a native sequence PRO84865 cDNA, wherein SEQ ID NO:1145 is a clone designated herein as “DNA329269”.

[1206] FIG. 1146 shows the amino acid sequence (SEQ ID NO:1146) derived from the coding sequence of SEQ ID NO:1145 shown in FIG. 1145.

[1207] FIG. 1147 shows a nucleotide sequence (SEQ ID NO:1147) of a native sequence PRO84866 cDNA, wherein SEQ ID NO:1147 is a clone designated herein as “DNA329270”.

[1208] FIG. 1148 shows the amino acid sequence (SEQ ID NO:1148) derived from the coding sequence of SEQ ID NO:1147 shown in FIG. 1147.

[1209] FIG. 1149 shows a nucleotide sequence (SEQ ID NO:1149) of a native sequence PRO38457 cDNA, wherein SEQ ID NO:1149 is a clone designated herein as “DNA227994”.

[1210] FIG. 1150 shows the amino acid sequence (SEQ ID NO:1150) derived from the coding sequence of SEQ ID NO:1149 shown in FIG. 1149.

[1211] FIG. 1151 shows a nucleotide sequence (SEQ ID NO:1151) of a native sequence PRO84867 cDNA, wherein SEQ ID NO:1151 is a clone designated herein as “DNA329271”.

[1212] FIG. 1152 shows the amino acid sequence (SEQ ID NO:1152) derived from the coding sequence of SEQ ID NO:1151 shown in FIG. 1151.

[1213] FIG. 1153 shows a nucleotide sequence (SEQ ID NO:1153) of a native sequence PRO1869 cDNA, wherein SEQ ID NO:1153 is a clone designated herein as “DNA325832”.

[1214] FIG. 1154 shows the amino acid sequence (SEQ ID NO:1154) derived from the coding sequence of SEQ ID NO:1153 shown in FIG. 1153.

[1215] FIG. 1155A-B shows a nucleotide sequence (SEQ ID NO:1155) of a native sequence PRO2834 cDNA, wherein SEQ ID NO:1155 is a clone designated herein as “DNA327847”.

[1216] FIG. 1156 shows the amino acid sequence (SEQ ID NO:1156) derived from the coding sequence of SEQ ID NO:1155 shown in FIG. 1155.

[1217] FIG. 1157 shows a nucleotide sequence (SEQ ID NO:1157) of a native sequence PRO2834 cDNA, wherein SEQ ID NO:1157 is a clone designated herein as “DNA88541”.

[1218] FIG. 1158 shows the amino acid sequence (SEQ ID NO:1158) derived from the coding sequence of SEQ ID NO:1157 shown in FIG. 1157.

[1219] FIG. 1159 shows a nucleotide sequence (SEQ ID NO:1159) of a native sequence PRO83794 cDNA, wherein SEQ ID NO:1159 is a clone designated herein as “DNA327849”.

[1220] FIG. 1160 shows the amino acid sequence (SEQ ID NO:1160) derived from the coding sequence of SEQ ID NO:1159 shown in FIG. 1159.

[1221] FIG. 1161 shows a nucleotide sequence (SEQ ID NO:1161) of a native sequence PRO82287 cDNA, wherein SEQ ID NO:1161 is a clone designated herein as “DNA325821”.

[1222] FIG. 1162 shows the amino acid sequence (SEQ ID NO:1162) derived from the coding sequence of SEQ ID NO:1161 shown in FIG. 1161.

[1223] FIG. 1163 shows a nucleotide sequence (SEQ ID NO:1163) of a native sequence PRO84557 cDNA, wherein SEQ ID NO:1163 is a clone designated herein as “DNA328819”.

[1224] FIG. 1164 shows the amino acid sequence (SEQ ID NO:1164) derived from the coding sequence of SEQ ID NO:1163 shown in FIG. 1163.

[1225] FIG. 1165 shows a nucleotide sequence (SEQ ID NO:1165) of a native sequence PRO82331 cDNA, wherein SEQ ID NO:1165 is a clone designated herein as “DNA325873”.

[1226] FIG. 1166 shows the amino acid sequence (SEQ ID NO:1166) derived from the coding sequence of SEQ ID NO:1165 shown in FIG. 1165.

[1227] FIG. 1167 shows a nucleotide sequence (SEQ ID NO:1167) of a native sequence PRO84561 cDNA, wherein SEQ ID NO:1167 is a clone designated herein as “DNA328823”.

[1228] FIG. 1168 shows the amino acid sequence (SEQ ID NO:1168) derived from the coding sequence of SEQ ID NO:1167 shown in FIG. 1167.

[1229] FIG. 1169 shows a nucleotide sequence (SEQ ID NO:1169) of a native sequence PRO37635 cDNA, wherein SEQ ID NO:1169 is a clone designated herein as “DNA227172”.

[1230] FIG. 1170 shows the amino acid sequence (SEQ ID NO:1170) derived from the coding sequence of SEQ ID NO:1169 shown in FIG. 1169.

[1231] FIG. 1171 shows a nucleotide sequence (SEQ ID NO:1171) of a native sequence PRO84868 cDNA, wherein SEQ ID NO:1171 is a clone designated herein as “DNA329272”.

[1232] FIG. 1172 shows the amino acid sequence (SEQ ID NO:1172) derived from the coding sequence of SEQ ID NO:1171 shown in FIG. 1171

[1233] FIG. 1173 shows a nucleotide sequence (SEQ ID NO:1173) of a native sequence PRO82223 cDNA, wherein SEQ ID NO:1173 is a clone designated herein as “DNA327853”.

[1234] FIG. 1174 shows the amino acid sequence (SEQ ID NO:1174) derived from the coding sequence of SEQ ID NO:1173 shown in FIG. 1173.

[1235] FIG. 1175 shows a nucleotide sequence (SEQ ID NO:1175) of a native sequence PRO84869 cDNA, wherein SEQ ID NO:1175 is a clone designated herein as “DNA329273”.

[1236] FIG. 1176 shows the amino acid sequence (SEQ ID NO:1176) derived from the coding sequence of SEQ ID NO:1175 shown in FIG. 1175.

[1237] FIG. 1177 shows a nucleotide sequence (SEQ ID NO:1177) of a native sequence PRO84870 cDNA, wherein SEQ ID NO:1177 is a clone designated herein as “DNA329274”.

[1238] FIG. 1178 shows the amino acid sequence (SEQ ID NO:1178) derived from the coding sequence of SEQ ID NO:1177 shown in FIG. 1177.

[1239] FIG. 1179 shows a nucleotide sequence (SEQ ID NO:1179) of a native sequence PRO82813 cDNA, wherein SEQ ID NO:1179 is a clone designated herein as “DNA326428”.

[1240] FIG. 1180 shows the amino acid sequence (SEQ ID NO:1180) derived from the coding sequence of SEQ ID NO:1179 shown in FIG. 1179.

[1241] FIG. 1181 shows a nucleotide sequence (SEQ ID NO:1181) of a native sequence PRO37681 cDNA, wherein SEQ ID NO:1181 is a clone designated herein as “DNA227218”.

[1242] FIG. 1182 shows the amino acid sequence (SEQ ID NO:1182) derived from the coding sequence of SEQ ID NO:1181 shown in FIG. 1181.

[1243] FIG. 1183 shows a nucleotide sequence (SEQ ID NO:1183) of a native sequence PRO233 cDNA, wherein SEQ ID NO:1183 is a clone designated herein as “DNA328831”.

[1244] FIG. 1184 shows the amino acid sequence (SEQ ID NO:1184) derived from the coding sequence of SEQ ID NO:1183 shown in FIG. 1183.

[1245] FIG. 1185 shows a nucleotide sequence (SEQ ID NO:1185) of a native sequence PRO84569 cDNA, wherein SEQ ID NO:1185 is a clone designated herein as “DNA328833”.

[1246] FIG. 1186 shows the amino acid sequence (SEQ ID NO:1186) derived from the coding sequence of SEQ ID NO:1185 shown in FIG. 1186.

[1247] FIG. 1187 shows a nucleotide sequence (SEQ ID NO:) of a native sequence PRO84572 cDNA, wherein SEQ ID NO:1187 is a clone designated herein as “DNA328836”.

[1248] FIG. 1188 shows the amino acid sequence (SEQ ID NO:1188) derived from the coding sequence of SEQ ID NO:1187 shown in FIG. 1187.

[1249] FIG. 1189 shows a nucleotide sequence (SEQ ID NO:1189) of a native sequence PRO12342 cDNA, wherein SEQ ID NO:1189 is a clone designated herein as “DNA329275”.

[1250] FIG. 1190 shows the amino acid sequence (SEQ ID NO:1190) derived from the coding sequence of SEQ ID NO:1189 shown in FIG. 1189.

[1251] FIG. 1191 shows a nucleotide sequence (SEQ ID NO:1191) of a native sequence PRO12104 cDNA, wherein SEQ ID NO:1191 is a clone designated herein as “DNA329276”.

[1252] FIG. 1192 shows the amino acid sequence (SEQ ID NO:1192) derived from the coding sequence of SEQ ID NO:1191 shown in FIG. 1191.

[1253] FIG. 1193 shows a nucleotide sequence (SEQ ID NO:1193) of a native sequence PRO84575 cDNA, wherein SEQ ID NO:1193 is a clone designated herein as “DNA328841”.

[1254] FIG. 1194 shows the amino acid sequence (SEQ ID NO:1194) derived from the coding sequence of SEQ ID NO:1193 shown in FIG. 1193.

[1255] FIG. 1195 shows a nucleotide sequence (SEQ ID NO:1195) of a native sequence PRO6241 cDNA, wherein SEQ ID NO:1195 is a clone designated herein as “DNA329277”.

[1256] FIG. 1196 shows the amino acid sequence (SEQ ID NO:1196) derived from the coding sequence of SEQ ID NO:1195 shown in FIG. 1195.

[1257] FIG. 1197 shows a nucleotide sequence (SEQ ID NO:1197) of a native sequence PRO84871 cDNA, wherein SEQ ID NO:1197 is a clone designated herein as “DNA329278”.

[1258] FIG. 1198 shows the amino acid sequence (SEQ ID NO:1198) derived from the coding sequence of SEQ ID NO:1197 shown in FIG. 1197.

[1259] FIG. 1199 shows a nucleotide sequence (SEQ ID NO:1199) of a native sequence PRO62669 cDNA, wherein SEQ ID NO:1199 is a clone designated herein as “DNA274930”.

[1260] FIG. 1200 shows the amino acid sequence (SEQ ID NO:1200) derived from the coding sequence of SEQ ID NO:1199 shown in FIG. 1199.

[1261] FIG. 1201 shows a nucleotide sequence (SEQ ID NO:1201) of a native sequence PRO84872 cDNA, wherein SEQ ID NO:1201 is a clone designated herein as “DNA329279”.

[1262] FIG. 1202 shows the amino acid sequence (SEQ ID NO:1202) derived from the coding sequence of SEQ ID NO:1201 shown in FIG. 1201.

[1263] FIG. 1203 shows a nucleotide sequence (SEQ ID NO:1203) of a native sequence PRO49837 cDNA, wherein SEQ ID NO:1203 is a clone designated herein as “DNA254739”.

[1264] FIG. 1204 shows the amino acid sequence (SEQ ID NO:1204) derived from the coding sequence of SEQ ID NO:1203 shown in FIG. 1203.

[1265] FIG. 1205 shows a nucleotide sequence (SEQ ID NO:1205) of a native sequence PRO84873 cDNA, wherein SEQ ID NO:1205 is a clone designated herein as “DNA329280”.

[1266] FIG. 1206 shows the amino acid sequence (SEQ ID NO:1206) derived from the coding sequence of SEQ ID NO:1205 shown in FIG. 1205.

[1267] FIG. 1207 shows a nucleotide sequence (SEQ ID NO:1207) of a native sequence PRO83800 cDNA, wherein SEQ ID NO:1207 is a clone designated herein as “DNA327858”.

[1268] FIG. 1208 shows the amino acid sequence (SEQ ID NO:1208) derived from the coding sequence of SEQ ID NO:1207 shown in FIG. 1207.

[1269] FIG. 1209 shows a nucleotide sequence (SEQ ID NO:1209) of a native sequence PRO84581 cDNA, wherein SEQ ID NO:1209 is a clone designated herein as “DNA328850”.

[1270] FIG. 1210 shows the amino acid sequence (SEQ ID NO:1210) derived from the coding sequence of SEQ ID NO:1209 shown in FIG. 1209.

[1271] FIG. 1211 shows a nucleotide sequence (SEQ ID NO:1211) of a native sequence PRO61257 cDNA, wherein SEQ ID NO:1211 is a clone designated herein as “DNA273230”.

[1272] FIG. 1212 shows the amino acid sequence (SEQ ID NO:1212) derived from the coding sequence of SEQ ID NO:1211 shown in FIG. 1211.

[1273] FIG. 1213 shows a nucleotide sequence (SEQ ID NO:1213) of a native sequence PRO82325 cDNA, wherein SEQ ID NO:1213 is a clone designated herein as “DNA325866”.

[1274] FIG. 1214 shows the amino acid sequence (SEQ ID NO:1214) derived from the coding sequence of SEQ ID NO:1213 shown in FIG. 1213.

[1275] FIG. 1215 shows a nucleotide sequence (SEQ ID NO:1215) of a native sequence PRO84874 cDNA, wherein SEQ ID NO:1215 is a clone designated herein as “DNA329281”.

[1276] FIG. 1216 shows the amino acid sequence (SEQ ID NO:1216) derived from the coding sequence of SEQ ID NO:1215 shown in FIG. 1215.

[1277] FIG. 1217 shows a nucleotide sequence (SEQ ID NO:1217) of a native sequence PRO84875 cDNA, wherein SEQ ID NO:1217 is a clone designated herein as “DNA329282”.

[1278] FIG. 1218 shows the amino acid sequence (SEQ ID NO:1218) derived from the coding sequence of SEQ ID NO:1217 shown in FIG. 1217.

[1279] FIG. 1219 shows a nucleotide sequence (SEQ ID NO:1219) of a native sequence PRO61003 cDNA, wherein SEQ ID NO:1219 is a clone designated herein as “DNA272918”.

[1280] FIG. 1220 shows the amino acid sequence (SEQ ID NO:1220) derived from the coding sequence of SEQ ID NO:1219 shown in FIG. 1219.

[1281] FIG. 1221 shows a nucleotide sequence (SEQ ID NO:1221) of a native sequence PRO84876 cDNA, wherein SEQ ID NO:1221 is a clone designated herein as “DNA329283”.

[1282] FIG. 1222 shows the amino acid sequence (SEQ ID NO:1222) derived from the coding sequence of SEQ ID NO:1221 shown in FIG. 1221.

[1283] FIG. 1223A-B shows a nucleotide sequence (SEQ ID NO:1223) of a native sequence PRO84877 cDNA, wherein SEQ ID NO:1223 is a clone designated herein as “DNA329284”.

[1284] FIG. 1224 shows the amino acid sequence (SEQ ID NO:1224) derived from the coding sequence of SEQ ID NO:1223 shown in FIG. 1223.

[1285] FIG. 1225 shows a nucleotide sequence (SEQ ID NO:1225) of a native sequence PRO84878 cDNA, wherein SEQ ID NO:1225 is a clone designated herein as “DNA329285”.

[1286] FIG. 1226 shows the amino acid sequence (SEQ ID NO:1226) derived from the coding sequence of SEQ ID NO:1225 shown in FIG. 1225.

[1287] FIG. 1227 shows a nucleotide sequence (SEQ ID NO:1227) of a native sequence PRO84592 cDNA; wherein SEQ ID NO:1227 is a clone designated herein as “DNA328864”.

[1288] FIG. 1228 shows the amino acid sequence (SEQ ID NO:1228) derived from the coding sequence of SEQ ID NO:1227 shown in FIG. 1227.

[1289] FIG. 1229 shows a nucleotide sequence (SEQ ID NO:1229) of a native sequence PRO224 cDNA, wherein SEQ ID NO:1229 is a clone designated herein as “DNA326550”.

[1290] FIG. 1230 shows the amino acid sequence (SEQ ID NO:1230) derived from the coding sequence of SEQ ID NO:1229 shown in FIG. 1229.

[1291] FIG. 1231 shows a nucleotide sequence (SEQ ID NO:1231) of a native sequence PRO69644 cDNA, wherein SEQ ID NO:1231 is a clone designated herein as “DNA329286”.

[1292] FIG. 1232 shows the amino acid sequence (SEQ ID NO:1232) derived from the coding sequence of SEQ ID NO:1231 shown in FIG. 1231.

[1293] FIG. 1233 shows a nucleotide sequence (SEQ ID NO:1233) of a native sequence PRO4929 cDNA, wherein SEQ ID NO:1233 is a clone designated herein as “DNA93548”.

[1294] FIG. 1234 shows the amino acid sequence (SEQ ID NO:1234) derived from the coding sequence of SEQ ID NO:1233 shown in FIG. 1233.

[1295] FIG. 1235 shows a nucleotide sequence (SEQ ID NO:1235) of a native sequence PRO84879 cDNA, wherein SEQ ID NO:1235 is a clone designated herein as “DNA329287”.

[1296] FIG. 1236 shows the amino acid sequence (SEQ ID NO:1236) derived from the coding sequence of SEQ ID NO:1235 shown in FIG. 1235.

[1297] FIG. 1237 shows a nucleotide sequence (SEQ ID NO:1237) of a native sequence PRO84880 cDNA, wherein SEQ ID NO:1237 is a clone designated herein as “DNA329288”.

[1298] FIG. 1238 shows the amino acid sequence (SEQ ID NO:1238) derived from the coding sequence of SEQ ID NO:1237 shown in FIG. 1237.

[1299] FIG. 1239 shows a nucleotide sequence (SEQ ID NO:1239) of a native sequence PRO38080 cDNA, wherein SEQ ID NO:1239 is a clone designated herein as “DNA227617”.

[1300] FIG. 1240 shows the amino acid sequence (SEQ ID NO:1240) derived from the coding sequence of SEQ ID NO:1239 shown in FIG. 1239.

[1301] FIG. 1241 shows a nucleotide sequence (SEQ ID NO:1241) of a native sequence PRO83216 cDNA, wherein SEQ ID NO:1241 is a clone designated herein as “DNA329289”.

[1302] FIG. 1242 shows the amino acid sequence (SEQ ID NO:1242) derived from the coding sequence of SEQ ID NO:1241 shown in FIG. 1241.

[1303] FIG. 1243 shows a nucleotide sequence (SEQ ID NO:1243) of a native sequence PRO4805 cDNA, wherein SEQ ID NO:1243 is a clone designated herein as “DNA327874”.

[1304] FIG. 1244 shows the amino acid sequence (SEQ ID NO:1244) derived from the coding sequence of SEQ ID NO:1243 shown in FIG. 1243.

[1305] FIG. 1245 shows a nucleotide sequence (SEQ ID NO:1245) of a native sequence PRO37096 cDNA, wherein SEQ ID NO:1245 is a clone designated herein as “DNA226633”.

[1306] FIG. 1246 shows the amino acid sequence (SEQ ID NO:1246) derived from the coding sequence of SEQ ID NO:1245 shown in FIG. 1245.

[1307] FIG. 1247 shows a nucleotide sequence (SEQ ID NO:1247) of a native sequence PRO69889 cDNA, wherein SEQ ID NO:1247 is a clone designated herein as “DNA304780”.

[1308] FIG. 1248 shows the amino acid sequence (SEQ ID NO:1248) derived from the coding sequence of SEQ ID NO:1247 shown in FIG. 1247.

[1309] FIG. 1249 shows a nucleotide sequence (SEQ ID NO:1249) of a native sequence PRO84881 cDNA, wherein SEQ ID NO:1249 is a clone designated herein as “DNA329290”.

[1310] FIG. 1250 shows the amino acid sequence (SEQ ID NO:1250) derived from the coding sequence of SEQ ID NO:1249 shown in FIG. 1249.

[1311] FIG. 1251 shows a nucleotide sequence (SEQ ID NO:1251) of a native sequence PRO1017 cDNA, wherein SEQ ID NO:1251 is a clone designated herein as “DNA329291”.

[1312] FIG. 1252 shows the amino acid sequence (SEQ ID NO:1252) derived from the coding sequence of SEQ ID NO:1251 shown in FIG. 1251.

[1313] FIG. 1253 shows a nucleotide sequence (SEQ ID NO:1253) of a native sequence PRO84712 cDNA, wherein SEQ ID NO:1253 is a clone designated herein as “DNA329050”.

[1314] FIG. 1254 shows the amino acid sequence (SEQ ID NO:1254) derived from the coding sequence of SEQ ID NO:1253 shown in FIG. 1253.

[1315] FIG. 1255 shows a nucleotide sequence (SEQ ID NO:1255) of a native sequence PRO37650 cDNA, wherein SEQ ID NO:1255 is a clone designated herein as “DNA227187”.

[1316] FIG. 1256 shows the amino acid sequence (SEQ ID NO:1256) derived from the coding sequence of SEQ ID NO:1255 shown in FIG. 1255.

[1317] FIG. 1257 shows a nucleotide sequence (SEQ ID NO:1257) of a native sequence PRO84882 cDNA, wherein SEQ ID NO:1257 is a clone designated herein as “DNA329292”.

[1318] FIG. 1258 shows the amino acid sequence (SEQ ID NO:1258) derived from the coding sequence of SEQ ID NO:1257 shown in FIG. 1257.

[1319] FIG. 1259 shows a nucleotide sequence (SEQ ID NO:1259) of a native sequence PRO84883 cDNA, wherein SEQ ID NO:1259 is a clone designated herein as “DNA329293”.

[1320] FIG. 1260 shows the amino acid sequence (SEQ ID NO:1260) derived from the coding sequence of SEQ ID NO:1259 shown in FIG. 1259.

[1321] FIG. 1261 shows a nucleotide sequence (SEQ ID NO:1261) of a native sequence PRO84884 cDNA, wherein SEQ ID NO:1261 is a clone designated herein as “DNA329294”.

[1322] FIG. 1262 shows the amino acid sequence (SEQ ID NO:1262) derived from the coding sequence of SEQ ID NO:1261 shown in FIG. 1261.

[1323] FIG. 1263 shows a nucleotide sequence (SEQ ID NO:1263) of a native sequence PRO69517 cDNA, wherein SEQ ID NO:1263 is a clone designated herein as “DNA287242”.

[1324] FIG. 1264 shows the amino acid sequence (SEQ ID NO:1264) derived from the coding sequence of SEQ ID NO:1263 shown in FIG. 1263.

[1325] FIG. 1265 shows a nucleotide sequence (SEQ ID NO:1265) of a native sequence PRO84885 cDNA, wherein SEQ ID NO:1265 is a clone designated herein as “DNA329295”.

[1326] FIG. 1266 shows the amino acid sequence (SEQ ID NO:1266) derived from the coding sequence of SEQ ID NO:1261 shown in FIG. 1261.

[1327] FIG. 1267 shows a nucleotide sequence (SEQ ID NO:1267) of a native sequence PRO83819 cDNA, wherein SEQ ID NO:1267 is a clone designated herein as “DNA327880”.

[1328] FIG. 1268 shows the amino acid sequence (SEQ ID NO:1268) derived from the coding sequence of SEQ ID NO:1267 shown in FIG. 1267.

[1329] FIG. 1269 shows a nucleotide sequence (SEQ ID NO:1269) of a native sequence PRO84617 cDNA, wherein SEQ ID NO:1269 is a clone designated herein as “DNA328894”.

[1330] FIG. 1270 shows the amino acid sequence (SEQ ID NO:1270) derived from the coding sequence of SEQ ID NO:1269 shown in FIG. 1269.

[1331] FIG. 1271 shows a nucleotide sequence (SEQ ID NO:1271) of a native sequence PRO51682 cDNA, wherein SEQ ID NO:1271 is a clone designated herein as “DNA256749”.

[1332] FIG. 1272 shows the amino acid sequence (SEQ ID NO:1272) derived from the coding sequence of SEQ ID NO:1271 shown in FIG. 1271.

[1333] FIG. 1273 shows a nucleotide sequence (SEQ ID NO:1273) of a native sequence PRO84886 cDNA, wherein SEQ ID NO:1273 is a clone designated herein as “DNA329296”.

[1334] FIG. 1274 shows the amino acid sequence (SEQ ID NO:1274) derived from the coding sequence of SEQ ID NO:1273 shown in FIG. 1273.

[1335] FIG. 1275 shows a nucleotide sequence (SEQ ID NO:1275) of a native sequence PRO82421 cDNA, wherein SEQ ID NO:1275 is a clone designated herein as “DNA325976”.

[1336] FIG. 1276 shows the amino acid sequence (SEQ ID NO:1276) derived from the coding sequence of SEQ ID NO:1275 shown in FIG. 1275.

[1337] FIG. 1277A-C shows a nucleotide sequence (SEQ ID NO:1277) of a native sequence PRO23303 cDNA, wherein SEQ ID NO:1277 is a clone designated herein as “DNA329297”.

[1338] FIG. 1278 shows the amino acid sequence (SEQ ID NO:1278) derived from the coding sequence of SEQ ID NO:1277 shown in FIG. 1277.

[1339] FIG. 1279 shows a nucleotide sequence (SEQ ID NO:1279) of a native sequence PRO50991 cDNA, wherein SEQ ID NO:1279 is a clone designated herein as “DNA255939”.

[1340] FIG. 1280 shows the amino acid sequence (SEQ ID NO:1280) derived from the coding sequence of SEQ ID NO:1279 shown in FIG. 1279.

[1341] FIG. 1281 shows a nucleotide sequence (SEQ ID NO:1281) of a native sequence PRO49625 cDNA, wherein SEQ ID NO:1281 is a clone designated herein as “DNA254518”.

[1342] FIG. 1282 shows the amino acid sequence (SEQ ID NO:1282) derived from the coding sequence of SEQ ID NO:1281 shown in FIG. 1281.

[1343] FIG. 1283A-B shows a nucleotide sequence (SEQ ID NO:1283) of a native sequence PRO84887 cDNA, wherein SEQ ID NO:1283 is a clone designated herein as “DNA329298”.

[1344] FIG. 1284 shows the amino acid sequence (SEQ ID NO:1284) derived from the coding sequence of SEQ ID NO:1283 shown in FIG. 1283.

[1345] FIG. 1285 shows a nucleotide sequence (SEQ ID NO:1285) of a native sequence PRO84622 cDNA, wherein SEQ ID NO:1285 is a clone designated herein as “DNA328901”.

[1346] FIG. 1286 shows the amino acid sequence (SEQ ID NO:1286) derived from the coding sequence of SEQ ID NO:1285 shown in FIG. 1285.

[1347] FIG. 1287A-B shows a nucleotide sequence (SEQ ID NO:1287) of a native sequence PRO37642 cDNA, wherein SEQ ID NO:1287 is a clone designated herein as “DNA227179”.

[1348] FIG. 1288 shows the amino acid sequence (SEQ ID NO:1288) derived from the coding sequence of SEQ ID NO:1287 shown in FIG. 1287.

[1349] FIG. 1289 shows a nucleotide sequence (SEQ ID NO:1289) of a native sequence PRO84888 cDNA, wherein SEQ ID NO:1289 is a clone designated herein as “DNA329299”.

[1350] FIG. 1290 shows the amino acid sequence (SEQ ID NO:1290) derived from the coding sequence of SEQ ID NO:1289 shown in FIG. 1289.

[1351] FIG. 1291 shows a nucleotide sequence (SEQ ID NO:1291) of a native sequence PRO84889 cDNA, wherein SEQ ID NO:1291 is a clone designated herein as “DNA329300”.

[1352] FIG. 1292 shows the amino acid sequence (SEQ ID NO:1292) derived from the coding sequence of SEQ ID NO:1291 shown in FIG. 1291.

[1353] FIG. 1293 shows a nucleotide sequence (SEQ ID NO:1293) of a native sequence PRO51671 cDNA, wherein SEQ ID NO:1293 is a clone designated herein as “DNA256737”.

[1354] FIG. 1294 shows the amino acid sequence (SEQ ID NO:1294) derived from the coding sequence of SEQ ID NO:1293 shown in FIG. 1293.

[1355] FIG. 1295 shows a nucleotide sequence (SEQ ID NO:1295) of a native sequence PRO84890 cDNA, wherein SEQ ID NO:1295 is a clone designated herein as “DNA329301”.

[1356] FIG. 1296 shows the amino acid sequence (SEQ ID NO:1296) derived from the coding sequence of SEQ ID NO:1295 shown in FIG. 1295.

[1357] FIG. 1297A-B shows a nucleotide sequence (SEQ ID NO:1297) of a native sequence PRO84891 cDNA, wherein SEQ ID NO:1297 is a clone designated herein as “DNA329302”.

[1358] FIG. 1298 shows the amino acid sequence (SEQ ID NO:1298) derived from the coding sequence of SEQ ID NO:1297 shown in FIG. 1297.

[1359] FIG. 1299 shows a nucleotide sequence (SEQ ID NO:1299) of a native sequence PRO84634 cDNA, wherein SEQ ID NO:1299 is a clone designated herein as “DNA328915”.

[1360] FIG. 1300 shows the amino acid sequence (SEQ ID NO:1300) derived from the coding sequence of SEQ ID NO:1299 shown in FIG. 1299.

[1361] FIG. 1301A-B shows a nucleotide sequence (SEQ ID NO:1301) of a native sequence PRO61987 cDNA, wherein SEQ ID NO:1301 is a clone designated herein as “DNA274044”.

[1362] FIG. 1302 shows the amino acid sequence (SEQ ID NO:1302) derived from the coding sequence of SEQ ID NO:1301 shown in FIG. 1301.

[1363] FIG. 1303 shows a nucleotide sequence (SEQ ID NO:1303) of a native sequence PRO84892 cDNA, wherein SEQ ID NO:1303 is a clone designated herein as “DNA329303”.

[1364] FIG. 1304 shows the amino acid sequence (SEQ ID NO:1304) derived from the coding sequence of SEQ ID NO:1303 shown in FIG. 1303.

[1365] FIG. 1305 shows a nucleotide sequence (SEQ ID NO:1305) of a native sequence PRO69564 cDNA, wherein SEQ ID NO:1305 is a clone designated herein as “DNA287295”.

[1366] FIG. 1306 shows the amino acid sequence (SEQ ID NO:1306) derived from the coding sequence of SEQ ID NO:1305 shown in FIG. 1305.

[1367] FIG. 1307 shows a nucleotide sequence (SEQ ID NO:1307) of a native sequence PRO84893 cDNA, wherein SEQ ID NO:1307 is a clone designated herein as “DNA329304”.

[1368] FIG. 1308 shows the amino acid sequence (SEQ ID NO:1308) derived from the coding sequence of SEQ ID NO:1307 shown in FIG. 1307.

[1369] FIG. 1309 shows a nucleotide sequence (SEQ ID NO:1309) of a native sequence PRO83839 cDNA, wherein SEQ ID NO:1309 is a clone designated herein as “DNA327904”.

[1370] FIG. 1310 shows the amino acid sequence (SEQ ID NO:1310) derived from the coding sequence of SEQ ID NO:1309 shown in FIG. 1309.

[1371] FIG. 1311 shows a nucleotide sequence (SEQ ID NO:1311) of a native sequence PRO69472 cDNA, wherein SEQ ID NO:1311 is a clone designated herein as “DNA287186”.

[1372] FIG. 1312 shows the amino acid sequence (SEQ ID NO:1312) derived from the coding sequence of SEQ ID NO:1311 shown in FIG. 1311.

[1373] FIG. 1313 shows a nucleotide sequence (SEQ ID NO:1313) of a native sequence PRO84894 cDNA, wherein SEQ ID NO:1313 is a clone designated herein as “DNA329305”.

[1374] FIG. 1314 shows the amino acid sequence (SEQ ID NO:1314) derived from the coding sequence of SEQ ID NO:1313 shown in FIG. 1313.

[1375] FIG. 1315 shows a nucleotide sequence (SEQ ID NO:1315) of a native sequence PRO84895 cDNA, wherein SEQ ID NO:1315 is a clone designated herein as “DNA329306”.

[1376] FIG. 1316 shows the amino acid sequence (SEQ ID NO:1316) derived from the coding sequence of SEQ ID NO:1315 shown in FIG. 1315.

[1377] FIG. 1317 shows a nucleotide sequence (SEQ ID NO:1317) of a native sequence PRO84896 cDNA, wherein SEQ ID NO:1317 is a clone designated herein as “DNA329307”.

[1378] FIG. 1318 shows the amino acid sequence (SEQ ID NO:1318) derived from the coding sequence of SEQ ID NO:1317 shown in FIG. 1317.

[1379] FIG. 1319 shows a nucleotide sequence (SEQ ID NO:1319) of a native sequence PRO80512 cDNA, wherein SEQ ID NO:1319 is a clone designated herein as “DNA323756”.

[1380] FIG. 1320 shows the amino acid sequence (SEQ ID NO:1320) derived from the coding sequence of SEQ ID NO:1319 shown in FIG. 1319.

[1381] FIG. 1321 A-B shows a nucleotide sequence (SEQ ID NO:1321) of a native sequence PRO84897 cDNA, wherein SEQ ID NO:1321 is a clone designated herein as “DNA329308”.

[1382] FIG. 1322 shows the amino acid sequence (SEQ ID NO:1322) derived from the coding sequence of SEQ ID NO:1321 shown in FIG. 1321.

[1383] FIG. 1323 shows a nucleotide sequence (SEQ ID NO:1323) of a native sequence PRO84898 cDNA, wherein SEQ ID NO:1323 is a clone designated herein as “DNA329309”.

[1384] FIG. 1324 shows the amino acid sequence (SEQ ID NO:1324) derived from the coding sequence of SEQ ID NO:1323 shown in FIG. 1323.

[1385] FIG. 1325 shows a nucleotide sequence (SEQ ID NO:1325) of a native sequence PRO70111 cDNA, wherein SEQ ID NO:1325 is a clone designated herein as “DNA288247”.

[1386] FIG. 1326 shows the amino acid sequence (SEQ ID NO:1326) derived from the coding sequence of SEQ ID NO:1325 shown in FIG. 1325.

[1387] FIG. 1327 shows a nucleotide sequence (SEQ ID NO:1327) of a native sequence PRO23253 cDNA, wherein SEQ ID NO:1327 is a clone designated herein as “DNA329078”.

[1388] FIG. 1328 shows the amino acid sequence (SEQ ID NO:1328) derived from the coding sequence of SEQ ID NO:1327 shown in FIG. 1327.

[1389] FIG. 1329 shows a nucleotide sequence (SEQ ID NO:1329) of a native sequence PRO36690 cDNA, wherein SEQ ID NO:1329 is a clone designated herein as “DNA226227”.

[1390] FIG. 1330 shows the amino acid sequence (SEQ ID NO:1330) derived from the coding sequence of SEQ ID NO:1329 shown in FIG. 1329.

[1391] FIG. 1331 shows a nucleotide sequence (SEQ ID NO:1331) of a native sequence PRO34298 cDNA, wherein SEQ ID NO:1331 is a clone designated herein as “DNA217256”.

[1392] FIG. 1332 shows the amino acid sequence (SEQ ID NO:1332) derived from the coding sequence of SEQ ID NO:1331 shown in FIG. 1331.

[1393] FIG. 1333 shows a nucleotide sequence (SEQ ID NO:1333) of a native sequence PRO84899 cDNA, wherein SEQ ID NO:1333 is a clone designated herein as “DNA329310”.

[1394] FIG. 1334 shows the amino acid sequence (SEQ ID NO:1334) derived from the coding sequence of SEQ ID NO:1333 shown in FIG. 1333.

[1395] FIG. 1335 shows a nucleotide sequence (SEQ ID NO:1335) of a native sequence PRO84659 cDNA, wherein SEQ ID NO:1335 is a clone designated herein as “DNA328948”.

[1396] FIG. 1336 shows the amino acid sequence (SEQ ID NO:1336) derived from the coding sequence of SEQ ID NO:1335 shown in FIG. 1335.

[1397] FIG. 1337 shows a nucleotide sequence (SEQ ID NO:1337) of a native sequence PRO52290 cDNA, wherein SEQ ID NO:1337 is a clone designated herein as “DNA257738”.

[1398] FIG. 1338 shows the amino acid sequence (SEQ ID NO:1338) derived from the coding sequence of SEQ ID NO:1337 shown in FIG. 1337.

[1399] FIG. 1339 shows a nucleotide sequence (SEQ ID NO:1339) of a native sequence PRO84900 cDNA, wherein SEQ ID NO:1339 is a clone designated herein as “DNA3293 11”.

[1400] FIG. 1340 shows the amino acid sequence (SEQ ID NO:1340) derived from the coding sequence of SEQ ID NO:1339 shown in FIG. 1339.

[1401] FIG. 1341 shows a nucleotide sequence (SEQ ID NO:1341) of a native sequence PRO84901 cDNA, wherein SEQ ID NO:1341 is a clone designated herein as “DNA329312”.

[1402] FIG. 1342 shows the amino acid sequence (SEQ ID NO:1342) derived from the coding sequence of SEQ ID NO:1341 shown in FIG. 1341.

[1403] FIG. 1343 shows a nucleotide sequence (SEQ ID NO:1343) of a native sequence PRO70013 cDNA, wherein SEQ ID NO:1343 is a clone designated herein as “DNA288250”.

[1404] FIG. 1344 shows the amino acid sequence (SEQ ID NO:1344) derived from the coding sequence of SEQ ID NO:1343 shown in FIG. 1343.

[1405] FIG. 1345 shows a nucleotide sequence (SEQ ID NO:1345) of a native sequence PRO83944 cDNA, wherein SEQ ID NO:1345 is a clone designated herein as “DNA328027”.

[1406] FIG. 1346 shows the amino acid sequence (SEQ ID NO:1346) derived from the coding sequence of SEQ ID NO:1345 shown in FIG. 1345.

[1407] FIG. 1347 shows a nucleotide sequence (SEQ ID NO:1347) of a native sequence PRO5734 cDNA, wherein SEQ ID NO:1347 is a clone designated herein as “DNA329313”.

[1408] FIG. 1348 shows the amino acid sequence (SEQ ID NO:1348) derived from the coding sequence of SEQ ID NO:1347 shown in FIG. 1347.

[1409] FIG. 1349 A-B shows a nucleotide sequence (SEQ ID NO:1349) of a native sequence PRO84902 cDNA, wherein SEQ ID NO:1349 is a clone designated herein as “DNA329314”.

[1410] FIG. 1350 shows the amino acid sequence (SEQ ID NO:1350) derived from the coding sequence of SEQ ID NO:1349 shown in FIG. 1349.

[1411] FIG. 1351 shows a nucleotide sequence (SEQ ID NO:1351) of a native sequence PRO37766 cDNA, wherein SEQ ID NO:1351 is a clone designated herein as “DNA227303”.

[1412] FIG. 1352 shows the amino acid sequence (SEQ ID NO:1352) derived from the coding sequence of SEQ ID NO:1351 shown in FIG. 1351.

[1413] FIG. 1353 shows a nucleotide sequence (SEQ ID NO:1353) of a native sequence PRO84903 cDNA, wherein SEQ ID NO:1353 is a clone designated herein as “DNA329315”.

[1414] FIG. 1354 shows the amino acid sequence (SEQ ID NO:1354) derived from the coding sequence of SEQ ID NO:1353 shown in FIG. 1353.

[1415] FIG. 1355 A-B shows a nucleotide sequence (SEQ ID NO:1355) of a native sequence PRO84904 cDNA, wherein SEQ ID NO:1355 is a clone designated herein as “DNA329316”.

[1416] FIG. 1356 shows the amino acid sequence (SEQ ID NO:1356) derived from the coding sequence of SEQ ID NO:1355 shown in FIG. 1355.

[1417] FIG. 1357 shows a nucleotide sequence (SEQ ID NO:1357) of a native sequence PRO81157 cDNA, wherein SEQ ID NO:1357 is a clone designated herein as “DNA329317”.

[1418] FIG. 1358 shows the amino acid sequence (SEQ ID NO:1358) derived from the coding sequence of SEQ ID NO:1357 shown in FIG. 1357.

[1419] FIG. 1359 shows a nucleotide sequence (SEQ ID NO:1359) of a native sequence cDNA, wherein SEQ ID NO:1359 is a clone designated herein as “DNA329318”.

[1420] FIG. 1360 shows a nucleotide sequence (SEQ ID NO:1360) of a native sequence PRO1607 cDNA, wherein SEQ ID NO:1360 is a clone designated herein as “DNA329319”.

[1421] FIG. 1361 shows the amino acid sequence (SEQ ID NO:1361) derived from the coding sequence of SEQ ID NO:1360 shown in FIG. 1360.

[1422] FIG. 1362 shows a nucleotide sequence (SEQ ID NO:1362) of a native sequence PRO84667 cDNA, wherein SEQ ID NO:1362 is a clone designated herein as “DNA328961”.

[1423] FIG. 1363 shows the amino acid sequence (SEQ ID NO:1363) derived from the coding sequence of SEQ ID NO:1362 shown in FIG. 1362.

[1424] FIG. 1364 shows a nucleotide sequence (SEQ ID NO:1364) of a native sequence PRO84905 cDNA, wherein SEQ ID NO:1364 is a clone designated herein as “DNA329320”.

[1425] FIG. 1365 shows the amino acid sequence (SEQ ID NO:1365) derived from the coding sequence of SEQ ID NO:1364 shown in FIG. 1364.

[1426] FIG. 1366 shows a nucleotide sequence (SEQ ID NO:1366) of a native sequence PRO84674 cDNA, wherein SEQ ID NO:1366 is a clone designated herein as “DNA328971”.

[1427] FIG. 1367 shows the amino acid sequence (SEQ ID NO:1367) derived from the coding sequence of SEQ ID NO:1366 shown in FIG. 1366.

[1428] FIG. 1368 shows a nucleotide sequence (SEQ ID NO:1368) of a native sequence PRO84906 cDNA, wherein SEQ ID NO:1368 is a clone designated herein as “DNA329321”.

[1429] FIG. 1369 shows the amino acid sequence (SEQ ID NO:1369) derived from the coding sequence of SEQ ID NO:1368 shown in FIG. 1368.

[1430] FIG. 1370 shows a nucleotide sequence (SEQ ID NO:1370) of a native sequence PRO80490 cDNA, wherein SEQ ID NO:1370 is a clone designated herein as “DNA329322”.

[1431] FIG. 1371 shows the amino acid sequence (SEQ ID NO:1371) derived from the coding sequence of SEQ ID NO:1370 shown in FIG. 1370.

[1432] FIG. 1372 shows a nucleotide sequence (SEQ ID NO:1372) of a native sequence PRO47688 cDNA, wherein SEQ ID NO:1372 is a clone designated herein as “DNA328975”.

[1433] FIG. 1373 shows the amino acid sequence (SEQ ID NO:1373) derived from the coding sequence of SEQ ID NO:1372 shown in FIG. 1372.

[1434] FIG. 1374 shows a nucleotide sequence (SEQ ID NO:1374) of a native sequence PRO84677 cDNA, wherein SEQ ID NO:1374 is a clone designated herein as “DNA328976”.

[1435] FIG. 1375 shows the amino acid sequence (SEQ ID NO:1375) derived from the coding sequence of SEQ ID NO:1374 shown in FIG. 1374.

[1436] FIG. 1376 shows a nucleotide sequence (SEQ ID NO:1376) of a native sequence PRO703 cDNA, wherein SEQ ID NO:1376 is a clone designated herein as “DNA323915”.

[1437] FIG. 1377 shows the amino acid sequence (SEQ ID NO:1377) derived from the coding sequence of SEQ ID NO:1376 shown in FIG. 1376.

[1438] FIG. 1378 shows a nucleotide sequence (SEQ ID NO:1378) of a native sequence PRO84907 cDNA, wherein SEQ ID NO:1378 is a clone designated herein as “DNA329323”.

[1439] FIG. 1379 shows the amino acid sequence (SEQ ID NO:1379) derived from the coding sequence of SEQ ID NO:1378 shown in FIG. 1378.

[1440] FIG. 1380 A-B shows a nucleotide sequence (SEQ ID NO:1380) of a native sequence PRO1314 cDNA, wherein SEQ ID NO:1380 is a clone designated herein as “DNA324364”.

[1441] FIG. 1381 shows the amino acid sequence (SEQ ID NO:1381) derived from the coding sequence of SEQ ID NO:1380 shown in FIG. 1380.

[1442] FIG. 1382 shows a nucleotide sequence (SEQ ID NO:1382) of a native sequence PRO84908 cDNA, wherein SEQ ID NO:1382 is a clone designated herein as “DNA329324”.

[1443] FIG. 1383 shows the amino acid sequence (SEQ ID NO:1383) derived from the coding sequence of SEQ ID NO:1382 shown in FIG. 1382.

[1444] FIG. 1384 shows a nucleotide sequence (SEQ ID NO:1384) of a native sequence PRO69560 cDNA, wherein SEQ ID NO:1384 is a clone designated herein as “DNA287290”.

[1445] FIG. 1385 shows the amino acid sequence (SEQ ID NO:1385) derived from the coding sequence of SEQ ID NO:1384 shown in FIG. 1384.

[1446] FIG. 1386 shows a nucleotide sequence (SEQ ID NO:1386) of a native sequence PRO84909 cDNA, wherein SEQ ID NO:1386 is a clone designated herein as “DNA329325”.

[1447] FIG. 1387 shows the amino acid sequence (SEQ ID NO:1387) derived from the coding sequence of SEQ ID NO:1386 shown in FIG. 1386.

[1448] FIG. 1388 shows a nucleotide sequence (SEQ ID NO:1388) of a native sequence PRO37686 cDNA, wherein SEQ ID NO:1388 is a clone designated herein as “DNA227223”.

[1449] FIG. 1389 shows the amino acid sequence (SEQ ID NO:1389) derived from the coding sequence of SEQ ID NO:1388 shown in FIG. 1388.

[1450] FIG. 1390 A-B shows a nucleotide sequence (SEQ ID NO:1390) of a native sequence PRO84910 cDNA, wherein SEQ ID NO:1390 is a clone designated herein as “DNA329326”.

[1451] FIG. 1391 shows the amino acid sequence (SEQ ID NO:1391) derived from the coding sequence of SEQ ID NO:1390 shown in FIG. 1390.

[1452] FIG. 1392 shows a nucleotide sequence (SEQ ID NO:1392) of a native sequence PRO83868 cDNA, wherein SEQ ID NO:1392 is a clone designated herein as “DNA327938”.

[1453] FIG. 1393 shows the amino acid sequence (SEQ ID NO:1393) derived from the coding sequence of SEQ ID NO:1392 shown in FIG. 1392.

[1454] FIG. 1394 shows a nucleotide sequence (SEQ ID NO:1394) of a native sequence PRO83869 cDNA, wherein SEQ ID NO:1394 is a clone designated herein as “DNA327939”.

[1455] FIG. 1395 shows the amino acid sequence (SEQ ID NO:1395) derived from the coding sequence of SEQ ID NO:1394 shown in FIG. 1394.

[1456] FIG. 1396 shows a nucleotide sequence (SEQ ID NO:1396) of a native sequence PRO84911 cDNA, wherein SEQ ID NO:1396 is a clone designated herein as “DNA329327”.

[1457] FIG. 1397 shows the amino acid sequence (SEQ ID NO:1397) derived from the coding sequence of SEQ ID NO:1396 shown in FIG. 1396.

[1458] FIG. 1398 A-B shows a nucleotide sequence (SEQ ID NO:1398) of a native sequence PRO51526 cDNA, wherein SEQ ID NO:1398 is a clone designated herein as “DNA26489”.

[1459] FIG. 1399 shows the amino acid sequence (SEQ ID NO:1399) derived from the coding sequence of SEQ ID NO:1398 shown in FIG. 1398.

[1460] FIG. 1400 shows a nucleotide sequence (SEQ ID NO:1400) of a native sequence PRO4984 cDNA, wherein SEQ ID NO:1400 is a clone designated herein as “DNA304460”.

[1461] FIG. 1401 shows the amino acid sequence (SEQ ID NO:1401) derived from the coding sequence of SEQ ID NO:1400 shown in FIG. 1400.

[1462] FIG. 1402 shows a nucleotide sequence (SEQ ID NO:1402) of a native sequence PRO84912 cDNA, wherein SEQ ID NO:1402 is a clone designated herein as “DNA329328”.

[1463] FIG. 1403 shows the amino acid sequence (SEQ ID NO:1403) derived from the coding sequence of SEQ ID NO:1402 shown in FIG. 1402.

[1464] FIG. 1404 shows a nucleotide sequence (SEQ ID NO:1404) of a native sequence PRO793 cDNA, wherein SEQ ID NO:1404 is a clone designated herein as “DNA304495”.

[1465] FIG. 1405 shows the amino acid sequence (SEQ ID NO:1405) derived from the coding sequence of SEQ ID NO:1404 shown in FIG. 1404.

[1466] FIG. 1406 shows a nucleotide sequence (SEQ ID NO:1406) of a native sequence PRO84913 cDNA, wherein SEQ ID NO:1406 is a clone designated herein as “DNA329329”.

[1467] FIG. 1407 shows the amino acid sequence (SEQ ID NO:1407) derived from the coding sequence of SEQ ID NO:1406 shown in FIG. 1406.

[1468] FIG. 1408 shows a nucleotide sequence (SEQ ID NO:1408) of a native sequence PRO84914 cDNA, wherein SEQ ID NO:1408 is a clone designated herein as “DNA329330”.

[1469] FIG. 1409 shows the amino acid sequence (SEQ ID NO:1409) derived from the coding sequence of SEQ ID NO:1408 shown in FIG. 1408.

[1470] FIG. 1410 shows a nucleotide sequence (SEQ ID NO:1410) of a native sequence PRO865 cDNA, wherein SEQ ID NO:1410 is a clone designated herein as “DNA327943”.

[1471] FIG. 1411 shows the amino acid sequence (SEQ ID NO:1411) derived from the coding sequence of SEQ ID NO:1410 shown in FIG. 1410.

[1472] FIG. 1412 shows a nucleotide sequence (SEQ ID NO:1412) of a native sequence PRO84915 cDNA, wherein SEQ ID NO:1412 is a clone designated herein as “DNA329331”.

[1473] FIG. 1413 shows the amino acid sequence (SEQ ID NO:1413) derived from the coding sequence of SEQ ID NO:1412 shown in FIG. 1412.

[1474] FIG. 1414 shows a nucleotide sequence (SEQ ID NO:1414) of a native sequence PRO80547 cDNA, wherein SEQ ID NO:1414 is a clone designated herein as “DNA323797”.

[1475] FIG. 1415 shows the amino acid sequence (SEQ ID NO:1415) derived from the coding sequence of SEQ ID NO:1414 shown in FIG. 1414.

[1476] FIG. 1416 shows a nucleotide sequence (SEQ ID NO:1416) of a native sequence PRO60967 cDNA, wherein SEQ ID NO:1416 is a clone designated herein as “DNA272874”.

[1477] FIG. 1417 shows the amino acid sequence (SEQ ID NO:1417) derived from the coding sequence of SEQ ID NO:1416 shown in FIG. 1416.

[1478] FIG. 1418 shows a nucleotide sequence (SEQ ID NO:1418) of a native sequence PRO84916 cDNA, wherein SEQ ID NO:1418 is a clone designated herein as “DNA329332”.

[1479] FIG. 1419 shows the amino acid sequence (SEQ ID NO:1419) derived from the coding sequence of SEQ ID NO:1418 shown in FIG. 1418.

[1480] FIG. 1420 shows a nucleotide sequence (SEQ ID NO:1420) of a native sequence PRO84917 cDNA, wherein SEQ ID NO:1420 is a clone designated herein as “DNA329333”.

[1481] FIG. 1421 shows the amino acid sequence (SEQ ID NO:1421) derived from the coding sequence of SEQ ID NO:1420 shown in FIG. 1420.

[1482] FIG. 1422 shows a nucleotide sequence (SEQ ID NO:1422) of a native sequence PRO84918 cDNA, wherein SEQ ID NO:1422 is a clone designated herein as “DNA329334”.

[1483] FIG. 1423 shows the amino acid sequence (SEQ ID NO:1423) derived from the coding sequence of SEQ ID NO:1422 shown in FIG. 1422.

[1484] FIG. 1424 shows a nucleotide sequence (SEQ ID NO:1424) of a native sequence PRO84919 cDNA, wherein SEQ ID NO:1424 is a clone designated herein as “DNA29335”.

[1485] FIG. 1425 shows the amino acid sequence (SEQ ID NO:1425) derived from the coding sequence of SEQ ID NO:1424 shown in FIG. 1424.

[1486] FIG. 1426 shows a nucleotide sequence (SEQ ID NO:1426) of a native sequence PRO84920 cDNA, wherein SEQ ID NO:1426 is a clone designated herein as “DNA329336”.

[1487] FIG. 1427 shows the amino acid sequence (SEQ ID NO:1427) derived from the coding sequence of SEQ ID NO:1426 shown in FIG. 1426.

[1488] FIG. 1428 shows a nucleotide sequence (SEQ ID NO:1428) of a native sequence PRO10096 cDNA, wherein SEQ ID NO:1428 is a clone designated herein as “DNA329337”.

[1489] FIG. 1429 shows the amino acid sequence (SEQ ID NO:1429) derived from the coding sequence of SEQ ID NO:1428 shown in FIG. 1428.

[1490] FIG. 1430 shows a nucleotide sequence (SEQ ID NO:1430) of a native sequence PRO84921 cDNA, wherein SEQ ID NO:1430 is a clone designated herein as “DNA29338”.

[1491] FIG. 1431 shows the amino acid sequence (SEQ ID NO:1431) derived from the coding sequence of SEQ ID NO:1430 shown in FIG. 1430.

[1492] FIG. 1432 A-B shows a nucleotide sequence (SEQ ID NO:1432) of a native sequence PRO84922 cDNA, wherein SEQ ID NO:1432 is a clone designated herein as “DNA329339”.

[1493] FIG. 1433 shows the amino acid sequence (SEQ ID NO:1433) derived from the coding sequence of SEQ ID NO:1432 shown in FIG. 1432.

[1494] FIG. 1434 shows a nucleotide sequence (SEQ ID NO:1434) of a native sequence PRO81805 cDNA, wherein SEQ ID NO:1434 is a clone designated herein as “DNA329340”.

[1495] FIG. 1435 shows the amino acid sequence (SEQ ID NO:1435) derived from the coding sequence of SEQ ID NO:1434 shown in FIG. 1434.

[1496] FIG. 1436 A-B shows a nucleotide sequence (SEQ ID NO:1436) of a native sequence PRO10607 cDNA, wherein SEQ ID NO:1436 is a clone designated herein as “DNA287236”.

[1497] FIG. 1437 shows the amino acid sequence (SEQ ID NO:1437) derived from the coding sequence of SEQ ID NO:1436 shown in FIG. 1436.

[1498] FIG. 1438 shows a nucleotide sequence (SEQ ID NO:1438) of a native sequence PRO84923 cDNA, wherein SEQ ID NO:1438 is a clone designated herein as “DNA329341”.

[1499] FIG. 1439 shows the amino acid sequence (SEQ ID NO:1439) derived from the coding sequence of SEQ ID NO:1438 shown in FIG. 1438.

[1500] FIG. 1440 shows a nucleotide sequence (SEQ ID NO:1440) of a native sequence PRO83133 cDNA, wherein SEQ ID NO:1440 is a clone designated herein as “DNA326800”.

[1501] FIG. 1441 shows the amino acid sequence (SEQ ID NO:1441) derived from the coding sequence of SEQ ID NO:1440 shown in FIG. 1440.

[1502] FIG. 1442 A-B shows a nucleotide sequence (SEQ ID NO:1442) of a native sequence PRO84924 cDNA, wherein SEQ ID NO:1442 is a clone designated herein as “DNA329342”.

[1503] FIG. 1443 shows the amino acid sequence (SEQ ID NO:1443) derived from the coding sequence of SEQ ID NO:1442 shown in FIG. 1442.

[1504] FIG. 1444 A-B shows a nucleotide sequence (SEQ ID NO:1444) of a native sequence PRO84925 cDNA, wherein SEQ ID NO:1444 is a clone designated herein as “DNA329343”.

[1505] FIG. 1445 shows the amino acid sequence (SEQ ID NO:1445) derived from the coding sequence of SEQ ID NO:1444 shown in FIG. 1444.

[1506] FIG. 1446 shows a nucleotide sequence (SEQ ID NO:1446) of a native sequence PRO84926 cDNA, wherein SEQ ID NO:1446 is a clone designated herein as “DNA329344”.

[1507] FIG. 1447 shows the amino acid sequence (SEQ ID NO:1447) derived from the coding sequence of SEQ ID NO:1446 shown in FIG. 1446.

[1508] FIG. 1448 shows a nucleotide sequence (SEQ ID NO:1448) of a native sequence PRO69532 cDNA, wherein SEQ ID NO:1448 is a clone designated herein as “DNA287260”.

[1509] FIG. 1449 shows the amino acid sequence (SEQ ID NO:1449) derived from the coding sequence of SEQ ID NO:1448 shown in FIG. 1448.

[1510] FIG. 1450 shows a nucleotide sequence (SEQ ID NO:1450) of a native sequence PRO37675 cDNA, wherein SEQ ID NO:1450 is a clone designated herein as “DNA324198”.

[1511] FIG. 1451 shows the amino acid sequence (SEQ ID NO:1451) derived from the coding sequence of SEQ ID NO:1450 shown in FIG. 1450.

[1512] FIG. 1452 shows a nucleotide sequence (SEQ ID NO:1452) of a native sequence PRO25349 cDNA, wherein SEQ ID NO:1452 is a clone designated herein as “DNA189412”.

[1513] FIG. 1453 shows the amino acid sequence (SEQ ID NO:1453) derived from the coding sequence of SEQ ID NO:1452 shown in FIG. 1452.

[1514] FIG. 1454 shows a nucleotide sequence (SEQ ID NO:1454) of a native sequence PRO84927 cDNA, wherein SEQ ID NO:1454 is a clone designated herein as “DNA329345”.

[1515] FIG. 1455 shows the amino acid sequence (SEQ ID NO:1455) derived from the coding sequence of SEQ ID NO:1454 shown in FIG. 1454.

[1516] FIG. 1456 shows a nucleotide sequence (SEQ ID NO:1456) of a native sequence PRO12672 cDNA, wherein SEQ ID NO:1456 is a clone designated herein as “DNA151428”.

[1517] FIG. 1457 shows the amino acid sequence (SEQ ID NO:1457) derived from the coding sequence of SEQ ID NO:1456 shown in FIG. 1456.

[1518] FIG. 1458 shows a nucleotide sequence (SEQ ID NO:1458) of a native sequence PRO84928 cDNA, wherein SEQ ID NO:1458 is a clone designated herein as “DNA329346”.

[1519] FIG. 1459 shows the amino acid sequence (SEQ ID NO:1459) derived from the coding sequence of SEQ ID NO:1458 shown in FIG. 1458.

[1520] FIG. 1460 shows a nucleotide sequence (SEQ ID NO:1460) of a native sequence PRO84929 cDNA, wherein SEQ ID NO:1460 is a clone designated herein as “DNA329347”.

[1521] FIG. 1461 shows the amino acid sequence (SEQ ID NO:1461) derived from the coding sequence of SEQ ID NO:1460 shown in FIG. 1460.

[1522] FIG. 1462 shows a nucleotide sequence (SEQ ID NO:1462) of a native sequence PRO80902 cDNA, wherein SEQ ID NO:1462 is a clone designated herein as “DNA324209”.

[1523] FIG. 1463 shows the amino acid sequence (SEQ ID NO:1463) derived from the coding sequence of SEQ ID NO:1462 shown in FIG. 1462.

[1524] FIG. 1464 shows a nucleotide sequence (SEQ ID NO:1464) of a native sequence PRO84930 cDNA, wherein SEQ ID NO:1464 is a clone designated herein as “DNA329348”.

[1525] FIG. 1465 shows the amino acid sequence (SEQ ID NO:1465) derived from the coding sequence of SEQ ID NO:1464 shown in FIG. 1464.

[1526] FIG. 1466 shows a nucleotide sequence (SEQ ID NO:1466) of a native sequence PRO84931 cDNA, wherein SEQ ID NO:1466 is a clone designated herein as “DNA329349”.

[1527] FIG. 1467 shows the amino acid sequence (SEQ ID NO:1467) derived from the coding sequence of SEQ ID NO:1466 shown in FIG. 1466.

[1528] FIG. 1468 shows a nucleotide sequence (SEQ ID NO:1468) of a native sequence PRO83852 cDNA, wherein SEQ ID NO:1468 is a clone designated herein as “DNA327917”.

[1529] FIG. 1469 shows the amino acid sequence (SEQ ID NO:1469) derived from the coding sequence of SEQ ID NO:1468 shown in FIG. 1468.

[1530] FIG. 1470 shows a nucleotide sequence (SEQ ID NO:1470) of a native sequence PRO11732 cDNA, wherein SEQ ID NO:1470 is a clone designated herein as “DNA329350”.

[1531] FIG. 1471 shows the amino acid sequence (SEQ ID NO:1471) derived from the coding sequence of SEQ ID NO:1470 shown in FIG. 1470.

[1532] FIG. 1472 shows a nucleotide sequence (SEQ ID NO:1472) of a native sequence PRO82060 cDNA, wherein SEQ ID NO:1472 is a clone designated herein as “DNA325557”.

[1533] FIG. 1473 shows the amino acid sequence (SEQ ID NO:1473) derived from the coding sequence of SEQ ID NO:1472 shown in FIG. 1472.

[1534] FIG. 1474 shows a nucleotide sequence (SEQ ID NO:1474) of a native sequence PRO81147 cDNA, wherein SEQ ID NO:1474 is a clone designated herein as “DNA329351”.

[1535] FIG. 1475 shows the amino acid sequence (SEQ ID NO:1475) derived from the coding sequence of SEQ ID NO:1474 shown in FIG. 1474.

[1536] FIG. 1476 shows a nucleotide sequence (SEQ ID NO:1476) of a native sequence PRO84932 cDNA, wherein SEQ ID NO:1476 is a clone designated herein as “DNA329352”.

[1537] FIG. 1477 shows the amino acid sequence (SEQ ID NO:1477) derived from the coding sequence of SEQ ID NO:1476 shown in FIG. 1476.

[1538] FIG. 1478 shows a nucleotide sequence (SEQ ID NO:1478) of a native sequence PRO84933 cDNA, wherein SEQ ID NO:1478 is a clone designated herein as “DNA329353”.

[1539] FIG. 1479 shows the amino acid sequence (SEQ ID NO:1479) derived from the coding sequence of SEQ ID NO:1478 shown in FIG. 1478.

[1540] FIG. 1480 shows a nucleotide sequence (SEQ ID NO:1480) of a native sequence PRO83878 cDNA, wherein SEQ ID NO:1480 is a clone designated herein as “DNA327953”.

[1541] FIG. 1481 shows the amino acid sequence (SEQ ID NO:1481) derived from the coding sequence of SEQ ID NO:1480 shown in FIG. 1480.

[1542] FIG. 1482 shows a nucleotide sequence (SEQ ID NO:1482) of a native sequence PRO80542 cDNA, wherein SEQ ID NO:1482 is a clone designated herein as “DNA323792”.

[1543] FIG. 1483 shows the amino acid sequence (SEQ ID NO:1483) derived from the coding sequence of SEQ ID NO:1482 shown in FIG. 1482.

[1544] FIG. 1484 shows a nucleotide sequence (SEQ ID NO:1484) of a native sequence PRO81822 cDNA, wherein SEQ ID NO:1484 is a clone designated herein as “DNA325272”.

[1545] FIG. 1485 shows the amino acid sequence (SEQ ID NO:1485) derived from the coding sequence of SEQ ID NO:1484 shown in FIG. 1484.

[1546] FIG. 1486 shows a nucleotide sequence (SEQ ID NO:1486) of a native sequence PRO71043 cDNA, wherein SEQ ID NO:1486 is a clone designated herein as “DNA304467”.

[1547] FIG. 1487 shows the amino acid sequence (SEQ ID NO:1487) derived from the coding sequence of SEQ ID NO:1486 shown in FIG. 1486.

[1548] FIG. 1488A-B shows a nucleotide sequence (SEQ ID NO:1488) of a native sequence PRO52040 cDNA, wherein SEQ ID NO:1488 is a clone designated herein as “DNA257461”.

[1549] FIG. 1489 shows the amino acid sequence (SEQ ID NO:1489) derived from the coding sequence of SEQ ID NO:1488 shown in FIG. 1488.

[1550] FIG. 1490 shows a nucleotide sequence (SEQ ID NO:1490) of a native sequence PRO84934 cDNA, wherein SEQ ID NO:1490 is a clone designated herein as “DNA329354”.

[1551] FIG. 1491 shows the amino acid sequence (SEQ ID NO:1491) derived from the coding sequence of SEQ ID NO:1490 shown in FIG. 1490.

[1552] FIG. 1492 shows a nucleotide sequence (SEQ ID NO:1492) of a native sequence PRO83881 cDNA, wherein SEQ ID NO:1492 is a clone designated herein as “DNA327956”.

[1553] FIG. 1493 shows the amino acid sequence (SEQ ID NO:1493) derived from the coding sequence of SEQ ID NO:1492 shown in FIG. 1492.

[1554] FIG. 1494 shows a nucleotide sequence (SEQ ID NO:1494) of a native sequence PRO51950 cDNA, wherein SEQ ID NO:1494 is a clone designated herein as “DNA257363”.

[1555] FIG. 1495 shows the amino acid sequence (SEQ ID NO:1495) derived from the coding sequence of SEQ ID NO:1495 shown in Figure

[1556] FIG. 1496 shows a nucleotide sequence (SEQ ID NO:1496) of a native sequence PRO50434 cDNA, wherein SEQ ID NO:1496 is a clone designated herein as “DNA329355”.

[1557] FIG. 1497 shows the amino acid sequence (SEQ ID NO:1497) derived from the coding sequence of SEQ ID NO:1496 shown in FIG. 1496.

[1558] FIG. 1498 shows a nucleotide sequence (SEQ ID NO:1498) of a native sequence PRO84935 cDNA, wherein SEQ ID NO:1498 is a clone designated herein as “DNA329356”.

[1559] FIG. 1499 shows the amino acid sequence (SEQ ID NO:1499) derived from the coding sequence of SEQ ID NO:1498 shown in FIG. 1498.

[1560] FIG. 1500 shows a nucleotide sequence (SEQ ID NO:1500) of a native sequence PRO84936 cDNA, wherein SEQ ID NO:1500 is a clone designated herein as “DNA329357”.

[1561] FIG. 1501 shows the amino acid sequence (SEQ ID NO:1501) derived from the coding sequence of SEQ ID NO:1500 shown in FIG. 1500.

[1562] FIG. 1502 shows a nucleotide sequence (SEQ ID NO:1502) of a native sequence PRO84937 cDNA, wherein SEQ ID NO:1502 is a clone designated herein as “DNA329358”.

[1563] FIG. 1503 shows the amino acid sequence (SEQ ID NO:1503) derived from the coding sequence of SEQ ID NO:1502 shown in FIG. 1502.

[1564] FIG. 1504 shows a nucleotide sequence (SEQ ID NO:1504) of a native sequence PRO84938 cDNA, wherein SEQ ID NO:1504 is a clone designated herein as “DNA329359”.

[1565] FIG. 1505 shows the amino acid sequence (SEQ ID NO:1505) derived from the coding sequence of SEQ ID NO:1504 shown in FIG. 1504.

[1566] FIG. 1506 shows a nucleotide sequence (SEQ ID NO:1506) of a native sequence PRO84939 cDNA, wherein SEQ ID NO:1506 is a clone designated herein as “DNA329360”.

[1567] FIG. 1507 shows the amino acid sequence (SEQ ID NO:1507) derived from the coding sequence of SEQ ID NO:1506 shown in FIG. 1506.

[1568] FIG. 1508 shows a nucleotide sequence (SEQ ID NO:1508) of a native sequence PRO84940 cDNA, wherein SEQ ID NO:1508 is a clone designated herein as “DNA329361”.

[1569] FIG. 1509 shows the amino acid sequence (SEQ ID NO:1509) derived from the coding sequence of SEQ ID NO:1508 shown in FIG. 1508.

[1570] FIG. 1510 shows a nucleotide sequence (SEQ ID NO:1510) of a native sequence PRO80856 cDNA, wherein SEQ ID NO:1510 is a clone designated herein as “DNA324156”.

[1571] FIG. 1511 shows the amino acid sequence (SEQ ID NO:1511) derived from the coding sequence of SEQ ID NO:1510 shown in FIG. 1510.

[1572] FIG. 1512 shows a nucleotide sequence (SEQ ID NO:1512) of a native sequence PRO84941 cDNA, wherein SEQ ID NO:1512 is a clone designated herein as “DNA329362”.

[1573] FIG. 1513 shows the amino acid sequence (SEQ ID NO:1513) derived from the coding sequence of SEQ ID NO:1512 shown in FIG. 1512.

[1574] FIG. 1514 shows a nucleotide sequence (SEQ ID NO:1514) of a native sequence PRO84942 cDNA, wherein SEQ ID NO:1514 is a clone designated herein as “DNA329363”.

[1575] FIG. 1515 shows the amino acid sequence (SEQ ID NO:1515) derived from the coding sequence of SEQ ID NO:1514 shown in FIG. 1514.

[1576] FIG. 1516 shows a nucleotide sequence (SEQ ID NO:1516) of a native sequence PRO84943 cDNA, wherein SEQ ID NO:1516 is a clone designated herein as “DNA329364”.

[1577] FIG. 1517 shows the amino acid sequence (SEQ ID NO:1517) derived from the coding sequence of SEQ ID NO:1516 shown in FIG. 1516.

[1578] FIG. 1518 shows a nucleotide sequence (SEQ ID NO:1518) of a native sequence PRO84944 cDNA, wherein SEQ ID NO:1518 is a clone designated herein as “DNA329365”.

[1579] FIG. 1519 shows the amino acid sequence (SEQ ID NO:1519) derived from the coding sequence of SEQ ID NO:1518 shown in FIG. 1518.

[1580] FIG. 1520 shows a nucleotide sequence (SEQ ID NO:1520) of a native sequence PRO84945 cDNA, wherein SEQ ID NO:1520 is a clone designated herein as “DNA329366”.

[1581] FIG. 1521 shows the amino acid sequence (SEQ ID NO:1521) derived from the coding sequence of SEQ ID NO:1520 shown in FIG. 1520.

[1582] FIG. 1522 shows a nucleotide sequence (SEQ ID NO:1522) of a native sequence PRO61417 cDNA, wherein SEQ ID NO:1522 is a clone designated herein as “DNA273418”.

[1583] FIG. 1523 shows the amino acid sequence (SEQ ID NO:1523) derived from the coding sequence of SEQ ID NO:1522 shown in FIG. 1522.

[1584] FIG. 1524 shows a nucleotide sequence (SEQ ID NO:1524) of a native sequence PRO81368 cDNA, wherein SEQ ID NO:1524 is a clone designated herein as “DNA324743”.

[1585] FIG. 1525 shows the amino acid sequence (SEQ ID NO:1525) derived from the coding sequence of SEQ ID NO:1524 shown in FIG. 1424.

[1586] FIG. 1526 shows a nucleotide sequence (SEQ ID NO:1526) of a native sequence PRO84946 cDNA, wherein SEQ ID NO:1526 is a clone designated herein as “DNA329367”.

[1587] FIG. 1527 shows the amino acid sequence (SEQ ID NO:1527) derived from the coding sequence of SEQ ID NO:1526 shown in FIG. 1526.

[1588] FIG. 1528 shows a nucleotide sequence (SEQ ID NO:1528) of a native sequence PRO26224 cDNA, wherein SEQ ID NO:1528 is a clone designated herein as “DNA188735”.

[1589] FIG. 1529 shows the amino acid sequence (SEQ ID NO:1529) derived from the coding sequence of SEQ ID NO:1528 shown in FIG. 1528.

[1590] FIG. 1530 shows a nucleotide sequence (SEQ ID NO:1530) of a native sequence PRO69527 cDNA, wherein SEQ ID NO:1530 is a clone designated herein as “DNA287253”.

[1591] FIG. 1531 shows the amino acid sequence (SEQ ID NO:1531) derived from the coding sequence of SEQ ID NO:1530 shown in FIG. 1530.

[1592] FIG. 1532 shows a nucleotide sequence (SEQ ID NO:1532) of a native sequence PRO1065 cDNA, wherein SEQ ID NO:1532 is a clone designated herein as “DNA327200”.

[1593] FIG. 1533 shows the amino acid sequence (SEQ ID NO:1533) derived from the coding sequence of SEQ ID NO:1532 shown in FIG. 1532.

[1594] FIG. 1534 shows a nucleotide sequence (SEQ ID NO:1534) of a native sequence PRO34454 cDNA, wherein SEQ ID NO:1534 is a clone designated herein as “DNA218676”.

[1595] FIG. 1535 shows the amino acid sequence (SEQ ID NO:1535) derived from the coding sequence of SEQ ID NO:1534 shown in FIG. 1534.

[1596] FIG. 1536 shows a nucleotide sequence (SEQ ID NO:1536) of a native sequence PRO84947 cDNA, wherein SEQ ID NO:1536 is a clone designated herein as “DNA329368”.

[1597] FIG. 1537 shows the amino acid sequence (SEQ ID NO:1537) derived from the coding sequence of SEQ ID NO:1536 shown in FIG. 1536.

[1598] FIG. 1538 shows a nucleotide sequence (SEQ ID NO:1538) of a native sequence PRO84948 cDNA, wherein SEQ ID NO:1538 is a clone designated herein as “DNA329369”.

[1599] FIG. 1539 shows the amino acid sequence (SEQ ID NO:1539) derived from the coding sequence of SEQ ID NO:1538 shown in FIG. 1538.

[1600] FIG. 1540 shows a nucleotide sequence (SEQ ID NO:1540) of a native sequence PRO81339 cDNA, wherein SEQ ID NO:1540 is a clone designated herein as “DNA324707”.

[1601] FIG. 1541 shows the amino acid sequence (SEQ ID NO:1541) derived from the coding sequence of SEQ ID NO:1540 shown in FIG. 1540.

[1602] FIG. 1542 shows a nucleotide sequence (SEQ ID NO:1542) of a native sequence PRO84949 cDNA, wherein SEQ ID NO:1542 is a clone designated herein as “DNA329370”.

[1603] FIG. 1543 shows the amino acid sequence (SEQ ID NO:1543) derived from the coding sequence of SEQ ID NO:1542 shown in FIG. 1542.

[1604] FIG. 1544 shows a nucleotide sequence (SEQ ID NO:1544) of a native sequence PRO84950 cDNA, wherein SEQ ID NO:1544 is a clone designated herein as “DNA329371”.

[1605] FIG. 1545 shows the amino acid sequence (SEQ ID NO:1545) derived from the coding sequence of SEQ ID NO:1544 shown in FIG. 1544.

[1606] FIG. 1546 shows a nucleotide sequence (SEQ ID NO:1546) of a native sequence PRO84951 cDNA, wherein SEQ ID NO:1546 is a clone designated herein as “DNA329372”.

[1607] FIG. 1547 shows the amino acid sequence (SEQ ID NO:1547) derived from the coding sequence of SEQ ID NO:1546 shown in FIG. 1546.

[1608] FIG. 1548 shows a nucleotide sequence (SEQ ID NO:1548) of a native sequence PRO84952 cDNA, wherein SEQ ID NO:1548 is a clone designated herein as “DNA329373”.

[1609] FIG. 1549 shows the amino acid sequence (SEQ ID NO:1549) derived from the coding sequence of SEQ ID NO:1548 shown in FIG. 1548.

[1610] FIG. 1550 shows a nucleotide sequence (SEQ ID NO:1550) of a native sequence PRO69574 cDNA, wherein SEQ ID NO:1550 is a clone designated herein as “DNA327976”.

[1611] FIG. 1551 shows the amino acid sequence (SEQ ID NO:1551) derived from the coding sequence of SEQ ID NO:1550 shown in FIG. 1550.

[1612] FIG. 1552 shows a nucleotide sequence (SEQ ID NO:1552) of a native sequence PRO84953 cDNA, wherein SEQ ID NO:1552 is a clone designated herein as “DNA329374”.

[1613] FIG. 1553 shows the amino acid sequence (SEQ ID NO:1553) derived from the coding sequence of SEQ ID NO:1552 shown in FIG. 1552.

[1614] FIG. 1554 shows a nucleotide sequence (SEQ ID NO:1554) of a native sequence PRO51916 cDNA, wherein SEQ ID NO:1554 is a clone designated herein as “DNA329375”.

[1615] FIG. 1555 shows the amino acid sequence (SEQ ID NO:1555) derived from the coding sequence of SEQ ID NO:1554 shown in FIG. 1554.

[1616] FIG. 1556 shows a nucleotide sequence (SEQ ID NO:1556) of a native sequence PRO84954 cDNA, wherein SEQ ID NO:1556 is a clone designated herein as “DNA329376”.

[1617] FIG. 1557 shows the amino acid sequence (SEQ ID NO:1557) derived from the coding sequence of SEQ ID NO:1556 shown in FIG. 1556.

[1618] FIG. 1558 A-B shows a nucleotide sequence (SEQ ID NO:1558) of a native sequence PRO83901 cDNA, wherein SEQ ID NO:1558 is a clone designated herein as “DNA327981”.

[1619] FIG. 1559 shows the amino acid sequence (SEQ ID NO:1559) derived from the coding sequence of SEQ ID NO:1558 shown in FIG. 1558.

[1620] FIG. 1560 shows a nucleotide sequence (SEQ ID NO:1560) of a native sequence PRO84955 cDNA, wherein SEQ ID NO:1560 is a clone designated herein as “DNA329377”.

[1621] FIG. 1561 shows the amino acid sequence (SEQ ID NO:1561) derived from the coding sequence of SEQ ID NO:1560 shown in FIG. 1560.

[1622] FIG. 1562 shows a nucleotide sequence (SEQ ID NO:1562) of a native sequence PRO84956 cDNA, wherein SEQ ID NO:1562 is a clone designated herein as “DNA329378”.

[1623] FIG. 1563 shows the amino acid sequence (SEQ ID NO:1563) derived from the coding sequence of SEQ ID NO:1562 shown in FIG. 1562.

[1624] FIG. 1564 shows a nucleotide sequence (SEQ ID NO:1564) of a native sequence PRO80871 cDNA, wherein SEQ ID NO:1564 is a clone designated herein as “DNA324173”.

[1625] FIG. 1565 shows the amino acid sequence (SEQ ID NO:1565) derived from the coding sequence of SEQ ID NO:1564 shown in FIG. 1564.

[1626] FIG. 1566 shows a nucleotide sequence (SEQ ID NO:1566) of a native sequence PRO69641 cDNA, wherein SEQ ID NO:1566 is a clone designated herein as “DNA287382”.

[1627] FIG. 1567 shows the amino acid sequence (SEQ ID NO:1567) derived from the coding sequence of SEQ ID NO:1566 shown in FIG. 1566.

[1628] FIG. 1568 shows a nucleotide sequence (SEQ ID NO:1568) of a native sequence PRO51940 cDNA, wherein SEQ ID NO:1568 is a clone designated herein as “DNA257352”.

[1629] FIG. 1569 shows the amino acid sequence (SEQ ID NO:1569) derived from the coding sequence of SEQ ID NO:1568 shown in FIG. 1568.

[1630] FIG. 1570 A-B shows a nucleotide sequence (SEQ ID NO:1570) of a native sequence PRO69594 cDNA, wherein SEQ ID NO:1570 is a clone designated herein as “DNA287330”.

[1631] FIG. 1571 shows the amino acid sequence (SEQ ID NO:1571) derived from the coding sequence of SEQ ID NO:1570 shown in FIG. 1570.

[1632] FIG. 1572A-C shows a nucleotide sequence (SEQ ID NO:1572) of a native sequence PRO84957 cDNA, wherein SEQ ID NO:1572 is a clone designated herein as “DNA329379”.

[1633] FIG. 1573 shows the amino acid sequence (SEQ ID NO:1573) derived from the coding sequence of SEQ ID NO:1572 shown in FIG. 1572.

[1634] FIG. 1574 shows a nucleotide sequence (SEQ ID NO:1574) of a native sequence PRO80743 cDNA, wherein SEQ ID NO:1574 is a clone designated herein as “DNA329380”.

[1635] FIG. 1575 shows the amino acid sequence (SEQ ID NO:1575) derived from the coding sequence of SEQ ID NO:1574 shown in FIG. 1574.

[1636] FIG. 1576 shows a nucleotide sequence (SEQ ID NO:1576) of a native sequence cDNA, wherein SEQ ID NO:1576 is a clone designated herein as “DNA329381”.

[1637] FIG. 1577 shows a nucleotide sequence (SEQ ID NO:1577) of a native sequence PRO52338 cDNA, wherein SEQ ID NO:1577 is a clone designated herein as “DNA257789”.

[1638] FIG. 1578 shows the amino acid sequence (SEQ ID NO:1578) derived from the coding sequence of SEQ ID NO:1577 shown in FIG. 1577.

[1639] FIG. 1579 shows a nucleotide sequence (SEQ ID NO:1579) of a native sequence cDNA, wherein SEQ ID NO:1579 is a clone designated herein as “DNA329382”.

[1640] FIG. 1580 shows a nucleotide sequence (SEQ ID NO:1580) of a native sequence PRO23603 cDNA, wherein SEQ ID NO:1580 is a clone designated herein as “DNA194211”.

[1641] FIG. 1581 shows the amino acid sequence (SEQ ID NO:1581) derived from the coding sequence of SEQ ID NO:1580 shown in FIG. 1580.

[1642] FIG. 1582 A-B shows a nucleotide sequence (SEQ ID NO:1582) of a native sequence PRO23253 cDNA, wherein SEQ ID NO:1582 is a clone designated herein as “DNA169523”.

[1643] FIG. 1583 shows the amino acid sequence (SEQ ID NO:1583) derived from the coding sequence of SEQ ID NO:1582 shown in FIG. 1582.

[1644] FIG. 1584 shows a nucleotide sequence (SEQ ID NO:1584) of a native sequence PRO84959 cDNA, wherein SEQ ID NO:1584 is a clone designated herein as “DNA329383”.

[1645] FIG. 1585 shows the amino acid sequence (SEQ ID NO:1585) derived from the coding sequence of SEQ ID NO:1584 shown in FIG. 1584.

[1646] FIG. 1586 shows a nucleotide sequence (SEQ ID NO:1586) of a native sequence PRO84960 cDNA, wherein SEQ ID NO:1586 is a clone designated herein as “DNA329384”.

[1647] FIG. 1587 shows the amino acid sequence (SEQ ID NO:1587) derived from the coding sequence of SEQ ID NO:1586 shown in FIG. 1586.

[1648] FIG. 1588 A-B shows a nucleotide sequence (SEQ ID NO:1588) of a native sequence PRO84961 cDNA, wherein SEQ ID NO:1588 is a clone designated herein as “DNA329385”.

[1649] FIG. 1589 shows the amino acid sequence (SEQ ID NO:1589) derived from the coding sequence of SEQ ID NO:1588 shown in FIG. 1588.

[1650] FIG. 1590 shows a nucleotide sequence (SEQ ID NO:1590) of a native sequence cDNA, wherein SEQ ID NO:1590 is a clone designated herein as “DNA161646”.

[1651] FIG. 1591 shows a nucleotide sequence (SEQ ID NO:1591) of a native sequence PRO84962 cDNA, wherein SEQ ID NO:1591 is a clone designated herein as “DNA329386”.

[1652] FIG. 1592 shows the amino acid sequence (SEQ ID NO:1592) derived from the coding sequence of SEQ ID NO:1592 shown in Figure

[1653] FIG. 1593 shows a nucleotide sequence (SEQ ID NO:1593) of a native sequence PRO84963 cDNA, wherein SEQ ID NO:1593 is a clone designated herein as “DNA329387”.

[1654] FIG. 1594 shows the amino acid sequence (SEQ ID NO:1594) derived from the coding sequence of SEQ ID NO:1593 shown in FIG. 1593.

[1655] FIG. 1595 shows a nucleotide sequence (SEQ ID NO:1595) of a native sequence PRO84964 cDNA, wherein SEQ ID NO:1595 is a clone designated herein as “DNA329388”.

[1656] FIG. 1596 shows the amino acid sequence (SEQ ID NO:1596) derived from the coding sequence of SEQ ID NO:1595 shown in FIG. 1595.

[1657] FIG. 1597 shows a nucleotide sequence (SEQ ID NO:1597) of a native sequence PRO84965 cDNA, wherein SEQ ID NO:1597 is a clone designated herein as “DNA329389”.

[1658] FIG. 1598 shows the amino acid sequence (SEQ ID NO:1598) derived from the coding sequence of SEQ ID NO:1597 shown in FIG. 1597.

[1659] FIG. 1599A-D shows a nucleotide sequence (SEQ ID NO:1599) of a native sequence PRO84966 cDNA, wherein SEQ ID NO:1599 is a clone designated herein as “DNA329390”.

[1660] FIG. 1600 shows the amino acid sequence (SEQ ID NO:1600) derived from the coding sequence of SEQ ID NO:1600 shown in Figure

[1661] FIG. 1601A-E shows a nucleotide sequence (SEQ ID NO:1601) of a native sequence PRO84967 cDNA, wherein SEQ ID NO:1601 is a clone designated herein as “DNA329391”.

[1662] FIG. 1602 shows the amino acid sequence (SEQ ID NO:1602) derived from the coding sequence of SEQ ID NO:1601 shown in FIG. 1601.

[1663] FIG. 1603 A-B shows a nucleotide sequence (SEQ ID NO:1603) of a native sequence PRO84968 cDNA, wherein SEQ ID NO:1603 is a clone designated herein as “DNA329392”.

[1664] FIG. 1604 shows the amino acid sequence (SEQ ID NO:1604) derived from the coding sequence of SEQ ID NO:1603 shown in FIG. 1603.

[1665] FIG. 1605 A-B shows a nucleotide sequence (SEQ ID NO:1605) of a native sequence PRO81138 cDNA, wherein SEQ ID NO:1605 is a clone designated herein as “DNA327993”.

[1666] FIG. 1606 shows the amino acid sequence (SEQ ID NO:1606) derived from the coding sequence of SEQ ID NO:1605 shown in FIG. 1605.

[1667] FIG. 1607 shows a nucleotide sequence (SEQ ID NO:1607) of a native sequence cDNA, wherein SEQ ID NO:1607 is a clone designated herein as “DNA155396”.

[1668] FIG. 1608 shows a nucleotide sequence (SEQ ID NO:1608) of a native sequence PRO84969 cDNA, wherein SEQ ID NO:1608 is a clone designated herein as “DNA329393”.

[1669] FIG. 1609 shows the amino acid sequence (SEQ ID NO:1609) derived from the coding sequence of SEQ ID NO:1608 shown in FIG. 1608.

[1670] FIG. 1610 shows a nucleotide sequence (SEQ ID NO:1610) of a native sequence PRO83915 cDNA, wherein SEQ ID NO:1610 is a clone designated herein as “DNA327996”.

[1671] FIG. 1611 shows the amino acid sequence (SEQ ID NO:1611) derived from the coding sequence of SEQ ID NO:1611 shown in Figure

[1672] FIG. 1612 shows a nucleotide sequence (SEQ ID NO:1612) of a native sequence cDNA, wherein SEQ ID NO:1612 is a clone designated herein as “DNA329394”.

[1673] FIG. 1613 A-B shows a nucleotide sequence (SEQ ID NO:1613) of a native sequence PRO84971 cDNA, wherein SEQ ID NO:1613 is a clone designated herein as “DNA329395”.

[1674] FIG. 1614 shows the amino acid sequence (SEQ ID NO:1614) derived from the coding sequence of SEQ ID NO:1613 shown in FIG. 1613.

[1675] FIG. 1615 shows a nucleotide sequence (SEQ ID NO:1615) of a native sequence cDNA, wherein SEQ ID NO:1615 is a clone designated herein as “DNA228047”.

[1676] FIG. 1616 shows a nucleotide sequence (SEQ ID NO:1616) of a native sequence PRO84972 cDNA, wherein SEQ ID NO:1616 is a clone designated herein as “DNA329396”.

[1677] FIG. 1617 shows the amino acid sequence (SEQ ID NO:1617) derived from the coding sequence of SEQ ID NO:1616 shown in FIG. 1616.

[1678] FIG. 1618 shows a nucleotide sequence (SEQ ID NO:1618) of a native sequence PRO84973 cDNA, wherein SEQ ID NO:1618 is a clone designated herein as “DNA329397”.

[1679] FIG. 1619 shows the amino acid sequence (SEQ ID NO:1619) derived from the coding sequence of SEQ ID NO:1618 shown in FIG. 1618.

[1680] FIG. 1620 A-B shows a nucleotide sequence (SEQ ID NO:1620) of a native sequence PRO4805 cDNA, wherein SEQ ID NO:1620 is a clone designated herein as “DNA329398”.

[1681] FIG. 1621 shows the amino acid sequence (SEQ ID NO:1621) derived from the coding sequence of SEQ ID NO:1620 shown in FIG. 1620.

[1682] FIG. 1622 shows a nucleotide sequence (SEQ ID NO:1622) of a native sequence PRO84974 cDNA, wherein SEQ ID NO:1622 is a clone designated herein as “DNA329399”.

[1683] FIG. 1623 shows the amino acid sequence (SEQ ID NO:1623) derived from the coding sequence of SEQ ID NO:1622 shown in FIG. 1622.

[1684] FIG. 1624 shows a nucleotide sequence (SEQ ID NO:1624) of a native sequence cDNA, wherein SEQ ID NO:1624 is a clone designated herein as “DNA329400”.

[1685] FIG. 1625 shows a nucleotide sequence (SEQ ID NO:1625) of a native sequence PRO28544 cDNA, wherein SEQ ID NO:1625 is a clone designated herein as “DNA199090”.

[1686] FIG. 1626 shows the amino acid sequence (SEQ ID NO:1626) derived from the coding sequence of SEQ ID NO:1625 shown in FIG. 1625

[1687] FIG. 1627 shows a nucleotide sequence (SEQ ID NO:1627) of a native sequence PRO82422 cDNA, wherein SEQ ID NO:1627 is a clone designated herein as “DNA325977”.

[1688] FIG. 1628 shows the amino acid sequence (SEQ ID NO:1628) derived from the coding sequence of SEQ ID NO:1627 shown in FIG. 1627.

[1689] FIG. 1629 shows a nucleotide sequence (SEQ ID NO:1629) of a native sequence PRO84976 cDNA, wherein SEQ ID NO:1629 is a clone designated herein as “DNA329401”.

[1690] FIG. 1630 shows the amino acid sequence (SEQ ID NO:1630) derived from the coding sequence of SEQ ID NO:1629 shown in FIG. 1629.

[1691] FIG. 1631 shows a nucleotide sequence (SEQ ID NO:1631) of a native sequence PRO4845 cDNA, wherein SEQ ID NO:1631 is a clone designated herein as “DNA329402”.

[1692] FIG. 1632 shows the amino acid sequence (SEQ ID NO:1632) derived from the coding sequence of SEQ ID NO:1631 shown in FIG. 1631.

[1693] FIG. 1633 shows a nucleotide sequence (SEQ ID NO:1633) of a native sequence cDNA, wherein SEQ ID NO:1633 is a clone designated herein as “DNA329403”.

[1694] FIG. 1634 shows a nucleotide sequence (SEQ ID NO:1634) of a native sequence cDNA, wherein SEQ ID NO:1634 is a clone designated herein as “DNA195699”.

[1695] FIG. 1635 shows a nucleotide sequence (SEQ ID NO:1635) of a native sequence PRO71212 cDNA, wherein SEQ ID NO:1635 is a clone designated herein as “DNA304802”.

[1696] FIG. 1636 shows the amino acid sequence (SEQ ID NO:1636) derived from the coding sequence of SEQ ID NO:1635 shown in FIG. 1635.

[1697] FIG. 1637 shows a nucleotide sequence (SEQ ID NO:1637) of a native sequence cDNA, wherein SEQ ID NO:1637 is a clone designated herein as “DNA328005”.

[1698] FIG. 1638 shows a nucleotide sequence (SEQ ID NO:1638) of a native sequence PRO82972 cDNA, wherein SEQ ID NO:1638 is a clone designated herein as “DNA329404”.

[1699] FIG. 1639 shows the amino acid sequence (SEQ ID NO:1639) derived from the coding sequence of SEQ ID NO:1638 shown in FIG. 1638.

[1700] FIG. 1640 shows a nucleotide sequence (SEQ ID NO:1640) of a native sequence cDNA, wherein SEQ ID NO:1640 is a clone designated herein as “DNA196561”.

[1701] FIG. 1641 shows a nucleotide sequence (SEQ ID NO:1641) of a native sequence cDNA, wherein SEQ ID NO:1641 is a clone designated herein as “DNA210184”.

[1702] FIG. 1642 shows a nucleotide sequence (SEQ ID NO:1642) of a native sequence cDNA, wherein SEQ ID NO:1642 is a clone designated herein as “DNA329405”.

[1703] FIG. 1643 shows a nucleotide sequence (SEQ ID NO:1643) of a native sequence PRO83926 cDNA, wherein SEQ ID NO:1643 is a clone designated herein as “DNA328008”.

[1704] FIG. 1644 shows the amino acid sequence (SEQ ID NO:1644) derived from the coding sequence of SEQ ID NO:1643 shown in FIG. 1643.

[1705] FIG. 1645 shows a nucleotide sequence (SEQ ID NO:1645) of a native sequence PRO84979 cDNA, wherein SEQ ID NO:1645 is a clone designated herein as “DNA329406”.

[1706] FIG. 1646 shows the amino acid sequence (SEQ ID NO:1646) derived from the coding sequence of SEQ ID NO:1645 shown in FIG. 1645.

[1707] FIG. 1647 A-B shows a nucleotide sequence (SEQ ID NO:1647) of a native sequence PRO84980 cDNA, wherein SEQ ID NO:1647 is a clone designated herein as “DNA329407”.

[1708] FIG. 1648 shows the amino acid sequence (SEQ ID NO:1648) derived from the coding sequence of SEQ ID NO:1647 shown in FIG. 1647.

[1709] FIG. 1649 shows a nucleotide sequence (SEQ ID NO:1649) of a native sequence PRO71045 cDNA, wherein SEQ ID NO:1649 is a clone designated herein as “DNA304469”.

[1710] FIG. 1650 shows the amino acid sequence (SEQ ID NO:1650) derived from the coding sequence of SEQ ID NO:1649 shown in FIG. 1649.

[1711] FIG. 1651 shows a nucleotide sequence (SEQ ID NO:1651) of a native sequence PRO70021 cDNA, wherein SEQ ID NO:1651 is a clone designated herein as “DNA288261”.

[1712] FIG. 1652 shows the amino acid sequence (SEQ ID NO:1652) derived from the coding sequence of SEQ ID NO:1651 shown in FIG. 1651.

[1713] FIG. 1653 shows a nucleotide sequence (SEQ ID NO:1653) of a native sequence PRO38893 cDNA, wherein SEQ ID NO:1653 is a clone designated herein as “DNA329408”.

[1714] FIG. 1654 shows the amino acid sequence (SEQ ID NO:1654) derived from the coding sequence of SEQ ID NO:1653 shown in FIG. 1653.

[1715] FIG. 1655 shows a nucleotide sequence (SEQ ID NO:1655) of a native sequence PRO84981 cDNA, wherein SEQ ID NO:1655 is a clone designated herein as “DNA329409”.

[1716] FIG. 1656 shows the amino acid sequence (SEQ ID NO:1656) derived from the coding sequence of SEQ ID NO:1655 shown in FIG. 1655.

[1717] FIG. 1657 shows a nucleotide sequence (SEQ ID NO:1657) of a native sequence PRO84982 cDNA, wherein SEQ ID NO:1657 is a clone designated herein as “DNA329410”.

[1718] FIG. 1658 shows the amino acid sequence (SEQ ID NO:1658) derived from the coding sequence of SEQ ID NO:1657 shown in FIG. 1657.

[1719] FIG. 1659 shows a nucleotide sequence (SEQ ID NO:1659) of a native sequence PRO84983 cDNA, wherein SEQ ID NO:1659 is a clone designated herein as “DNA329411”.

[1720] FIG. 1660 shows the amino acid sequence (SEQ ID NO:1660) derived from the coding sequence of SEQ ID NO:1659 shown in FIG. 1659.

[1721] FIG. 1661 shows a nucleotide sequence (SEQ ID NO:1661) of a native sequence PRO51958 cDNA, wherein SEQ ID NO:1661 is a clone designated herein as “DNA257371”.

[1722] FIG. 1662 shows the amino acid sequence (SEQ ID NO:1662) derived from the coding sequence of SEQ ID NO:1661 shown in FIG. 1661.

[1723] FIG. 1663 shows a nucleotide sequence (SEQ ID NO:1663) of a native sequence PRO84984 cDNA, wherein SEQ ID NO:1663 is a clone designated herein as “DNA329412”.

[1724] FIG. 1664 shows the amino acid sequence (SEQ ID NO:1664) derived from the coding sequence of SEQ ID NO:1663 shown in FIG. 1663.

[1725] FIG. 1665 shows a nucleotide sequence (SEQ ID NO:1665) of a native sequence PRO84985 cDNA, wherein SEQ ID NO:1665 is a clone designated herein as “DNA329413”.

[1726] FIG. 1666 shows the amino acid sequence (SEQ ID NO:1666) derived from the coding sequence of SEQ ID NO:1665 shown in FIG. 1665.

[1727] FIG. 1667 shows a nucleotide sequence (SEQ ID NO:1667) of a native sequence PRO84986 cDNA, wherein SEQ ID NO:1667 is a clone designated herein as “DNA329414”.

[1728] FIG. 1668 shows the amino acid sequence (SEQ ID NO:1668) derived from the coding sequence of SEQ ID NO:1667 shown in FIG. 1667.

[1729] FIG. 1669 shows a nucleotide sequence (SEQ ID NO:1669) of a native sequence PRO84987 cDNA, wherein SEQ ID NO:1669 is a clone designated herein as “DNA329415”.

[1730] FIG. 1670 shows the amino acid sequence (SEQ ID NO:1670) derived from the coding sequence of SEQ ID NO:1669 shown in FIG. 1669.

[1731] FIG. 1671 shows a nucleotide sequence (SEQ ID NO:1671) of a native sequence PRO84988 cDNA, wherein SEQ ID NO:1671 is a clone designated herein as “DNA329416”.

[1732] FIG. 1672 shows the amino acid sequence (SEQ ID NO:1672) derived from the coding sequence of SEQ ID NO:1671 shown in FIG. 1671.

[1733] FIG. 1673 shows a nucleotide sequence (SEQ ID NO:1673) of a native sequence PRO84989 cDNA, wherein SEQ ID NO:1673 is a clone designated herein as “DNA329417”.

[1734] FIG. 1674 shows the amino acid sequence (SEQ ID NO:1674) derived from the coding sequence of SEQ ID NO:1673 shown in FIG. 1673.

[1735] FIG. 1675 shows a nucleotide sequence (SEQ ID NO:1675) of a native sequence PRO19906 cDNA, wherein SEQ ID NO:1675 is a clone designated herein as “DNA329418”.

[1736] FIG. 1676 shows the amino acid sequence (SEQ ID NO:1676) derived from the coding sequence of SEQ ID NO:1675 shown in FIG. 1675.

[1737] FIG. 1677 shows a nucleotide sequence (SEQ ID NO:1677) of a native sequence PRO69630 cDNA, wherein SEQ ID NO:1677 is a clone designated herein as “DNA287370”.

[1738] FIG. 1678 shows the amino acid sequence (SEQ ID NO:1678) derived from the coding sequence of SEQ ID NO:1677 shown in FIG. 1677.

[1739] FIG. 1679 A-B shows a nucleotide sequence (SEQ ID NO:1679) of a native sequence PRO84990 cDNA, wherein SEQ ID NO:1679 is a clone designated herein as “DNA329419”.

[1740] FIG. 1680 shows the amino acid sequence (SEQ ID NO:1680) derived from the coding sequence of SEQ ID NO:1679 shown in FIG. 1679.

[1741] FIG. 1681 shows a nucleotide sequence (SEQ ID NO:1681) of a native sequence cDNA, wherein SEQ ID NO:1681 is a clone designated herein as “DNA329420”.

[1742] FIG. 1682A-B shows a nucleotide sequence (SEQ ID NO:1682) of a native sequence PRO84992 cDNA, wherein SEQ ID NO:1682 is a clone designated herein as “DNA329421”.

[1743] FIG. 1683 shows the amino acid sequence (SEQ ID NO:1683) derived from the coding sequence of SEQ ID NO:1682 shown in FIG. 1682.

[1744] FIG. 1684 A-B shows a nucleotide sequence (SEQ ID NO:1684) of a native sequence PRO84993 cDNA, wherein SEQ ID NO:1684 is a clone designated herein as “DNA329422”.

[1745] FIG. 1685 shows the amino acid sequence (SEQ ID NO:1685) derived from the coding sequence of SEQ ID NO:1684 shown in FIG. 1684.

[1746] FIG. 1686 A-B shows a nucleotide sequence (SEQ ID NO:1686) of a native sequence PRO84994 cDNA, wherein SEQ ID NO:1686 is a clone designated herein as “DNA329423”.

[1747] FIG. 1687 shows the amino acid sequence (SEQ ID NO:1687) derived from the coding sequence of SEQ ID NO:1686 shown in FIG. 1686.

[1748] FIG. 1688 shows a nucleotide sequence (SEQ ID NO:1688) of a native sequence PRO84995 cDNA, wherein SEQ ID NO:1688 is a clone designated herein as “DNA329424”.

[1749] FIG. 1689 shows the amino acid sequence (SEQ ID NO:1689) derived from the coding sequence of SEQ ID NO:1688 shown in FIG. 1688.

[1750] FIG. 1690 shows a nucleotide sequence (SEQ ID NO:1690) of a native sequence cDNA, wherein SEQ ID NO:1690 is a clone designated herein as “DNA329425”.

[1751] FIG. 1691 shows a nucleotide sequence (SEQ ID NO:1691) of a native sequence PRO84997 cDNA, wherein SEQ ID NO:1691 is a clone designated herein as “DNA329426”.

[1752] FIG. 1692 shows the amino acid sequence (SEQ ID NO:1692) derived from the coding sequence of SEQ ID NO:1691 shown in FIG. 1691.

[1753] FIG. 1693 shows a nucleotide sequence (SEQ ID NO:1693) of a native sequence PRO956 cDNA, wherein SEQ ID NO:1693 is a clone designated herein as “DNA56350”.

[1754] FIG. 1694 shows the amino acid sequence (SEQ ID NO:1694) derived from the coding sequence of SEQ ID NO:1693 shown in FIG. 1693.

[1755] FIG. 1695 shows a nucleotide sequence (SEQ ID NO:1695) of a native sequence PRO84998 cDNA, wherein SEQ ID NO:1695 is a clone designated herein as “DNA329427”.

[1756] FIG. 1696 shows the amino acid sequence (SEQ ID NO:1696) derived from the coding sequence of SEQ ID NO:1695 shown in FIG. 1695.

[1757] FIG. 1697 shows a nucleotide sequence (SEQ ID NO:1697) of a native sequence PRO84999 cDNA, wherein SEQ ID NO:1697 is a clone designated herein as “DNA329428”.

[1758] FIG. 1698 shows the amino acid sequence (SEQ ID NO:1698) derived from the coding sequence of SEQ ID NO:1697 shown in FIG. 1697.

[1759] FIG. 1699 shows a nucleotide sequence (SEQ ID NO:1699) of a native sequence cDNA, wherein SEQ ID NO:1699 is a clone designated herein as “DNA195822”.

[1760] FIG. 1700 shows a nucleotide sequence (SEQ ID NO:1700) of a native sequence PRO23314 cDNA, wherein SEQ ID NO:1700 is a clone designated herein as “DNA193896”.

[1761] FIG. 1701 shows the amino acid sequence (SEQ ID NO:1701) derived from the coding sequence of SEQ ID NO:1700 shown in FIG. 1700.

[1762] FIG. 1702 shows a nucleotide sequence (SEQ ID NO:1702) of a native sequence PRO85000 cDNA, wherein SEQ ID NO:1702 is a clone designated herein as “DNA329429”.

[1763] FIG. 1703 shows the amino acid sequence (SEQ ID NO:1703) derived from the coding sequence of SEQ ID NO:1703 shown in Figure

[1764] FIG. 1704 shows a nucleotide sequence (SEQ ID NO:1704) of a native sequence PRO83945 cDNA, wherein SEQ ID NO:1704 is a clone designated herein as “DNA328028”.

[1765] FIG. 1705 shows the amino acid sequence (SEQ ID NO:1705) derived from the coding sequence of SEQ ID NO:1704 shown in FIG. 1704.

[1766] FIG. 1706 shows a nucleotide sequence (SEQ ID NO:1706) of a native sequence PRO38524 cDNA, wherein SEQ ID NO:1706 is a clone designated herein as “DNA329430”.

[1767] FIG. 1707 shows the amino acid sequence (SEQ ID NO:1707) derived from the coding sequence of SEQ ID NO:1706 shown in FIG. 1706.

[1768] FIG. 1708A-C shows a nucleotide sequence (SEQ ID NO:1708) of a native sequence PRO12637 cDNA, wherein SEQ ID NO:1708 is a clone designated herein as “DNA151207”.

[1769] FIG. 1709 shows the amino acid sequence (SEQ ID NO:1709) derived from the coding sequence of SEQ ID NO:1708 shown in FIG. 1708.

[1770] FIG. 1710 shows a nucleotide sequence (SEQ ID NO:1710) of a native sequence PRO85001 cDNA, wherein SEQ ID NO:1710 is a clone designated herein as “DNA329431”.

[1771] FIG. 1711 shows the amino acid sequence (SEQ ID NO:1711) derived from the coding sequence of SEQ ID NO:1710 shown in FIG. 1710.

[1772] FIG. 1712 shows a nucleotide sequence (SEQ ID NO:1712) of a native sequence PRO85002 cDNA, wherein SEQ ID NO:1712 is a clone designated herein as “DNA329432”.

[1773] FIG. 1713 shows the amino acid sequence (SEQ ID NO:1713) derived from the coding sequence of SEQ ID NO:1712 shown in FIG. 1712.

[1774] FIG. 1714 shows a nucleotide sequence (SEQ ID NO:1714) of a native sequence PRO85003 cDNA, wherein SEQ ID NO:1714 is a clone designated herein as “DNA329433”.

[1775] FIG. 1715 shows the amino acid sequence (SEQ ID NO:1715) derived from the coding sequence of SEQ ID NO:1714 shown in FIG. 1714.

[1776] FIG. 1716 shows a nucleotide sequence (SEQ ID NO:1716) of a native sequence PRO85004 cDNA, wherein SEQ ID NO:1716 is a clone designated herein as “DNA329434”.

[1777] FIG. 1717 shows the amino acid sequence (SEQ ID NO:1717) derived from the coding sequence of SEQ ID NO:1716 shown in FIG. 1716.

[1778] FIG. 1718 shows a nucleotide sequence (SEQ ID NO:1718) of a native sequence PRO52418 cDNA, wherein SEQ ID NO:1718 is a clone designated herein as “DNA257884”.

[1779] FIG. 1719 shows the amino acid sequence (SEQ ID NO:1719) derived from the coding sequence of SEQ ID NO:1718 shown in FIG. 1718.

[1780] FIG. 1720A-C shows a nucleotide sequence (SEQ ID NO:1720) of a native sequence PRO84288 cDNA, wherein SEQ ID NO:1720 is a clone designated herein as “DNA328462”.

[1781] FIG. 1721 shows the amino acid sequence (SEQ ID NO:1721) derived from the coding sequence of SEQ ID NO:1720 shown in FIG. 1720

[1782] FIG. 1722 shows a nucleotide sequence (SEQ ID NO:1722) of a native sequence PRO85005 cDNA, wherein SEQ ID NO:1722 is a clone designated herein as “DNA329435”.

[1783] FIG. 1723 shows the amino acid sequence (SEQ ID NO:1723) derived from the coding sequence of SEQ ID NO:1722 shown in FIG. 1722.

[1784] FIG. 1724A-B shows a nucleotide sequence (SEQ ID NO:1724) of a native sequence PRO85006 cDNA, wherein SEQ ID NO:1724 is a clone designated herein as “DNA329436”.

[1785] FIG. 1725 shows the amino acid sequence (SEQ ID NO:1725) derived from the coding sequence of SEQ ID NO:1724 shown in FIG. 1724

[1786] FIG. 1726 shows a nucleotide sequence (SEQ ID NO:1726) of a native sequence PRO85007 cDNA, wherein SEQ ID NO:1726 is a clone designated herein as “DNA329437”.

[1787] FIG. 1727 shows the amino acid sequence (SEQ ID NO:1727) derived from the coding sequence of SEQ ID NO:1726 shown in FIG. 1726.

[1788] FIG. 1728A-B shows a nucleotide sequence (SEQ ID NO:1728) of a native sequence PRO85008 cDNA, wherein SEQ ID NO:1728 is a clone designated herein as “DNA329438”.

[1789] FIG. 1729 shows the amino acid sequence (SEQ ID NO:1729) derived from the coding sequence of SEQ ID NO:1728 shown in FIG. 1728.

[1790] FIG. 1730 shows a nucleotide sequence (SEQ ID NO:1730) of a native sequence cDNA, wherein SEQ ID NO:1730 is a clone designated herein as “DNA329439”.

[1791] FIG. 1731 shows a nucleotide sequence (SEQ ID NO:1731) of a native sequence PRO12626 cDNA, wherein SEQ ID NO:1731 is a clone designated herein as “DNA151170”.

[1792] FIG. 1732 shows the amino acid sequence (SEQ ID NO:1732) derived from the coding sequence of SEQ ID NO:1731 shown in FIG. 1731.

[1793] FIG. 1733 shows a nucleotide sequence (SEQ ID NO:1733) of a native sequence PRO85009 cDNA, wherein SEQ ID NO:1733 is a clone designated herein as “DNA329440”.

[1794] FIG. 1734 shows the amino acid sequence (SEQ ID NO:1734) derived from the coding sequence of SEQ ID NO:1733 shown in FIG. 1733

[1795] FIG. 1735 shows a nucleotide sequence (SEQ ID NO:1735) of a native sequence PRO83963 cDNA, wherein SEQ ID NO:1735 is a clone designated herein as “DNA328049”.

[1796] FIG. 1736 shows the amino acid sequence (SEQ ID NO:1736) derived from the coding sequence of SEQ ID NO:1735 shown in FIG. 1735

[1797] FIG. 1737 shows a nucleotide sequence (SEQ ID NO:1737) of a native sequence PRO85010 cDNA, wherein SEQ ID NO:1737 is a clone designated herein as “DNA329441”.

[1798] FIG. 1738 shows the amino acid sequence (SEQ ID NO:1738) derived from the coding sequence of SEQ ID NO:1737 shown in FIG. 1737.

[1799] FIG. 1739 shows a nucleotide sequence (SEQ ID NO:1739) of a native sequence cDNA, wherein SEQ ID NO:1739 is a clone designated herein as “DNA329442”.

[1800] FIG. 1740 shows a nucleotide sequence (SEQ ID NO:1740) of a native sequence PRO85011 cDNA, wherein SEQ ID NO:1740 is a clone designated herein as “DNA329443”.

[1801] FIG. 1741 shows the amino acid sequence (SEQ ID NO:1741) derived from the coding sequence of SEQ ID NO:1740 shown in FIG. 1740.

[1802] FIG. 1742 shows a nucleotide sequence (SEQ ID NO:1742) of a native sequence PRO85012 cDNA, wherein SEQ ID NO:1742 is a clone designated herein as “DNA329444”.

[1803] FIG. 1743 shows the amino acid sequence (SEQ ID NO:1743) derived from the coding sequence of SEQ ID NO:1742 shown in FIG. 1742.

[1804] FIG. 1744 shows a nucleotide sequence (SEQ ID NO:1744) of a native sequence PRO85013 cDNA, wherein SEQ ID NO:1744 is a clone designated herein as “DNA329445”.

[1805] FIG. 1745 shows the amino acid sequence (SEQ ID NO:1745) derived from the coding sequence of SEQ ID NO:1744 shown in FIG. 1744.

[1806] FIG. 1746 shows a nucleotide sequence (SEQ ID NO:1746) of a native sequence PRO85014 cDNA, wherein SEQ ID NO:1746 is a clone designated herein as “DNA329446”.

[1807] FIG. 1747 shows the amino acid sequence (SEQ ID NO:1747) derived from the coding sequence of SEQ ID NO:1746 shown in FIG. 1746.

[1808] FIG. 1748 shows a nucleotide sequence (SEQ ID NO:1748) of a native sequence PRO61074 cDNA, wherein SEQ ID NO:1748 is a clone designated herein as “DNA273002”.

[1809] FIG. 1749 shows the amino acid sequence (SEQ ID NO:1749) derived from the coding sequence of SEQ ID NO:1748 shown in FIG. 1748.

[1810] FIG. 1750 shows a nucleotide sequence (SEQ ID NO:1750) of a native sequence PRO85015 cDNA, wherein SEQ ID NO:1750 is a clone designated herein as “DNA329447”.

[1811] FIG. 1751 shows the amino acid sequence (SEQ ID NO:1751) derived from the coding sequence of SEQ ID NO:1750 shown in FIG. 1750.

[1812] FIG. 1752A-B shows a nucleotide sequence (SEQ ID NO:1752) of a native sequence PRO83968 cDNA, wherein SEQ ID NO:1752 is a clone designated herein as “DNA328054”.

[1813] FIG. 1753 shows the amino acid sequence (SEQ ID NO:1753) derived from the coding sequence of SEQ ID NO:1752 shown in FIG. 1752.

[1814] FIG. 1754 shows a nucleotide sequence (SEQ ID NO:1754) of a native sequence PRO85016 cDNA, wherein SEQ ID NO:1754 is a clone designated herein as “DNA329448”.

[1815] FIG. 1755 shows the amino acid sequence (SEQ ID NO:1755) derived from the coding sequence of SEQ ID NO:1754 shown in FIG. 1754.

[1816] FIG. 1756 shows a nucleotide sequence (SEQ ID NO:1756) of a native sequence PRO85017 cDNA, wherein SEQ ID NO:1756 is a clone designated herein as “DNA329449”.

[1817] FIG. 1757 shows the amino acid sequence (SEQ ID NO:1757) derived from the coding sequence of SEQ ID NO:1756 shown in FIG. 1756.

[1818] FIG. 1758 shows a nucleotide sequence (SEQ ID NO:1758) of a native sequence cDNA, wherein SEQ ID NO:1758 is a clone designated herein as “DNA161163”.

[1819] FIG. 1759 shows a nucleotide sequence (SEQ ID NO:1759) of a native sequence PRO80483 cDNA, wherein SEQ ID NO:1759 is a clone designated herein as “DNA323723”.

[1820] FIG. 1760 shows the amino acid sequence (SEQ ID NO:1760) derived from the coding sequence of SEQ ID NO:1759 shown in FIG. 1759.

[1821] FIG. 1761 shows a nucleotide sequence (SEQ ID NO:1761) of a native sequence PRO85018 cDNA, wherein SEQ ID NO:1761 is a clone designated herein as “DNA329450”.

[1822] FIG. 1762 shows the amino acid sequence (SEQ ID NO:1762) derived from the coding sequence of SEQ ID NO:1761 shown in FIG. 1761.

[1823] FIG. 1763 shows a nucleotide sequence (SEQ ID NO:1763) of a native sequence PRO85019 cDNA, wherein SEQ ID NO:1763 is a clone designated herein as “DNA329451”.

[1824] FIG. 1764 shows the amino acid sequence (SEQ ID NO:1764) derived from the coding sequence of SEQ ID NO:1763 shown in FIG. 1763.

[1825] FIG. 1765 shows a nucleotide sequence (SEQ ID NO:1765) of a native sequence PRO85020 cDNA, wherein SEQ ID NO:1765 is a clone designated herein as “DNA329452”.

[1826] FIG. 1766 shows the amino acid sequence (SEQ ID NO:1766) derived from the coding sequence of SEQ ID NO:1765 shown in FIG. 1765.

[1827] FIG. 1767 shows a nucleotide sequence (SEQ ID NO:1767) of a native sequence cDNA, wherein SEQ ID NO:1767 is a clone designated herein as “DNA329453”.

[1828] FIG. 1768 shows a nucleotide sequence (SEQ ID NO:1768) of a native sequence PRO85022 cDNA, wherein SEQ ID NO:1768 is a clone designated herein as “DNA329454”.

[1829] FIG. 1769 shows the amino acid sequence (SEQ ID NO:1769) derived from the coding sequence of SEQ ID NO:1768 shown in FIG. 1768.

[1830] FIG. 1770 shows a nucleotide sequence (SEQ ID NO:1770) of a native sequence PRO82968 cDNA, wherein SEQ ID NO:1770 is a clone designated herein as “DNA329455”.

[1831] FIG. 1771 shows the amino acid sequence (SEQ ID NO:1771) derived from the coding sequence of SEQ ID NO:1771 shown in Figure

[1832] FIG. 1772 shows a nucleotide sequence (SEQ ID NO:1772) of a native sequence PRO11849 cDNA, wherein SEQ ID NO:1772 is a clone designated herein as “DNA151503”.

[1833] FIG. 1773 shows the amino acid sequence (SEQ ID NO:1773) derived from the coding sequence of SEQ ID NO:1772 shown in FIG. 1772.

[1834] FIG. 1774 shows a nucleotide sequence (SEQ ID NO:1774) of a native sequence PRO85023 cDNA, wherein SEQ ID NO:1714 is a clone designated herein as “DNA329456”.

[1835] FIG. 1775 shows the amino acid sequence (SEQ ID NO:1775) derived from the coding sequence of SEQ ID NO:1774 shown in FIG. 1774.

[1836] FIG. 1776 shows a nucleotide sequence (SEQ ID NO:1776) of a native sequence PRO11901 cDNA, wherein SEQ ID NO:1776 is a clone designated herein as “DNA151580”.

[1837] FIG. 1777 shows the amino acid sequence (SEQ ID NO:1777) derived from the coding sequence of SEQ ID NO:1777 shown in Figure

[1838] FIG. 1778 shows a nucleotide sequence (SEQ ID NO:1778) of a native sequence PRO85024 cDNA, wherein SEQ ID NO:1778 is a clone designated herein as “DNA329457”.

[1839] FIG. 1779 shows the amino acid sequence (SEQ ID NO:1779) derived from the coding sequence of SEQ ID NO:1778 shown in FIG. 1778.

[1840] FIG. 1780 shows a nucleotide sequence (SEQ ID NO:1780) of a native sequence PRO12397 cDNA, wherein SEQ ID NO:1780 is a clone designated herein as “DNA150660”.

[1841] FIG. 1781 shows the amino acid sequence (SEQ ID NO:1781) derived from the coding sequence of SEQ ID NO:1780 shown in FIG. 1780.

[1842] FIG. 1782 shows a nucleotide sequence (SEQ ID NO:1782) of a native sequence PRO85025 cDNA, wherein SEQ ID NO:1782 is a clone designated herein as “DNA329458”.

[1843] FIG. 1783 shows the amino acid sequence (SEQ ID NO:1783) derived from the coding sequence of SEQ ID NO:1782 shown in FIG. 1782.

[1844] FIG. 1784 shows a nucleotide sequence (SEQ ID NO:1784) of a native sequence PRO85026 cDNA, wherein SEQ ID NO:1784 is a clone designated herein as “DNA329459”.

[1845] FIG. 1785 shows the amino acid sequence (SEQ ID NO:1785) derived from the coding sequence of SEQ ID NO:1784 shown in FIG. 1784.

[1846] FIG. 1786 shows a nucleotide sequence (SEQ ID NO:1786) of a native sequence PRO85027 cDNA, wherein SEQ ID NO:1786 is a clone designated herein as “DNA329460”.

[1847] FIG. 1787 shows the amino acid sequence (SEQ ID NO:1787) derived from the coding sequence of SEQ ID NO:1786 shown in FIG. 1786.

[1848] FIG. 1788 shows a nucleotide sequence (SEQ ID NO:1788) of a native sequence PRO85028 cDNA, wherein SEQ ID NO:1788 is a clone designated herein as “DNA329461”.

[1849] FIG. 1789 shows the amino acid sequence (SEQ ID NO:1789) derived from the coding sequence of SEQ ID NO:1788 shown in FIG. 1788.

[1850] FIG. 1790 shows a nucleotide sequence (SEQ ID NO:1790) of a native sequence cDNA, wherein SEQ ID NO:1790 is a clone designated herein as “DNA153924”.

[1851] FIG. 1791 shows a nucleotide sequence (SEQ ID NO:1791) of a native sequence PRO37992 cDNA, wherein SEQ ID NO:1791 is a clone designated herein as “DNA227529”.

[1852] FIG. 1792 shows the amino acid sequence (SEQ ID NO:1792) derived from the coding sequence of SEQ ID NO:1791 shown in FIG. 1791.

[1853] FIG. 1793 shows a nucleotide sequence (SEQ ID NO:1793) of a native sequence cDNA, wherein SEQ ID NO:1793 is a clone designated herein as “DNA328074”.

[1854] FIG. 1794 shows a nucleotide sequence (SEQ ID NO:1794) of a native sequence PRO85029 cDNA, wherein SEQ ID NO:1794 is a clone designated herein as “DNA329462”.

[1855] FIG. 1795 shows the amino acid sequence (SEQ ID NO:1795) derived from the coding sequence of SEQ ID NO:1794 shown in FIG. 1794.

[1856] FIG. 1796 shows a nucleotide sequence (SEQ ID NO:1796) of a native sequence PRO85030 cDNA, wherein SEQ ID NO:1796 is a clone designated herein as “DNA329463”.

[1857] FIG. 1797 shows the amino acid sequence (SEQ ID NO:1797) derived from the coding sequence of SEQ ID NO:1797 shown in Figure

[1858] FIG. 1798 shows a nucleotide sequence (SEQ ID NO:1798) of a native sequence PRO83994 cDNA, wherein SEQ ID NO:1798 is a clone designated herein as “DNA328082”.

[1859] FIG. 1799 shows the amino acid sequence (SEQ ID NO:1799) derived from the coding sequence of SEQ ID NO:1798 shown in FIG. 1798.

[1860] FIG. 1800 shows a nucleotide sequence (SEQ ID NO:1800) of a native sequence cDNA, wherein SEQ ID NO:1800 is a clone designated herein as “DNA260010”.

[1861] FIG. 1801 shows a nucleotide sequence (SEQ ID NO:1801) of a native sequence PRO85031 cDNA, wherein SEQ ID NO:1801 is a clone designated herein as “DNA329464”.

[1862] FIG. 1802 shows the amino acid sequence (SEQ ID NO:1802) derived from the coding sequence of SEQ ID NO:1801 shown in FIG. 1801.

[1863] FIG. 1803 shows a nucleotide sequence (SEQ ID NO:1803) of a native sequence cDNA, wherein SEQ ID NO:1803 is a clone designated herein as “DNA257575”.

[1864] FIG. 1804 shows a nucleotide sequence (SEQ ID NO:1804) of a native sequence PRO69678 cDNA, wherein SEQ ID NO:1804 is a clone designated herein as “DNA287421”.

[1865] FIG. 1805 shows the amino acid sequence (SEQ ID NO:1805) derived from the coding sequence of SEQ ID NO:1804 shown in FIG. 1804.

[1866] FIG. 1806 shows a nucleotide sequence (SEQ ID NO:1806) of a native sequence PRO84001 cDNA, wherein SEQ ID NO:1806 is a clone designated herein as “DNA328090”.

[1867] FIG. 1807 shows the amino acid sequence (SEQ ID NO:1807) derived from the coding sequence of SEQ ID NO:1806 shown in FIG. 1806.

[1868] FIG. 1808 shows a nucleotide sequence (SEQ ID NO:1808) of a native sequence PRO85032 cDNA, wherein SEQ ID NO:1808 is a clone designated herein as “DNA329465”.

[1869] FIG. 1809 shows the amino acid sequence (SEQ ID NO:1809) derived from the coding sequence of SEQ ID NO:1808 shown in FIG. 1808.

[1870] FIG. 1810 shows a nucleotide sequence (SEQ ID NO:1810) of a native sequence PRO83478 cDNA, wherein SEQ ID NO:1810 is a clone designated herein as “DNA327205”.

[1871] FIG. 1811 shows the amino acid sequence (SEQ ID NO:1811) derived from the coding sequence of SEQ ID NO:1810 shown in FIG. 1810.

[1872] FIG. 1812A-B shows a nucleotide sequence (SEQ ID NO:1812) of a native sequence PRO38448 cDNA, wherein SEQ ID NO:1812 is a clone designated herein as “DNA227985”.

[1873] FIG. 1813 shows the amino acid sequence (SEQ ID NO:1813) derived from the coding sequence of SEQ ID NO:1812 shown in FIG. 1812.

[1874] FIG. 1814 shows a nucleotide sequence (SEQ ID NO:1814) of a native sequence PRO84003 cDNA, wherein SEQ ID NO:1814 is a clone designated herein as “DNA328092”.

[1875] FIG. 1815 shows the amino acid sequence (SEQ ID NO:1815) derived from the coding sequence of SEQ ID NO:1814 shown in FIG. 1814.

[1876] FIG. 1816 shows a nucleotide sequence (SEQ ID NO:1816) of a native sequence PRO81900 cDNA, wherein SEQ ID NO:1816 is a clone designated herein as “DNA325363”.

[1877] FIG. 1817 shows the amino acid sequence (SEQ ID NO:1817) derived from the coding sequence of SEQ ID NO:1817 shown in Figure

[1878] FIG. 1818 shows a nucleotide sequence (SEQ ID NO:1818) of a native sequence PRO23814 cDNA, wherein SEQ ID NO:1818 is a clone designated herein as “DNA329466”.

[1879] FIG. 1819 shows the amino acid sequence (SEQ ID NO:1819) derived from the coding sequence of SEQ ID NO:1818 shown in FIG. 1818.

[1880] FIG. 1820 shows a nucleotide sequence (SEQ ID NO:1820) of a native sequence PRO85033 cDNA, wherein SEQ ID NO:1820 is a clone designated herein as “DNA329467”.

[1881] FIG. 1821 shows the amino acid sequence (SEQ ID NO:1821) derived from the coding sequence of SEQ ID NO:1820 shown in FIG. 1820.

[1882] FIG. 1822 shows a nucleotide sequence (SEQ ID NO:1822) of a native sequence PRO88 cDNA, wherein SEQ ID NO:1822 is a clone designated herein as “DNA329468”.

[1883] FIG. 1823 shows the amino acid sequence (SEQ ID NO:1823) derived from the coding sequence of SEQ ID NO:1822 shown in FIG. 1822.

[1884] FIG. 1824A-B shows a nucleotide sequence (SEQ ID NO:1824) of a native sequence PRO24061 cDNA, wherein SEQ ID NO:1824 is a clone designated herein as “DNA194784”.

[1885] FIG. 1825 shows the amino acid sequence (SEQ ID NO:1825) derived from the coding sequence of SEQ ID NO:1824 shown in FIG. 1824.

[1886] FIG. 1826 shows a nucleotide sequence (SEQ ID NO:1826) of a native sequence PRO85034 cDNA, wherein SEQ ID NO:1826 is a clone designated herein as “DNA329469”.

[1887] FIG. 1827 shows the amino acid sequence (SEQ ID NO:1827) derived from the coding sequence of SEQ ID NO:1826 shown in FIG. 1826.

[1888] FIG. 1828 shows a nucleotide sequence (SEQ ID NO:1828) of a native sequence PRO85035 cDNA, wherein SEQ ID NO:1828 is a clone designated herein as “DNA329470”.

[1889] FIG. 1829 shows the amino acid sequence (SEQ ID NO:1829) derived from the coding sequence of SEQ ID NO:1828 shown in FIG. 1828.

[1890] FIG. 1830 shows a nucleotide sequence (SEQ ID NO:1830) of a native sequence PRO85036 cDNA, wherein SEQ ID NO:1830 is a clone designated herein as “DNA329471”.

[1891] FIG. 1831 shows the amino acid sequence (SEQ ID NO:1831) derived from the coding sequence of SEQ ID NO:1831 shown in Figure

[1892] FIG. 1832 shows a nucleotide sequence (SEQ ID NO:1832) of a native sequence PRO85037 cDNA, wherein SEQ ID NO:1832 is a clone designated herein as “DNA329472”.

[1893] FIG. 1833 shows the amino acid sequence (SEQ ID NO:1833) derived from the coding sequence of SEQ ID NO:1832 shown in FIG. 1832.

[1894] FIG. 1834 shows a nucleotide sequence (SEQ ID NO:1834) of a native sequence cDNA, wherein SEQ ID NO:1834 is a clone designated herein as “DNA136927”.

[1895] FIG. 1835 shows a nucleotide sequence (SEQ ID NO:1835) of a native sequence PRO1265 cDNA, wherein SEQ ID NO:1835 is a clone designated herein as “DNA304827”.

[1896] FIG. 1836 shows the amino acid sequence (SEQ ID NO:1836) derived from the coding sequence of SEQ ID NO:1835 shown in FIG. 1835.

[1897] FIG. 1837 shows a nucleotide sequence (SEQ ID NO:1837) of a native sequence PRO85038 cDNA, wherein SEQ ID NO:1837 is a clone designated herein as “DNA329473”.

[1898] FIG. 1838 shows the amino acid sequence (SEQ ID NO:1838) derived from the coding sequence of SEQ ID NO:1837 shown in FIG. 1837.

[1899] FIG. 1839 shows a nucleotide sequence (SEQ ID NO:1839) of a native sequence cDNA, wherein SEQ ID NO:1839 is a clone designated herein as “DNA195707”.

[1900] FIG. 1840 shows a nucleotide sequence (SEQ ID NO:1840) of a native sequence PRO38893 cDNA, wherein SEQ ID NO: is a clone designated herein as “DNA329474”.

[1901] FIG. 1841 shows the amino acid sequence (SEQ ID NO:1841) derived from the coding sequence of SEQ ID NO:1840 shown in FIG. 1840.

[1902] FIG. 1842 shows a nucleotide sequence (SEQ ID NO:1842) of a native sequence PRO85039 cDNA, wherein SEQ ID NO:1842 is a clone designated herein as “DNA329475”.

[1903] FIG. 1843 shows the amino acid sequence (SEQ ID NO:1843) derived from the coding sequence of SEQ ID NO:1843 shown in Figure

[1904] FIG. 1844A-B shows a nucleotide sequence (SEQ ID NO:1844) of a native sequence PRO85040 cDNA, wherein SEQ ID NO:1844 is a clone designated herein as “DNA329476”.

[1905] FIG. 1845 shows the amino acid sequence (SEQ ID NO:1845) derived from the coding sequence of SEQ ID NO:1845 shown in Figure

[1906] FIG. 1846 shows a nucleotide sequence (SEQ ID NO:1846) of a native sequence PRO51137 cDNA, wherein SEQ ID NO:1846 is a clone designated herein as “DNA256087”.

[1907] FIG. 1847 shows the amino acid sequence (SEQ ID NO:1847) derived from the coding sequence of SEQ ID NO:1846 shown in FIG. 1846.

[1908] FIG. 1848A-B shows a nucleotide sequence (SEQ ID NO:1848) of a native sequence PRO85041 cDNA, wherein SEQ ID NO:1848 is a clone designated herein as “DNA329477”.

[1909] FIG. 1849 shows the amino acid sequence (SEQ ID NO:1849) derived from the coding sequence of SEQ ID NO:1848 shown in FIG. 1848.

[1910] FIG. 1850 shows a nucleotide sequence (SEQ ID NO:1850) of a native sequence PRO10720 cDNA, wherein SEQ ID NO:1850 is a clone designated herein as “DNA329478”.

[1911] FIG. 1851 shows the amino acid sequence (SEQ ID NO:1851) derived from the coding sequence of SEQ ID NO:1850 shown in FIG. 1850.

[1912] FIG. 1852 shows a nucleotide sequence (SEQ ID NO:1852) of a native sequence cDNA, wherein SEQ ID NO:1852 is a clone designated herein as “DNA329479”.

[1913] FIG. 1853A-B shows a nucleotide sequence (SEQ ID NO:1853) of a native sequence PRO85043 cDNA, wherein SEQ ID NO:1853 is a clone designated herein as “DNA329480”.

[1914] FIG. 1854 shows the amino acid sequence (SEQ ID NO:1854) derived from the coding sequence of SEQ ID NO:1853 shown in FIG. 1853.

[1915] FIG. 1855 shows a nucleotide sequence (SEQ ID NO:1855) of a native sequence PRO60949 cDNA, wherein SEQ ID NO:1855 is a clone designated herein as “DNA329481”.

[1916] FIG. 1856 shows the amino acid sequence (SEQ ID NO:1856) derived from the coding sequence of SEQ ID NO:1855 shown in FIG. 1855.

[1917] FIG. 1857 shows a nucleotide sequence (SEQ ID NO:1857) of a native sequence PRO85044 cDNA, wherein SEQ ID NO:1857 is a clone designated herein as “DNA329482”.

[1918] FIG. 1858 shows the amino acid sequence (SEQ ID NO:1858) derived from the coding sequence of SEQ ID NO:1857 shown in FIG. 1857.

[1919] FIG. 1859 shows a nucleotide sequence (SEQ ID NO:1859) of a native sequence PRO20110 cDNA, wherein SEQ ID NO:1859 is a clone designated herein as “DNA329483”.

[1920] FIG. 1860 shows the amino acid sequence (SEQ ID NO:1860) derived from the coding sequence of SEQ ID NO:1859 shown in FIG. 1859.

[1921] FIG. 1861 shows a nucleotide sequence (SEQ ID NO:1861) of a native sequence cDNA, wherein SEQ ID NO:1861 is a clone designated herein as “DNA329484”.

[1922] FIG. 1862A-B shows a nucleotide sequence (SEQ ID NO:1862) of a native sequence PRO85046 cDNA, wherein SEQ ID NO:1862 is a clone designated herein as “DNA329485”.

[1923] FIG. 1863 shows the amino acid sequence (SEQ ID NO:1863) derived from the coding sequence of SEQ ID NO:1862 shown in FIG. 1862.

[1924] FIG. 1864 shows a nucleotide sequence (SEQ ID NO:1864) of a native sequence PRO84051 cDNA, wherein SEQ ID NO:1864 is a clone designated herein as “DNA328146”.

[1925] FIG. 1865 shows the amino acid sequence (SEQ ID NO:1865) derived from the coding sequence of SEQ ID NO:1864 shown in FIG. 1864.

[1926] FIG. 1866 shows a nucleotide sequence (SEQ ID NO:1866) of a native sequence PRO85047 cDNA, wherein SEQ ID NO:1866 is a clone designated herein as “DNA329486”.

[1927] FIG. 1867 shows the amino acid sequence (SEQ ID NO:1867) derived from the coding sequence of SEQ ID NO:1866 shown in FIG. 1866.

[1928] FIG. 1868A-B shows a nucleotide sequence (SEQ ID NO:1868) of a native sequence PRO85048 cDNA, wherein SEQ ID NO:1868 is a clone designated herein as “DNA329487”.

[1929] FIG. 1869 shows the amino acid sequence (SEQ ID NO:1869) derived from the coding sequence of SEQ ID NO:1868 shown in FIG. 1868

[1930] FIG. 1870 shows a nucleotide sequence (SEQ ID NO:1870) of a native sequence PRO85049 cDNA, wherein SEQ ID NO:1870 is a clone designated, herein as “DNA329488”.

[1931] FIG. 1871 shows the amino acid sequence (SEQ ID NO:1871) derived from the coding sequence of SEQ ID NO:1871 shown in Figure

[1932] FIG. 1872 shows a nucleotide sequence (SEQ ID NO:1872) of a native sequence PRO85050 cDNA, wherein SEQ ID NO:1872 is a clone designated herein as “DNA329489”.

[1933] FIG. 1873 shows the amino acid sequence (SEQ ID NO:1873) derived from the coding sequence of SEQ ID NO:1872 shown in FIG. 1872.

[1934] FIG. 1874 shows a nucleotide sequence (SEQ ID NO:1874) of a native sequence PRO70016 cDNA, wherein SEQ ID NO:1874 is a clone designated herein as “DNA288255”.

[1935] FIG. 1875 shows the amino acid sequence (SEQ ID NO:1875) derived from the coding sequence of SEQ ID NO:1874 shown in FIG. 1874.

[1936] FIG. 1876 shows a nucleotide sequence (SEQ ID NO:1876) of a native sequence PRO85051 cDNA, wherein SEQ ID NO:1876 is a clone designated herein as “DNA329490”.

[1937] FIG. 1877 shows the amino acid sequence (SEQ ID NO:1877) derived from the coding sequence of SEQ ID NO:1876 shown in FIG. 1876.

[1938] FIG. 1878 shows a nucleotide sequence (SEQ ID NO:1878) of a native sequence cDNA, wherein SEQ ID NO:1878 is a clone designated herein as “DNA259903”.

[1939] FIG. 1879 shows a nucleotide sequence (SEQ ID NO:1879) of a native sequence cDNA, wherein SEQ ID NO:1879 is a clone designated herein as “DNA259749”.

[1940] FIG. 1880 shows a nucleotide sequence (SEQ ID NO:1880) of a native sequence PRO85052 cDNA, wherein SEQ ID NO:1880 is a clone designated herein as “DNA329491”.

[1941] FIG. 1881 shows the amino acid sequence (SEQ ID NO:1881) derived from the coding sequence of SEQ ID NO:1880 shown in FIG. 1880.

[1942] FIG. 1882 shows a nucleotide sequence (SEQ ID NO:1882) of a native sequence PRO85053 cDNA, wherein SEQ ID NO:1882 is a clone designated herein as “DNA329492”.

[1943] FIG. 1883 shows the amino acid sequence (SEQ ID NO:1883) derived from the coding sequence of SEQ ID NO:1882 shown in FIG. 1882.

[1944] FIG. 1884 shows a nucleotide sequence (SEQ ID NO:1884) of a native sequence PRO85054 cDNA, wherein SEQ ID NO:1884 is a clone designated herein as “DNA329493”.

[1945] FIG. 1885 shows the amino acid sequence (SEQ ID NO:1885) derived from the coding sequence of SEQ ID NO:1884 shown in FIG. 1884.

[1946] FIG. 1886A-B shows a nucleotide sequence (SEQ ID NO:1886) of a native sequence PRO85055 cDNA, wherein SEQ ID NO:1886 is a clone designated herein as “DNA329494”.

[1947] FIG. 1887 shows the amino acid sequence (SEQ ID NO:1887) derived from the coding sequence of SEQ ID NO:1886 shown in FIG. 1886.

[1948] FIG. 1888 shows a nucleotide sequence (SEQ ID NO:1888) of a native sequence PRO52486 cDNA, wherein SEQ ID NO:1888 is a clone designated herein as “DNA257959”.

[1949] FIG. 1889 shows the amino acid sequence (SEQ ID NO:1889) derived from the coding sequence of SEQ ID NO:1888 shown in FIG. 1888.

[1950] FIG. 1890 shows a nucleotide sequence (SEQ ID NO:1890) of a native sequence PRO85056 cDNA, wherein SEQ ID NO:1890 is a clone designated herein as “DNA329495”.

[1951] FIG. 1891 shows the amino acid sequence (SEQ ID NO:1891) derived from the coding sequence of SEQ ID NO:1890 shown in FIG. 1890.

[1952] FIG. 1892 shows a nucleotide sequence (SEQ ID NO:1892) of a native sequence PRO85057 cDNA, wherein SEQ ID NO:1892 is a clone designated herein as “DNA329496”.

[1953] FIG. 1893 shows the amino acid sequence (SEQ ID NO:1893) derived from the coding sequence of SEQ ID NO:1892 shown in FIG. 1892.

[1954] FIG. 1894 shows a nucleotide sequence (SEQ ID NO:1894) of a native sequence PRO85058 cDNA, wherein SEQ ID NO:1894 is a clone designated herein as “DNA329497”.

[1955] FIG. 1895 shows the amino acid sequence (SEQ ID NO:1895) derived from the coding sequence of SEQ ID NO:1894 shown in FIG. 1894.

[1956] FIG. 1896 shows a nucleotide sequence (SEQ ID NO:1896) of a native sequence PRO85059 cDNA, wherein SEQ ID NO:1896 is a clone designated herein as “DNA329498”.

[1957] FIG. 1897 shows the amino acid sequence (SEQ ID NO:1897) derived from the coding sequence of SEQ ID NO:1896 shown in FIG. 1896.

[1958] FIG. 1898A-B shows a nucleotide sequence (SEQ ID NO:1898) of a native sequence PRO85060 cDNA, wherein SEQ ID NO:1898 is a clone designated herein as “DNA329499”.

[1959] FIG. 1899 shows the amino acid sequence (SEQ ID NO:1899) derived from the coding sequence of SEQ ID NO:1898 shown in FIG. 1898.

[1960] FIG. 1900 shows a nucleotide sequence (SEQ ID NO:1900) of a native sequence PRO85061 cDNA, wherein SEQ ID NO:1900 is a clone designated herein as “DNA329500”.

[1961] FIG. 1901 shows the amino acid sequence (SEQ ID NO:1901) derived from the coding sequence of SEQ ID NO:1900 shown in FIG. 1900.

[1962] FIG. 1902 shows a nucleotide sequence (SEQ ID NO:1902) of a native sequence PRO85062 cDNA, wherein SEQ ID NO:1902 is a clone designated herein as “DNA329501”.

[1963] FIG. 1903 shows the amino acid sequence (SEQ ID NO:1903) derived from the coding sequence of SEQ ID NO:1902 shown in FIG. 1902.

[1964] FIG. 1904 shows a nucleotide sequence (SEQ ID NO:1904) of a native sequence PRO85063 cDNA, wherein SEQ ID NO:1904 is a clone designated herein as “DNA329502”.

[1965] FIG. 1905 shows the amino acid sequence (SEQ ID NO:1905) derived from the coding sequence of SEQ ID NO:1904 shown in FIG. 1904.

[1966] FIG. 1906A-B shows a nucleotide sequence (SEQ ID NO:1906) of a native sequence cDNA, wherein SEQ ID NO:1906 is a clone designated herein as “DNA329503”.

[1967] FIG. 1907 shows a nucleotide sequence (SEQ ID NO:1907) of a native sequence PRO69635 cDNA, wherein SEQ ID NO:1907 is a clone designated herein as “DNA325417”.

[1968] FIG. 1908 shows the amino acid sequence (SEQ ID NO:1908) derived from the coding sequence of SEQ ID NO:1907 shown in FIG. 1907.

[1969] FIG. 1909 shows a nucleotide sequence (SEQ ID NO:1909) of a native sequence PRO85065 cDNA, wherein SEQ ID NO:1909 is a clone designated herein as “DNA329504”.

[1970] FIG. 1910 shows the amino acid sequence (SEQ ID NO:1910) derived from the coding sequence of SEQ ID NO:1909 shown in FIG. 1909.

[1971] FIG. 1911 shows a nucleotide sequence (SEQ ID NO:1911) of a native sequence cDNA, wherein SEQ ID NO:1911 is a clone designated herein as “DNA329505”.

[1972] FIG. 1912 shows a nucleotide sequence (SEQ ID NO:1912) of a native sequence PRO85067 cDNA, wherein SEQ ID NO:1912 is a clone designated herein as “DNA329506”.

[1973] FIG. 1913 shows the amino acid sequence (SEQ ID NO:1913) derived from the coding sequence of SEQ ID NO:1912 shown in FIG. 1912.

[1974] FIG. 1914 shows a nucleotide sequence (SEQ ID NO:1914) of a native sequence PRO85068 cDNA, wherein SEQ ID NO:1914 is a clone designated herein as “DNA329507”.

[1975] FIG. 1915 shows the amino acid sequence (SEQ ID NO:1915) derived from the coding sequence of SEQ ID NO:1914 shown in FIG. 1914.

[1976] FIG. 1916A-B shows a nucleotide sequence (SEQ ID NO:1916) of a native sequence PRO85069 cDNA, wherein SEQ ID NO:1916 is a clone designated herein as “DNA329508”.

[1977] FIG. 1917 shows the amino acid sequence (SEQ ID NO:1917) derived from the coding sequence of SEQ ID NO:1916 shown in FIG. 1916.

[1978] FIG. 1918 shows a nucleotide sequence (SEQ ID NO:1918) of a native sequence PRO85070 cDNA, wherein SEQ ID NO:1918 is a clone designated herein as “DNA329509”.

[1979] FIG. 1919 shows the amino acid sequence (SEQ ID NO:1919) derived from the coding sequence of SEQ ID NO:1918 shown in FIG. 1918.

[1980] FIG. 1920A-B shows a nucleotide sequence (SEQ ID NO:1920) of a native sequence cDNA, wherein SEQ ID NO:1920 is a clone designated herein as “DNA258863”.

[1981] FIG. 1921 shows a nucleotide sequence (SEQ ID NO:1921) of a native sequence PRO85071 cDNA, wherein SEQ ID NO:1921 is a clone designated herein as “DNA329510”.

[1982] FIG. 1922 shows the amino acid sequence (SEQ ID NO:1922) derived from the coding sequence of SEQ ID NO:1921 shown in FIG. 1921.

[1983] FIG. 1923 shows a nucleotide sequence (SEQ ID NO:1923) of a native sequence PRO23576 cDNA, wherein SEQ ID NO:1923 is a clone designated herein as “DNA194184”.

[1984] FIG. 1924 shows the amino acid sequence (SEQ ID NO:1924) derived from the coding sequence of SEQ ID NO:1923 shown in FIG. 1923.

[1985] FIG. 1925 shows a nucleotide sequence (SEQ ID NO:1925) of a native sequence PRO85072 cDNA, wherein SEQ ID NO:1925 is a clone designated herein as “DNA3295 11”.

[1986] FIG. 1926 shows the amino acid sequence (SEQ ID NO:1926) derived from the coding sequence of SEQ ID NO:1925 shown in FIG. 1925.

[1987] FIG. 1927 shows a nucleotide sequence (SEQ ID NO:1927) of a native sequence PRO84141 cDNA, wherein SEQ ID NO:1927 is a clone designated herein as “DNA328238”.

[1988] FIG. 1928 shows the amino acid sequence (SEQ ID NO:1928) derived from the coding sequence of SEQ ID NO:1927 shown in FIG. 1927.

[1989] FIG. 1929 shows a nucleotide sequence (SEQ ID NO:1929) of a native sequence PRO85073 cDNA, wherein SEQ ID NO:1929 is a clone designated herein as “DNA329512”.

[1990] FIG. 1930 shows the amino acid sequence (SEQ ID NO:1930) derived from the coding sequence of SEQ ID NO:1929 shown in FIG. 1929.

[1991] FIG. 1931 shows a nucleotide sequence (SEQ ID NO:1931) of a native sequence PRO85074 cDNA, wherein SEQ ID NO:1931 is a clone designated herein as “DNA329513”.

[1992] FIG. 1932 shows the amino acid sequence (SEQ ID NO:1932) derived from the coding sequence of SEQ ID NO:1931 shown in FIG. 1931.

[1993] FIG. 1933 shows a nucleotide sequence (SEQ ID NO:1933) of a native sequence PRO85075 cDNA, wherein SEQ ID NO:1933 is a clone designated herein as “DNA329514”.

[1994] FIG. 1934 shows the amino acid sequence (SEQ ID NO:1934) derived from the coding sequence of SEQ ID NO:1933 shown in FIG. 1933.

[1995] FIG. 1935 shows a nucleotide sequence (SEQ ID NO:1935) of a native sequence PRO4404 cDNA, wherein SEQ ID NO:1935 is a clone designated herein as “DNA84142”.

[1996] FIG. 1936 shows the amino acid sequence (SEQ ID NO:1936) derived from the coding sequence of SEQ ID NO:1935 shown in FIG. 1935.

[1997] FIG. 1937 shows a nucleotide sequence (SEQ ID NO:1937) of a native sequence PRO4348 cDNA, wherein SEQ ID NO:1937 is a clone designated herein as “DNA325654”.

[1998] FIG. 1938 shows the amino acid sequence (SEQ ID NO:1938) derived from the coding sequence of SEQ ID NO:1937 shown in FIG. 1937.

[1999] FIG. 1939 shows a nucleotide sequence (SEQ ID NO:1939) of a native sequence PRO4347 cDNA, wherein SEQ ID NO:1939 is a clone designated herein as “DNA329515”.

[2000] FIG. 1940 shows the amino acid sequence (SEQ ID NO:1940) derived from the coding sequence of SEQ ID NO:1940 shown in Figure

[2001] FIG. 1941 shows a nucleotide sequence (SEQ ID NO:1941) of a native sequence PRO220 cDNA, wherein SEQ ID NO:1941 is a clone designated herein as “DNA329516”.

[2002] FIG. 1942 shows the amino acid sequence (SEQ ID NO:1942) derived from the coding sequence of SEQ ID NO:1941 shown in FIG. 1941.

[2003] FIG. 1943 shows a nucleotide sequence (SEQ ID NO:1943) of a native sequence PRO85076 cDNA, wherein SEQ ID NO:1943 is a clone designated herein as “DNA329517”.

[2004] FIG. 1944 shows the amino acid sequence (SEQ ID NO:1944) derived from the coding sequence of SEQ ID NO:1943 shown in FIG. 1943.

[2005] FIG. 1945 shows a nucleotide sequence (SEQ ID NO:1945) of a native sequence PRO329 cDNA, wherein SEQ ID NO:1945 is a clone designated herein as “DNA323978”.

[2006] FIG. 1946 shows the amino acid sequence (SEQ ID NO:1946) derived from the coding sequence of SEQ ID NO:1945 shown in FIG. 1945.

[2007] FIG. 1947 shows a nucleotide sequence (SEQ ID NO:1947) of a native sequence PRO85077 cDNA, wherein SEQ ID NO:1947 is a clone designated herein as “DNA329518”.

[2008] FIG. 1948 shows the amino acid sequence (SEQ ID NO:1948) derived from the coding sequence of SEQ ID NO:1947 shown in FIG. 1947.

[2009] FIG. 1949 shows a nucleotide sequence (SEQ ID NO:1949) of a native sequence PRO38838 cDNA, wherein SEQ ID NO:1949 is a clone designated herein as “DNA233283”.

[2010] FIG. 1950 shows the amino acid sequence (SEQ ID NO:1950) derived from the coding sequence of SEQ ID NO:1949 shown in FIG. 1949.

[2011] FIG. 1951 shows a nucleotide sequence (SEQ ID NO:1951) of a native sequence PRO941 cDNA, wherein SEQ ID NO:1951 is a clone designated herein as “DNA329519”.

[2012] FIG. 1952 shows the amino acid sequence (SEQ ID NO:1952) derived from the coding sequence of SEQ ID NO:1951 shown in FIG. 1951.

[2013] FIG. 1953 shows a nucleotide sequence (SEQ ID NO:1953) of a native sequence PRO1054 cDNA, wherein SEQ ID NO:1953 is a clone designated herein as “DNA58853”.

[2014] FIG. 1954 shows the amino acid sequence (SEQ ID NO:1954) derived from the coding sequence of SEQ ID NO:1954 shown in Figure

[2015] FIG. 1955 shows a nucleotide sequence (SEQ ID NO:1955) of a native sequence PRO85078 cDNA, wherein SEQ ID NO:1955 is a clone designated herein as “DNA329520”.

[2016] FIG. 1956 shows the amino acid sequence (SEQ ID NO:1956) derived from the coding sequence of SEQ ID NO:1955 shown in FIG. 1955.

[2017] FIG. 1957 shows a nucleotide sequence (SEQ ID NO:1957) of a native sequence PRO6517 cDNA, wherein SEQ ID NO:1957 is a clone designated herein as “DNA109234”.

[2018] FIG. 1958 shows the amino acid sequence (SEQ ID NO:1958) derived from the coding sequence of SEQ ID NO:1957 shown in FIG. 1957.

[2019] FIG. 1959 shows a nucleotide sequence (SEQ ID NO:1959) of a native sequence PRO85079 cDNA, wherein SEQ ID NO:1959 is a clone designated herein as “DNA329521”.

[2020] FIG. 1960 shows the amino acid sequence (SEQ ID NO:1960) derived from the coding sequence of SEQ ID NO:1959 shown in FIG. 1959.

[2021] FIG. 1961 shows a nucleotide sequence (SEQ ID NO:1961) of a native sequence PRO12810 cDNA, wherein SEQ ID NO:1961 is a clone designated herein as “DNA150823”.

[2022] FIG. 1962 shows the amino acid sequence (SEQ ID NO:1962) derived from the coding sequence of SEQ ID NO:1961 shown in FIG. 1961.

[2023] FIG. 1963A-B shows a nucleotide sequence (SEQ ID NO:1963) of a native sequence PRO2598 cDNA, wherein SEQ ID NO:1963 is a clone designated herein as “DNA83118”.

[2024] FIG. 1964 shows the amino acid sequence (SEQ ID NO:1964) derived from the coding sequence of SEQ ID NO:1963 shown in FIG. 1963.

[2025] FIG. 1965 shows a nucleotide sequence (SEQ ID NO:1965) of a native sequence PRO2844 cDNA, wherein SEQ ID NO:1965 is a clone designated herein as “DNA88567”.

[2026] FIG. 1966 shows the amino acid sequence (SEQ ID NO:1966) derived from the coding sequence of SEQ ID NO:1965 shown in FIG. 1965.

[2027] FIG. 1967 shows a nucleotide sequence (SEQ ID NO:1967) of a native sequence PRO2852 cDNA, wherein SEQ ID NO:1967 is a clone designated herein as “DNA88583”.

[2028] FIG. 1968 shows the amino acid sequence (SEQ ID NO:1968) derived from the coding sequence of SEQ ID NO:1967 shown in FIG. 1967.

[2029] FIG. 1969 shows a nucleotide sequence (SEQ ID NO:1969) of a native sequence PRO24845 cDNA, wherein SEQ ID NO:1969 is a clone designated herein as “DNA196337”.

[2030] FIG. 1970 shows the amino acid sequence (SEQ ID NO:1970) derived from the coding sequence of SEQ ID NO:1969 shown in FIG. 1969.

[2031] FIG. 1971 shows a nucleotide sequence (SEQ ID NO:1971) of a native sequence PRO85080 cDNA, wherein SEQ ID NO:1971 is a clone designated herein as “DNA329522”.

[2032] FIG. 1972 shows the amino acid sequence (SEQ ID NO:1972) derived from the coding sequence of SEQ ID NO:1971 shown in FIG. 1971.

[2033] FIG. 1973 shows a nucleotide sequence (SEQ ID NO:1973) of a native sequence PRO2155 cDNA, wherein SEQ ID NO:1973 is a clone designated herein as “DNA329523”.

[2034] FIG. 1974 shows the amino acid sequence (SEQ ID NO:1974) derived from the coding sequence of SEQ ID NO:1973 shown in FIG. 1973.

[2035] FIG. 1975 shows a nucleotide sequence (SEQ ID NO:1975) of a native sequence PRO36996 cDNA, wherein SEQ ID NO:1975 is a clone designated herein as “DNA329524”.

[2036] FIG. 1976 shows the amino acid sequence (SEQ ID NO:1976) derived from the coding sequence of SEQ ID NO:1975 shown in FIG. 1975.

[2037] FIG. 1977 shows a nucleotide sequence (SEQ ID NO:1977) of a native sequence PRO2663 cDNA, wherein SEQ ID NO:1977 is a clone designated herein as “DNA88119”.

[2038] FIG. 1978 shows the amino acid sequence (SEQ ID NO:1978) derived from the coding sequence of SEQ ID NO:1977 shown in FIG. 1977.

[2039] FIG. 1979 shows a nucleotide sequence (SEQ ID NO:1979) of a native sequence PRO21942 cDNA, wherein SEQ ID NO:1979 is a clone designated herein as “DNA188234”.

[2040] FIG. 1980 shows the amino acid sequence (SEQ ID NO:1980) derived from the coding sequence of SEQ ID NO:1979 shown in FIG. 1979.

[2041] FIG. 1981 shows a nucleotide sequence (SEQ ID NO:1981) of a native sequence PRO36456 cDNA, wherein SEQ ID NO:1981 is a clone designated herein as “DNA225993”.

[2042] FIG. 1982 shows the amino acid sequence (SEQ ID NO:1982) derived from the coding sequence of SEQ ID NO:1981 shown in FIG. 1981.

[2043] FIG. 1983 shows a nucleotide sequence (SEQ ID NO:1983) of a native sequence PRO2590 cDNA, wherein SEQ ID NO:1983 is a clone designated herein as “DNA83101”.

[2044] FIG. 1984 shows the amino acid sequence (SEQ ID NO:1984) derived from the coding sequence of SEQ ID NO:1983 shown in FIG. 1983.

[2045] FIG. 1985 shows a nucleotide sequence (SEQ ID NO:1985) of a native sequence PRO69 cDNA, wherein SEQ ID NO:1985 is a clone designated herein as “DNA36714”.

[2046] FIG. 1986 shows the amino acid sequence (SEQ ID NO:1986) derived from the coding sequence of SEQ ID NO:1985 shown in FIG. 1985.

[2047] FIG. 1987 shows a nucleotide sequence (SEQ ID NO:1987) of a native sequence PRO36659 cDNA, wherein SEQ ID NO:1987 is a clone designated herein as “DNA226196”.

[2048] FIG. 1988 shows the amino acid sequence (SEQ ID NO:1988) derived from the coding sequence of SEQ ID NO:1987 shown in FIG. 1987.

[2049] FIG. 1989 shows a nucleotide sequence (SEQ ID NO:1989) of a native sequence PRO20139 cDNA, wherein SEQ ID NO:1989 is a clone designated herein as “DNA246375”.

[2050] FIG. 1990 shows the amino acid sequence (SEQ ID NO:1990) derived from the coding sequence of SEQ ID NO:1989 shown in FIG. 1989.

[2051] FIG. 1991 shows a nucleotide sequence (SEQ ID NO:1991) of a native sequence PRO2691 cDNA, wherein SEQ ID NO:1991 is a clone designated herein as “DNA88191”.

[2052] FIG. 1992 shows the amino acid sequence (SEQ ID NO:1992) derived from the coding sequence of SEQ ID NO:1991 shown in FIG. 1991.

[2053] FIG. 1993 shows a nucleotide sequence (SEQ ID NO:1993) of a native sequence PRO85081 cDNA, wherein SEQ ID NO:1993 is a clone designated herein as “DNA329525”.

[2054] FIG. 1994 shows the amino acid sequence (SEQ ID NO:1994) derived from the coding sequence of SEQ ID NO:1993 shown in FIG. 1993.

[2055] FIG. 1995 shows a nucleotide sequence (SEQ ID NO:1995) of a native sequence PRO4940 cDNA, wherein SEQ ID NO:1995 is a clone designated herein as “DNA328576”.

[2056] FIG. 1996 shows the amino acid sequence (SEQ ID NO:1996) derived from the coding sequence of SEQ ID NO:1995 shown in FIG. 1995.

[2057] FIG. 1997 shows a nucleotide sequence (SEQ ID NO:1997) of a native sequence PRO37421 cDNA, wherein SEQ ID NO:1997 is a clone designated herein as “DNA226958”.

[2058] FIG. 1998 shows the amino acid sequence (SEQ ID NO:1998) derived from the coding sequence of SEQ ID NO:1997 shown in FIG. 1997.

[2059] FIG. 1999 shows a nucleotide sequence (SEQ ID NO:1999) of a native sequence PRO81141 cDNA, wherein SEQ ID NO:1999 is a clone designated herein as “DNA324480”.

[2060] FIG. 2000 shows the amino acid sequence (SEQ ID NO:2000) derived from the coding sequence of SEQ ID NO:1999 shown in FIG. 1999.

[2061] FIG. 2001 shows a nucleotide sequence (SEQ ID NO:2001) of a native sequence PRO1718 cDNA, wherein SEQ ID NO:2001 is a clone designated herein as “DNA82362”.

[2062] FIG. 2002 shows the amino acid sequence (SEQ ID NO:2002) derived from the coding sequence of SEQ ID NO:2001 shown in FIG. 2001.

[2063] FIG. 2003 shows a nucleotide sequence (SEQ ID NO:2003) of a native sequence PRO37476 cDNA, wherein SEQ ID NO:2003 is a clone designated herein as “DNA227013”.

[2064] FIG. 2004 shows the amino acid sequence (SEQ ID NO:2004) derived from the coding sequence of SEQ ID NO:2003 shown in FIG. 2003.

[2065] FIG. 2005A-B shows a nucleotide sequence (SEQ ID NO:2005) of a native sequence PRO36827 cDNA, wherein SEQ ID NO:2005 is a clone designated herein as “DNA226364”.

[2066] FIG. 2006 shows the amino acid sequence (SEQ ID NO:2006) derived from the coding sequence of SEQ ID NO:2005 shown in FIG. 2005.

[2067] FIG. 2007 shows a nucleotide sequence (SEQ ID NO:2007) of a native sequence PRO2640 cDNA, wherein SEQ ID NO:2007 is a clone designated herein as “DNA88076”.

[2068] FIG. 2008 shows the amino acid sequence (SEQ ID NO:2008) derived from the coding sequence of SEQ ID NO:2007 shown in FIG. 2007.

[2069] FIG. 2009 shows a nucleotide sequence (SEQ ID NO:2009) of a native sequence PRO2013 cDNA, wherein SEQ ID NO:2009 is a clone designated herein as “DNA75526”.

[2070] FIG. 2010 shows the amino acid sequence (SEQ ID NO:2010) derived from the coding sequence of SEQ ID NO:2009 shown in FIG. 2009.

[2071] FIG. 2011 shows a nucleotide sequence (SEQ ID NO:2011) of a native sequence PRO2177 cDNA, wherein SEQ ID NO:2011 is a clone designated herein as “DNA88116”.

[2072] FIG. 2012 shows the amino acid sequence (SEQ ID NO:2012) derived from the coding sequence of SEQ ID NO:2011 shown in FIG. 2011.

[2073] FIG. 2013 shows a nucleotide sequence (SEQ ID NO:2013) of a native sequence PRO4695 cDNA, wherein SEQ ID NO:2013 is a clone designated herein as “DNA226380”.

[2074] FIG. 2014 shows the amino acid sequence (SEQ ID NO:2014) derived from the coding sequence of SEQ ID NO:2013 shown in FIG. 2013.

[2075] FIG. 2015 shows a nucleotide sequence (SEQ ID NO:2015) of a native sequence PRO80473 cDNA, wherein SEQ ID NO:2015 is a clone designated herein as “DNA329526”.

[2076] FIG. 2016 shows the amino acid sequence (SEQ ID NO:2016) derived from the coding sequence of SEQ ID NO:2015 shown in FIG. 2015.

[2077] FIG. 2017A-B shows a nucleotide sequence (SEQ ID NO:2017) of a native sequence PRO2249 cDNA, wherein SEQ ID NO:2017 is a clone designated herein as “DNA88251”.

[2078] FIG. 2018 shows the amino acid sequence (SEQ ID NO:2018) derived from the coding sequence of SEQ ID NO:2017 shown in FIG. 2017.

[2079] FIG. 2019A-B shows a nucleotide sequence (SEQ ID NO:2019) of a native sequence PRO25018 cDNA, wherein SEQ ID NO:2019 is a clone designated herein as “DNA196533”.

[2080] FIG. 2020 shows the amino acid sequence (SEQ ID NO:2020) derived from the coding sequence of SEQ ID NO:2019 shown in FIG. 2019.

[2081] FIG. 2021 shows a nucleotide sequence (SEQ ID NO:2021) of a native sequence PRO36124 cDNA, wherein SEQ ID NO:2021 is a clone designated herein as “DNA225661”.

[2082] FIG. 2022 shows the amino acid sequence (SEQ ID NO:2022) derived from the coding sequence of SEQ ID NO:2021 shown in FIG. 2021.

[2083] FIG. 2023 shows a nucleotide sequence (SEQ ID NO:2023) of a native sequence PRO2868 cDNA, wherein SEQ ID NO:2023 is a clone designated herein as “DNA329527”.

[2084] FIG. 2024 shows the amino acid sequence (SEQ ID NO:2024) derived from the coding sequence of SEQ ID NO:2023 shown in FIG. 2023.

[2085] FIG. 2025 shows a nucleotide sequence (SEQ ID NO:2025) of a native sequence PRO85082 cDNA, wherein SEQ ID NO:2025 is a clone designated herein as “DNA329528”.

[2086] FIG. 2026 shows the amino acid sequence (SEQ ID NO:2026) derived from the coding sequence of SEQ ID NO:2025 shown in FIG. 2025.

[2087] FIG. 2027 shows a nucleotide sequence (SEQ ID NO:2027) of a native sequence PRO85083 cDNA, wherein SEQ ID NO:2027 is a clone designated herein as “DNA329529”.

[2088] FIG. 2028 shows the amino acid sequence (SEQ ID NO:2028) derived from the coding sequence of SEQ ID NO:2028 shown in Figure

[2089] FIG. 2029 shows a nucleotide sequence (SEQ ID NO:2029) of a native sequence PRO82739 cDNA, wherein SEQ ID NO:2029 is a clone designated herein as “DNA326343”.

[2090] FIG. 2030 shows the amino acid sequence (SEQ ID NO:2030) derived from the coding sequence of SEQ ID NO:2029 shown in FIG. 2029.

[2091] FIG. 2031 shows a nucleotide sequence (SEQ ID NO:2031) of a native sequence PRO2809 cDNA, wherein SEQ ID NO:2031 is a clone designated herein as “DNA88472”.

[2092] FIG. 2032 shows the amino acid sequence (SEQ ID NO:2032) derived from the coding sequence of SEQ ID NO:2031 shown in FIG. 2031.

[2093] FIG. 2033 shows a nucleotide sequence (SEQ ID NO:2033) of a native sequence PRO11604 cDNA, wherein SEQ ID NO:2033 is a clone designated herein as “DNA329530”.

[2094] FIG. 2034 shows the amino acid sequence (SEQ ID NO:2034) derived from the coding sequence of SEQ ID NO:2033 shown in FIG. 2033.

[2095] FIG. 2035 shows a nucleotide sequence (SEQ ID NO:2035) of a native sequence PRO12452 cDNA, wherein SEQ ID NO:2035 is a clone designated herein as “DNA150757”.

[2096] FIG. 2036 shows the amino acid sequence (SEQ ID NO:2036) derived from the coding sequence of SEQ ID NO:2035 shown in FIG. 2035.

[2097] FIG. 2037 shows a nucleotide sequence (SEQ ID NO:2037) of a native sequence PRO21783 cDNA, wherein SEQ ID NO:2037 is a clone designated herein as “DNA188330”.

[2098] FIG. 2038 shows the amino acid sequence (SEQ ID NO:2038) derived from the coding sequence of SEQ ID NO:2037 shown in FIG. 2037.

[2099] FIG. 2039 shows a nucleotide sequence (SEQ ID NO:2039) of a native sequence PRO84151 cDNA, wherein SEQ ID NO:2039 is a clone designated herein as “DNA328258”.

[2100] FIG. 2040 shows the amino acid sequence (SEQ ID NO:2040) derived from the coding sequence of SEQ ID NO:2039 shown in FIG. 2039.

[2101] FIG. 2041 shows a nucleotide sequence (SEQ ID NO:2041) of a native sequence PRO85084 cDNA, wherein SEQ ID NO:2041 is a clone designated herein as “DNA329531”.

[2102] FIG. 2042 shows the amino acid sequence (SEQ ID NO:2042) derived from the coding sequence of SEQ ID NO:2041 shown in FIG. 2041.

[2103] FIG. 2043 shows a nucleotide sequence (SEQ ID NO:2043) of a native sequence PRO37029 cDNA, wherein SEQ ID NO:2043 is a clone designated herein as “DNA329007”.

[2104] FIG. 2044 shows the amino acid sequence (SEQ ID NO:2044) derived from the coding sequence of SEQ ID NO:2043 shown in FIG. 2043.

[2105] FIG. 2045 shows a nucleotide sequence (SEQ ID NO:2045) of a native sequence PRO36606 cDNA, wherein SEQ ID NO:2045 is a clone designated herein as “DNA226143”.

[2106] FIG. 2046 shows the amino acid sequence (SEQ ID NO:2046) derived from the coding sequence of SEQ ID NO:2045 shown in FIG. 2045.

[2107] FIG. 2047 shows a nucleotide sequence (SEQ ID NO:2047) of a native sequence PRO24862 cDNA, wherein SEQ ID NO:2047 is a clone designated herein as “DNA196357”.

[2108] FIG. 2048 shows the amino acid sequence (SEQ ID NO:2048) derived from the coding sequence of SEQ ID NO:2047 shown in FIG. 2047.

[2109] FIG. 2049A-B shows a nucleotide sequence (SEQ ID NO:2049) of a native sequence PRO37968 cDNA, wherein SEQ ID NO:2049 is a clone designated herein as “DNA227505”.

[2110] FIG. 2050 shows the amino acid sequence (SEQ ID NO:2050) derived from the coding sequence of SEQ ID NO:2049 shown in FIG. 2049.

[2111] FIG. 2051 shows a nucleotide sequence (SEQ ID NO:2051) of a native sequence PRO12658 cDNA, wherein SEQ ID NO:2051 is a clone designated herein as “DNA329532”.

[2112] FIG. 2052 shows the amino acid sequence (SEQ ID NO:2052) derived from the coding sequence of SEQ ID NO:2051 shown in FIG. 2051.

[2113] FIG. 2053 shows a nucleotide sequence (SEQ ID NO:2053) of a native sequence PRO85085 cDNA, wherein SEQ ID NO:2053 is a clone designated herein as “DNA329533”.

[2114] FIG. 2054 shows the amino acid sequence (SEQ ID NO:2054) derived from the coding sequence of SEQ ID NO:2053 shown in FIG. 2053.

[2115] FIG. 2055A-B shows a nucleotide sequence (SEQ ID NO:2055) of a native sequence PRO36420 cDNA, wherein SEQ ID NO:2055 is a clone designated herein as “DNA225957”.

[2116] FIG. 2056 shows the amino acid sequence (SEQ ID NO:2056) derived from the coding sequence of SEQ ID NO:2055 shown in FIG. 2055.

[2117] FIG. 2057 shows a nucleotide sequence (SEQ ID NO:2057) of a native sequence PRO84153 cDNA, wherein SEQ ID NO:2057 is a clone designated herein as “DNA328262”.

[2118] FIG. 2058 shows the amino acid sequence (SEQ ID NO:2058) derived from the coding sequence of SEQ ID NO:2057 shown in FIG. 2057.

[2119] FIG. 2059 shows a nucleotide sequence (SEQ ID NO:2059) of a native sequence PRO2904 cDNA, wherein SEQ ID NO:2059 is a clone designated herein as “DNA329534”.

[2120] FIG. 2060 shows the amino acid sequence (SEQ ID NO:2060) derived from the coding sequence of SEQ ID NO:2059 shown in FIG. 2059.

[2121] FIG. 2061 shows a nucleotide sequence (SEQ ID NO:2061) of a native sequence PRO85086 cDNA, wherein SEQ ID NO:2061 is a clone designated herein as “DNA329535”.

[2122] FIG. 2062 shows the amino acid sequence (SEQ ID NO:2062) derived from the coding sequence of SEQ ID NO:2061 shown in FIG. 2061.

[2123] FIG. 2063 shows a nucleotide sequence (SEQ ID NO:2063) of a native sequence PRO2733 cDNA, wherein SEQ ID NO:2063 is a clone designated herein as “DNA325039”.

[2124] FIG. 2064 shows the amino acid sequence (SEQ ID NO:2064) derived from the coding sequence of SEQ ID NO:2063 shown in FIG. 2063.

[2125] FIG. 2065 shows a nucleotide sequence (SEQ ID NO:2065) of a native sequence PRO23370 cDNA, wherein SEQ ID NO:2065 is a clone designated herein as “DNA329010”.

[2126] FIG. 2066 shows the amino acid sequence (SEQ ID NO:2066) derived from the coding sequence of SEQ ID NO:2065 shown in FIG. 2065.

[2127] FIG. 2067 shows a nucleotide sequence (SEQ ID NO:2067) of a native sequence PRO2602 cDNA, wherein SEQ ID NO:2067 is a clone designated herein as “DNA83134”.

[2128] FIG. 2068 shows the amino acid sequence (SEQ ID NO:2068) derived from the coding sequence of SEQ ID NO:2067 shown in FIG. 2067.

[2129] FIG. 2069 shows a nucleotide sequence (SEQ ID NO:2069) of a native sequence PRO4599 cDNA, wherein SEQ ID NO:2069 is a clone designated herein as “DNA103269”.

[2130] FIG. 2070 shows the amino acid sequence (SEQ ID NO:2070) derived from the coding sequence of SEQ ID NO:2069 shown in FIG. 2069.

[2131] FIG. 2071A-B shows a nucleotide sequence (SEQ ID NO:2071) of a native sequence PRO22775 cDNA, wherein SEQ ID NO:2071 is a clone designated herein as “DNA329536”.

[2132] FIG. 2072 shows the amino acid sequence (SEQ ID NO:2072) derived from the coding sequence of SEQ ID NO:2072 shown in FIG. 2072.

[2133] FIG. 2073 shows a nucleotide sequence (SEQ ID NO:2073) of a native sequence PRO85087 cDNA, wherein SEQ ID NO:2073 is a clone designated herein as “DNA329537”.

[2134] FIG. 2074 shows the amino acid sequence (SEQ ID NO:2074) derived from the coding sequence of SEQ ID NO:2073 shown in FIG. 2073.

[2135] FIG. 2075 shows a nucleotide sequence (SEQ ID NO:2075) of a native sequence PRO36963 cDNA, wherein SEQ ID NO:2075 is a clone designated herein as “DNA226500”.

[2136] FIG. 2076 shows the amino acid sequence (SEQ ID NO:2076) derived from the coding sequence of SEQ ID NO:2075 shown in FIG. 2075.

[2137] FIG. 2077 shows a nucleotide sequence (SEQ ID NO:2077) of a native sequence PRO20128 cDNA, wherein SEQ ID NO:2077 is a clone designated herein as “DNA329013”.

[2138] FIG. 2078 shows the amino acid sequence (SEQ ID NO:2078) derived from the coding sequence of SEQ ID NO:2077 shown in FIG. 2077.

[2139] FIG. 2079 shows a nucleotide sequence (SEQ ID NO:2079) of a native sequence PRO38443 cDNA, wherein SEQ ID NO:2079 is a clone designated herein as “DNA227980”.

[2140] FIG. 2080 shows the amino acid sequence (SEQ ID NO:2080) derived from the coding sequence of SEQ ID NO:2079 shown in FIG. 2079.

[2141] FIG. 2081 shows a nucleotide sequence (SEQ ID NO:2081) of a native sequence PRO85088 cDNA, wherein SEQ ID NO:2081 is a clone designated herein as “DNA329538”.

[2142] FIG. 2082 shows the amino acid sequence (SEQ ID NO:2082) derived from the coding sequence of SEQ ID NO:2081 shown in FIG. 2081.

[2143] FIG. 2083 shows a nucleotide sequence (SEQ ID NO:2083) of a native sequence PRO6180 cDNA, wherein SEQ ID NO:2083 is a clone designated herein as “DNA287376”.

[2144] FIG. 2084 shows the amino acid sequence (SEQ ID NO:2084) derived from the coding sequence of SEQ ID NO:2083 shown in FIG. 2083.

[2145] FIG. 2085 shows a nucleotide sequence (SEQ ID NO:2085) of a native sequence PRO85089 cDNA, wherein SEQ ID NO:2085 is a clone designated herein as “DNA329539”.

[2146] FIG. 2086 shows the amino acid sequence (SEQ ID NO:2086) derived from the coding sequence of SEQ ID NO:2085 shown in FIG. 2085.

[2147] FIG. 2087 shows a nucleotide sequence (SEQ ID NO:2087) of a native sequence PRO2520 cDNA, wherein SEQ ID NO:2087 is a clone designated herein as “DNA28759”.

[2148] FIG. 2088 shows the amino acid sequence (SEQ ID NO:2088) derived from the coding sequence of SEQ ID NO:2087 shown in FIG. 2087.

[2149] FIG. 2089 shows a nucleotide sequence (SEQ ID NO:2089) of a native sequence PRO4887 cDNA, wherein SEQ ID NO:2089 is a clone designated herein as “DNA329016”.

[2150] FIG. 2090 shows the amino acid sequence (SEQ ID NO:2090) derived from the coding sequence of SEQ ID NO:2089 shown in FIG. 2089.

[2151] FIG. 2091 shows a nucleotide sequence (SEQ ID NO:2091) of a native sequence PRO85090 cDNA, wherein SEQ ID NO:2091 is a clone designated herein as “DNA329540”.

[2152] FIG. 2092 shows the amino acid sequence (SEQ ID NO:2092) derived from the coding sequence of SEQ ID NO:2091 shown in FIG. 2091.

[2153] FIG. 2093 shows a nucleotide sequence (SEQ ID NO:2093) of a native sequence PRO4515 cDNA, wherein SEQ ID NO:2093 is a clone designated herein as “DNA93439”.

[2154] FIG. 2094 shows the amino acid sequence (SEQ ID NO:2094) derived from the coding sequence of SEQ ID NO:2093 shown in FIG. 2093.

[2155] FIG. 2095 shows a nucleotide sequence (SEQ ID NO:2095) of a native sequence PRO12358 cDNA, wherein SEQ ID NO:2095 is a clone designated herein as “DNA329541”.

[2156] FIG. 2096 shows the amino acid sequence (SEQ ID NO:2096) derived from the coding sequence of SEQ ID NO:2095 shown in FIG. 2095.

[2157] FIG. 2097 shows a nucleotide sequence (SEQ ID NO:2097) of a native sequence PRO37975 cDNA, wherein SEQ ID NO:2097 is a clone designated herein as “DNA227512”.

[2158] FIG. 2098 shows the amino acid sequence (SEQ ID NO:2098) derived from the coding sequence of SEQ ID NO:2097 shown in FIG. 2097

[2159] FIG. 2099 shows a nucleotide sequence (SEQ ID NO:2099) of a native sequence PRO12468 cDNA, wherein SEQ ID NO:2099 is a clone designated herein as “DNA324897”.

[2160] FIG. 2100 shows the amino acid sequence (SEQ ID NO:2100) derived from the coding sequence of SEQ ID NO:2099 shown in FIG. 2099.

[2161] FIG. 2101 shows a nucleotide sequence (SEQ ID NO:2101) of a native sequence PRO4767 cDNA, wherein SEQ ID NO:2101 is a clone designated herein as “DNA103440”.

[2162] FIG. 2102 shows the amino acid sequence (SEQ ID NO:2102) derived from the coding sequence of SEQ ID NO:2101 shown in FIG. 2101.

[2163] FIG. 2103 shows a nucleotide sequence (SEQ ID NO:2103) of a native sequence PRO4735 cDNA, wherein SEQ ID NO:2103 is a clone designated herein as “DNA329542”.

[2164] FIG. 2104 shows the amino acid sequence (SEQ ID NO:2104) derived from the coding sequence of SEQ ID NO:2103 shown in FIG. 2103.

[2165] FIG. 2105 shows a nucleotide sequence (SEQ ID NO:2105) of a native sequence PRO36506 cDNA, wherein SEQ ID NO:2105 is a clone designated herein as “DNA226043”.

[2166] FIG. 2106 shows the amino acid sequence (SEQ ID NO:2106) derived from the coding sequence of SEQ ID NO:2105 shown in FIG. 2105.

[2167] FIG. 2107 shows a nucleotide sequence (SEQ ID NO:2107) of a native sequence PRO2690 cDNA, wherein SEQ ID NO:2107 is a clone designated herein as “DNA88189”.

[2168] FIG. 2108 shows the amino acid sequence (SEQ ID NO:2108) derived from the coding sequence of SEQ ID NO:2107 shown in FIG. 2107.

[2169] FIG. 2109 shows a nucleotide sequence (SEQ ID NO:2109) of a native sequence PRO4808 cDNA, wherein SEQ ID NO:2109 is a clone designated herein as “DNA103481”.

[2170] FIG. 2110 shows the amino acid sequence (SEQ ID NO:2110) derived from the coding sequence of SEQ ID NO:2109 shown in FIG. 2109.

[2171] FIG. 2111 shows a nucleotide sequence (SEQ ID NO:2111) of a native sequence PRO4419 cDNA, wherein SEQ ID NO:2111 is a clone designated herein as “DNA329543”.

[2172] FIG. 2112 shows the amino acid sequence (SEQ ID NO:2112) derived from the coding sequence of SEQ ID NO:2111 shown in FIG. 2111.

[2173] FIG. 2113 shows a nucleotide sequence (SEQ ID NO:2113) of a native sequence PRO619 cDNA, wherein SEQ ID NO:2113 is a clone designated herein as “DNA329544”.

[2174] FIG. 2114 shows the amino acid sequence (SEQ ID NO:2114) derived from the coding sequence of SEQ ID NO:2113 shown in FIG. 2113.

[2175] FIG. 2115 shows a nucleotide sequence (SEQ ID NO:2115) of a native sequence PRO85091 cDNA, wherein SEQ ID NO:2115 is a clone designated herein as “DNA329545”.

[2176] FIG. 2116 shows the amino acid sequence (SEQ ID NO:2116) derived from the coding sequence of SEQ ID NO:2115 shown in FIG. 2115.

[2177] FIG. 2117 shows a nucleotide sequence (SEQ ID NO:2117) of a native sequence PRO23859 cDNA, wherein SEQ ID NO:2117 is a clone designated herein as “DNA328957”.

[2178] FIG. 2118 shows the amino acid sequence (SEQ ID NO:2118) derived from the coding sequence of SEQ ID NO:2117 shown in FIG. 2117.

[2179] FIG. 2119 shows a nucleotide sequence (SEQ ID NO:2119) of a native sequence PRO37696 cDNA, wherein SEQ ID NO:2119 is a clone designated herein as “DNA227233”.

[2180] FIG. 2120 shows the amino acid sequence (SEQ ID NO:2120) derived from the coding sequence of SEQ ID NO:2119 shown in FIG. 2119.

[2181] FIG. 2121 shows a nucleotide sequence (SEQ ID NO:2121) of a native sequence PRO296 cDNA, wherein SEQ ID NO:2121 is a clone designated herein as “DNA329546”.

[2182] FIG. 2122 shows the amino acid sequence (SEQ ID NO:2122) derived from the coding sequence of SEQ ID NO:2123 shown in FIG. 2123.

[2183] FIG. 2123 shows a nucleotide sequence (SEQ ID NO:2123) of a native sequence PRO34477 cDNA, wherein SEQ ID NO:2123 is a clone designated herein as “DNA218845”.

[2184] FIG. 2124 shows the amino acid sequence (SEQ ID NO:2124) derived from the coding sequence of SEQ ID NO:2123 shown in FIG. 2123.

[2185] FIG. 2125 shows a nucleotide sequence (SEQ ID NO:2125) of a native sequence PRO85092 cDNA, wherein SEQ ID NO:2125 is a clone designated herein as “DNA329547”.

[2186] FIG. 2126 shows the amino acid sequence (SEQ ID NO:2126) derived from the coding sequence of SEQ ID NO:2125 shown in FIG. 2125.

[2187] FIG. 2127 shows a nucleotide sequence (SEQ ID NO:2127) of a native sequence PRO24955 cDNA, wherein SEQ ID NO:2127 is a clone designated herein as “DNA196460”.

[2188] FIG. 2128 shows the amino acid sequence (SEQ ID NO:2128) derived from the coding sequence of SEQ ID NO:2127 shown in FIG. 2127.

[2189] FIG. 2129 shows a nucleotide sequence (SEQ ID NO:2129) of a native sequence PRO33679 cDNA, wherein SEQ ID NO:2129 is a clone designated herein as “DNA210134”.

[2190] FIG. 2130 shows the amino acid sequence (SEQ ID NO:2130) derived from the coding sequence of SEQ ID NO:2129 shown in FIG. 2129.

[2191] FIG. 2131 shows a nucleotide sequence (SEQ ID NO:2131) of a native sequence PRO36002 cDNA, wherein SEQ ID NO:2131 is a clone designated herein as “DNA225539”.

[2192] FIG. 2132 shows the amino acid sequence (SEQ ID NO:2132) derived from the coding sequence of SEQ ID NO:2131 shown in FIG. 2131.

[2193] FIG. 2133 shows a nucleotide sequence (SEQ ID NO:2133) of a native sequence PRO85093 cDNA, wherein SEQ ID NO:2133 is a clone designated herein as “DNA329548”.

[2194] FIG. 2134 shows the amino acid sequence (SEQ ID NO:2134) derived from the coding sequence of SEQ ID NO:2133 shown in FIG. 2133.

[2195] FIG. 2135 shows a nucleotide sequence (SEQ ID NO:2135) of a native sequence PRO71042 cDNA, wherein SEQ ID NO:2135 is a clone designated herein as “DNA304464”.

[2196] FIG. 2136 shows the amino acid sequence (SEQ ID NO:2136) derived from the coding sequence of SEQ ID NO:2135 shown in FIG. 2135.

[2197] FIG. 2137 shows a nucleotide sequence (SEQ ID NO:2137) of a native sequence PRO85094 cDNA, wherein SEQ ID NO:2137 is a clone designated herein as “DNA329549”.

[2198] FIG. 2138 shows the amino acid sequence (SEQ ID NO:2138) derived from the coding sequence of SEQ ID NO:2137 shown in FIG. 2137.

[2199] FIG. 2139 shows a nucleotide sequence (SEQ ID NO:2139) of a native sequence PRO36113 cDNA, wherein SEQ ID NO:2139 is a clone designated herein as “DNA225650”.

[2200] FIG. 2140 shows the amino acid sequence (SEQ ID NO:2140) derived from the coding sequence of SEQ ID NO:2139 shown in FIG. 2139.

[2201] FIG. 2141 shows a nucleotide sequence (SEQ ID NO:2141) of a native sequence PRO85095 cDNA, wherein SEQ ID NO:2141 is a clone designated herein as “DNA329550”.

[2202] FIG. 2142 shows the amino acid sequence (SEQ ID NO:2142) derived from the coding sequence of SEQ ID NO:2141 shown in FIG. 2141.

[2203] FIG. 2143 shows a nucleotide sequence (SEQ ID NO:2143) of a native sequence PRO9891 cDNA, wherein SEQ ID NO:2143 is a clone designated herein as “DNA328933”.

[2204] FIG. 2144 shows the amino acid sequence (SEQ ID NO:2144) derived from the coding sequence of SEQ ID NO:2143 shown in FIG. 2143.

[2205] FIG. 2145A-B shows a nucleotide sequence (SEQ ID NO:2145) of a native sequence PRO4330 cDNA, wherein SEQ ID NO:2145 is a clone designated herein as “DNA328454”.

[2206] FIG. 2146 shows the amino acid sequence (SEQ ID NO:2146) derived from the coding sequence of SEQ ID NO:2145 shown in FIG. 2145.

[2207] FIG. 2147 shows a nucleotide sequence (SEQ ID NO:2147) of a native sequence PRO34297 cDNA, wherein SEQ ID NO:2147 is a clone designated herein as “DNA217255”.

[2208] FIG. 2148 shows the amino acid sequence (SEQ ID NO:2148) derived from the coding sequence of SEQ ID NO:2147 shown in FIG. 2147.

[2209] FIG. 2149 shows a nucleotide sequence (SEQ ID NO:2149) of a native sequence PRO85096 cDNA, wherein SEQ ID NO:2149 is a clone designated herein as “DNA329551”.

[2210] FIG. 2150 shows the amino acid sequence (SEQ ID NO:2150) derived from the coding sequence of SEQ ID NO:2149 shown in FIG. 2149.

[2211] FIG. 2151 shows a nucleotide sequence (SEQ ID NO:2151) of a native sequence PRO85097 cDNA, wherein SEQ ID NO:2151 is a clone designated herein as “DNA329552”.

[2212] FIG. 2152 shows the amino acid sequence (SEQ ID NO:2152) derived from the coding sequence of SEQ ID NO:2151 shown in FIG. 2151.

[2213] FIG. 2153 shows a nucleotide sequence (SEQ ID NO:2153) of a native sequence PRO38313 cDNA, wherein SEQ ID NO:2153 is a clone designated herein as “DNA329553”.

[2214] FIG. 2154 shows the amino acid sequence (SEQ ID NO:2154) derived from the coding sequence of SEQ ID NO:2153 shown in FIG. 2153.

[2215] FIG. 2155 shows a nucleotide sequence (SEQ ID NO:2155) of a native sequence PRO85098 cDNA, wherein SEQ ID NO:2155 is a clone designated herein as “DNA329554”.

[2216] FIG. 2156 shows the amino acid sequence (SEQ ID NO:2156) derived from the coding sequence of SEQ ID NO:2155 shown in FIG. 2155.

[2217] FIG. 2157 shows a nucleotide sequence (SEQ ID NO:2157) of a native sequence PRO85099 cDNA, wherein SEQ ID NO:2157 is a clone designated herein as “DNA329555”.

[2218] FIG. 2158 shows the amino acid sequence (SEQ ID NO:2158) derived from the coding sequence of SEQ ID NO:2157 shown in FIG. 2157.

[2219] FIG. 2159 shows a nucleotide sequence (SEQ ID NO:2159) of a native sequence PRO12916 cDNA, wherein SEQ ID NO:2159 is a clone designated herein as “DNA151893”.

[2220] FIG. 2160 shows the amino acid sequence (SEQ ID NO:2160) derived from the coding sequence of SEQ ID NO:2159 shown in FIG. 2159.

[2221] FIG. 2161A-B shows a nucleotide sequence (SEQ ID NO:2161) of a native sequence cDNA, wherein SEQ ID NO:2161 is a clone designated herein as “DNA329556”.

[2222] FIG. 2162 shows a nucleotide sequence (SEQ ID NO:2162) of a native sequence PRO7250 cDNA, wherein SEQ ID NO:2162 is a clone designated herein as “DNA329557”.

[2223] FIG. 2163 shows the amino acid sequence (SEQ ID NO:2163) derived from the coding sequence of SEQ ID NO:2162 shown in FIG. 2162.

[2224] FIG. 2164 shows a nucleotide sequence (SEQ ID NO:2164) of a native sequence PRO38486 cDNA, wherein SEQ ID NO:2164 is a clone designated herein as “DNA228023”.

[2225] FIG. 2165 shows the amino acid sequence (SEQ ID NO:2165) derived from the coding sequence of SEQ ID NO:2164 shown in FIG. 2164.

[2226] FIG. 2166A-B shows a nucleotide sequence (SEQ ID NO:2166) of a native sequence PRO85100 cDNA, wherein SEQ ID NO:2166 is a clone designated herein as “DNA329558”.

[2227] FIG. 2167 shows the amino acid sequence (SEQ ID NO:2167) derived from the coding sequence of SEQ ID NO:2166 shown in FIG. 2166.

[2228] FIG. 2168 shows a nucleotide sequence (SEQ ID NO:2168) of a native sequence cDNA, wherein SEQ ID NO:2168 is a clone designated herein as “DNA150552”.

[2229] FIG. 2169 shows a nucleotide sequence (SEQ ID NO:2169) of a native sequence PRO80622 cDNA, wherein SEQ ID NO:2169 is a clone designated herein as “DNA323879”.

[2230] FIG. 2170 shows the amino acid sequence (SEQ ID NO:2170) derived from the coding sequence of SEQ ID NO:2169 shown in FIG. 2169.

[2231] FIG. 2171A-B shows a nucleotide sequence (SEQ ID NO:2171) of a native sequence PRO12843 cDNA, wherein SEQ ID NO:2171 is a clone designated herein as “DNA151027”.

[2232] FIG. 2172 shows the amino acid sequence (SEQ ID NO:2172) derived from the coding sequence of SEQ ID NO:2171 shown in FIG. 2171.

[2233] FIG. 2173 shows a nucleotide sequence (SEQ ID NO:2173) of a native sequence PRO85101 cDNA, wherein SEQ ID NO:2173 is a clone designated herein as “DNA329559”.

[2234] FIG. 2174 shows the amino acid sequence (SEQ ID NO:2174) derived from the coding sequence of SEQ ID NO:2173 shown in FIG. 2173.

[2235] FIG. 2175A-B shows a nucleotide sequence (SEQ ID NO:2175) of a native sequence PRO85102 cDNA, wherein SEQ ID NO:2175 is a clone designated herein as “DNA329560”.

[2236] FIG. 2176 shows the amino acid sequence (SEQ ID NO:2176) derived from the coding sequence of SEQ ID NO:2175 shown in FIG. 2175.

[2237] FIG. 2177 shows a nucleotide sequence (SEQ ID NO:2177) of a native sequence PRO85103 cDNA, wherein SEQ ID NO:2177 is a clone designated herein as “DNA329561”.

[2238] FIG. 2178 shows the amino acid sequence (SEQ ID NO:2178) derived from the coding sequence of SEQ ID NO:2177 shown in FIG. 2177.

[2239] FIG. 2179 shows a nucleotide sequence (SEQ ID NO:2179) of a native sequence PRO85104 cDNA, wherein SEQ ID NO:2179 is a clone designated herein as “DNA329562”.

[2240] FIG. 2180 shows the amino acid sequence (SEQ ID NO:2180) derived from the coding sequence of SEQ ID NO:2179 shown in FIG. 2179.

[2241] FIG. 2181 shows a nucleotide sequence (SEQ ID NO:2181) of a native sequence PRO84160 cDNA, wherein SEQ ID NO:2181 is a clone designated herein as “DNA328284”.

[2242] FIG. 2182 shows the amino acid sequence (SEQ ID NO:2182) derived from the coding sequence of SEQ ID NO:2181 shown in FIG. 2181.

[2243] FIG. 2183 shows a nucleotide sequence (SEQ ID NO:2183) of a native sequence PRO81947 cDNA, wherein SEQ ID NO:2183 is a clone designated herein as “DNA325421”.

[2244] FIG. 2184 shows the amino acid sequence (SEQ ID NO:2184) derived from the coding sequence of SEQ ID NO:2183 shown in FIG. 2183.

[2245] FIG. 2185A-B shows a nucleotide sequence (SEQ ID NO:2185) of a native sequence PRO1920 cDNA, wherein SEQ ID NO:2185 is a clone designated herein as “DNA329563”.

[2246] FIG. 2186 shows the amino acid sequence (SEQ ID NO:2186) derived from the coding sequence of SEQ ID NO:2185 shown in FIG. 2185.

[2247] FIG. 2187 shows a nucleotide sequence (SEQ ID NO:2187) of a native sequence PRO85105 cDNA, wherein SEQ ID NO:2187 is a clone designated herein as “DNA329564”.

[2248] FIG. 2188 shows the amino acid sequence (SEQ ID NO:2188) derived from the coding sequence of SEQ ID NO:2187 shown in FIG. 2187.

[2249] FIG. 2189 shows a nucleotide sequence (SEQ ID NO:2189) of a native sequence cDNA, wherein SEQ ID NO:2189 is a clone designated herein as “DNA196002”.

[2250] FIG. 2190A-B shows a nucleotide sequence (SEQ ID NO:2190) of a native sequence PRO84476 cDNA, wherein SEQ ID NO:2190 is a clone designated herein as “DNA328720”.

[2251] FIG. 2191 shows the amino acid sequence (SEQ ID NO:2191) derived from the coding sequence of SEQ ID NO:2190 shown in FIG. 2190.

[2252] FIG. 2192 shows a nucleotide sequence (SEQ ID NO:2192) of a native sequence PRO23880 cDNA, wherein SEQ ID NO:2192 is a clone designated herein as “DNA194522”.

[2253] FIG. 2193 shows the amino acid sequence (SEQ ID NO:2193) derived from the coding sequence of SEQ ID NO:2192 shown in FIG. 2192.

[2254] FIG. 2194 shows a nucleotide sequence (SEQ ID NO:2194) of a native sequence PRO85106 cDNA, wherein SEQ ID NO:2194 is a clone designated herein as “DNA329565”.

[2255] FIG. 2195 shows the amino acid sequence (SEQ ID NO:2195) derived from the coding sequence of SEQ ID NO:2194 shown in FIG. 2194.

[2256] FIG. 2196 shows a nucleotide sequence (SEQ ID NO:2196) of a native sequence PRO85107 cDNA, wherein SEQ ID NO:2196 is a clone designated herein as “DNA329566”.

[2257] FIG. 2197 shows the amino acid sequence (SEQ ID NO:2197) derived from the coding sequence of SEQ ID NO:2196 shown in FIG. 2196.

[2258] FIG. 2198 shows a nucleotide sequence (SEQ ID NO:2198) of a native sequence PRO69876 cDNA, wherein SEQ ID NO:2198 is a clone designated herein as “DNA328288”.

[2259] FIG. 2199 shows the amino acid sequence (SEQ ID NO:2199) derived from the coding sequence of SEQ ID NO:2198 shown in FIG. 2198.

[2260] FIG. 2200 shows a nucleotide sequence (SEQ ID NO:2200) of a native sequence PRO33775 cDNA, wherein SEQ ID NO:2200 is a clone designated herein as “DNA210241”.

[2261] FIG. 2201 shows the amino acid sequence (SEQ ID NO:2201) derived from the coding sequence of SEQ ID NO:2200 shown in FIG. 2200.

[2262] FIG. 2202 shows a nucleotide sequence (SEQ ID NO:2202) of a native sequence cDNA, wherein SEQ ID NO:2202 is a clone designated herein as “DNA33782”.

[2263] FIG. 2203 shows a nucleotide sequence (SEQ ID NO:2203) of a native sequence PRO85109 cDNA, wherein SEQ ID NO:2203 is a clone designated herein as “DNA329568”.

[2264] FIG. 2204 shows the amino acid sequence (SEQ ID NO:2204) derived from the coding sequence of SEQ ID NO:2203 shown in FIG. 2203.

[2265] FIG. 2205 shows a nucleotide sequence (SEQ ID NO:2205) of a native sequence cDNA, wherein SEQ ID NO:2205 is a clone designated herein as “DNA196162”.

[2266] FIG. 2206A-B shows a nucleotide sequence (SEQ ID NO:2206) of a native sequence PRO85110 cDNA, wherein SEQ ID NO:2206 is a clone designated herein as “DNA329569”.

[2267] FIG. 2207 shows the amino acid sequence (SEQ ID NO:2207) derived from the coding sequence of SEQ ID NO:2206 shown in FIG. 2206.

[2268] FIG. 2208 shows a nucleotide sequence (SEQ ID NO:2208) of a native sequence PRO7367 cDNA, wherein SEQ ID NO:2208 is a clone designated herein as “DNA90840”.

[2269] FIG. 2209 shows the amino acid sequence (SEQ ID NO:2209) derived from the coding sequence of SEQ ID NO:2208 shown in FIG. 2208.

[2270] FIG. 2210 shows a nucleotide sequence (SEQ ID NO:2210) of a native sequence cDNA, wherein SEQ ID NO:2210 is a clone designated herein as “DNA329570”.

[2271] FIG. 2211 shows a nucleotide sequence (SEQ ID NO:2211) of a native sequence PRO2391 cDNA, wherein SEQ ID NO:2211 is a clone designated herein as “DNA88516”.

[2272] FIG. 2212 shows the amino acid sequence (SEQ ID NO:2212) derived from the coding sequence of SEQ ID NO:2211 shown in FIG. 2211.

[2273] FIG. 2213 shows a nucleotide sequence (SEQ ID NO:2213) of a native sequence PRO50208 cDNA, wherein SEQ ID NO:2213 is a clone designated herein as “DNA255127”.

[2274] FIG. 2214 shows the amino acid sequence (SEQ ID NO:2214) derived from the coding sequence of SEQ ID NO:2213 shown in FIG. 2213.

[2275] FIG. 2215 shows a nucleotide sequence (SEQ ID NO:2215) of a native sequence PRO50791 cDNA, wherein SEQ ID NO:2215 is a clone designated herein as “DNA255734”.

[2276] FIG. 2216 shows the amino acid sequence (SEQ ID NO:2216) derived from the coding sequence of SEQ ID NO:2215 shown in FIG. 2215.

[2277] FIG. 2217 shows a nucleotide sequence (SEQ ID NO:2217) of a native sequence PRO51662 cDNA, wherein SEQ ID NO:2217 is a clone designated herein as “DNA329571”.

[2278] FIG. 2218 shows the amino acid sequence (SEQ ID NO:2218) derived from the coding sequence of SEQ ID NO:2217 shown in FIG. 2217.

[2279] FIG. 2219 shows a nucleotide sequence (SEQ ID NO:2219) of a native sequence PRO51611 cDNA, wherein SEQ ID NO:2219 is a clone designated herein as “DNA256608”.

[2280] FIG. 2220 shows the amino acid sequence (SEQ ID NO:2220) derived from the coding sequence of SEQ ID NO:2219 shown in FIG. 2219.

[2281] FIG. 2221 shows a nucleotide sequence (SEQ ID NO:2221) of a native sequence PRO85111 cDNA, wherein SEQ ID NO:2221 is a clone designated herein as “DNA329572”.

[2282] FIG. 2222 shows the amino acid sequence (SEQ ID NO:2222) derived from the coding sequence of SEQ ID NO:2221 shown in FIG. 2221.

[2283] FIG. 2223 shows a nucleotide sequence (SEQ ID NO:2223) of a native sequence PRO50241 cDNA, wherein SEQ ID NO:2223 is a clone designated herein as “DNA255161”.

[2284] FIG. 2224 shows the amino acid sequence (SEQ ID NO:2224) derived from the coding sequence of SEQ ID NO:2223 shown in FIG. 2223.

[2285] FIG. 2225 shows a nucleotide sequence (SEQ ID NO:2225) of a native sequence PRO62346 cDNA, wherein SEQ ID NO:2225 is a clone designated herein as “DNA274437”.

[2286] FIG. 2226 shows the amino acid sequence (SEQ ID NO:2226) derived from the coding sequence of SEQ ID NO:2225 shown in FIG. 2225.

[2287] FIG. 2227 shows a nucleotide sequence (SEQ ID NO:2227) of a native sequence PRO49615 cDNA, wherein SEQ ID NO:2227 is a clone designated herein as “DNA254508”.

[2288] FIG. 2228 shows the amino acid sequence (SEQ ID NO:2228) derived from the coding sequence of SEQ ID NO:2227 shown in FIG. 2227.

[2289] FIG. 2229 shows a nucleotide sequence (SEQ ID NO:2229) of a native sequence PRO2386 cDNA, wherein SEQ ID NO:2229 is a clone designated herein as “DNA885 11”.

[2290] FIG. 2230 shows the amino acid sequence (SEQ ID NO:2230) derived from the coding sequence of SEQ ID NO:2229 shown in FIG. 2229.

[2291] FIG. 2231 shows a nucleotide sequence (SEQ ID NO:2231) of a native sequence PRO51556 cDNA, wherein SEQ ID NO:2231 is a clone designated herein as “DNA256521”.

[2292] FIG. 2232 shows the amino acid sequence (SEQ ID NO:2232) derived from the coding sequence of SEQ ID NO:2231 shown in FIG. 2231.

[2293] FIG. 2233 shows a nucleotide sequence (SEQ ID NO:2233) of a native sequence PRO51565 cDNA, wherein SEQ ID NO:2233 is a clone designated herein as “DNA256533”.

[2294] FIG. 2234 shows the amino acid sequence (SEQ ID NO:2234) derived from the coding sequence of SEQ ID NO:2233 shown in FIG. 2233.

[2295] FIG. 2235 shows a nucleotide sequence (SEQ ID NO:2235) of a native sequence PRO85112 cDNA, wherein SEQ ID NO:2235 is a clone designated herein as “DNA329573”.

[2296] FIG. 2236 shows the amino acid sequence (SEQ ID NO:2236) derived from the coding sequence of SEQ ID NO:2235 shown in FIG. 2235.

[2297] FIG. 2237 shows a nucleotide sequence (SEQ ID NO:2237) of a native sequence PRO59409 cDNA, wherein SEQ ID NO:2237 is a clone designated herein as “DNA271085”.

[2298] FIG. 2238 shows the amino acid sequence (SEQ ID NO:2238) derived from the coding sequence of SEQ ID NO:2237 shown in FIG. 2237.

[2299] FIG. 2239 shows a nucleotide sequence (SEQ ID NO:2239) of a native sequence PRO85113 cDNA, wherein SEQ ID NO:2239 is a clone designated herein as “DNA329574”.

[2300] FIG. 2240 shows the amino acid sequence (SEQ ID NO:) derived from the coding sequence of SEQ ID NO: shown in Figure

[2301] FIG. 2241 shows a nucleotide sequence (SEQ ID NO:2241) of a native sequence PRO61403 cDNA, wherein SEQ ID NO:2241 is a clone designated herein as “DNA329575”.

[2302] FIG. 2242 shows the amino acid sequence (SEQ ID NO:2242) derived from the coding sequence of SEQ ID NO:2241 shown in FIG. 2241.

[2303] FIG. 2243 shows a nucleotide sequence (SEQ ID NO:2243) of a native sequence PRO64127 cDNA, wherein SEQ ID NO:2243 is a clone designated herein as “DNA329576”.

[2304] FIG. 2244 shows the amino acid sequence (SEQ ID NO:2244) derived from the coding sequence of SEQ ID NO:2243 shown in FIG. 2243.

[2305] FIG. 2245 shows a nucleotide sequence (SEQ ID NO:2245) of a native sequence PRO61623 cDNA, wherein SEQ ID NO:2245 is a clone designated herein as “DNA273653”.

[2306] FIG. 2246 shows the amino acid sequence (SEQ ID NO:2246) derived from the coding sequence of SEQ ID NO:2245 shown in FIG. 2245.

[2307] FIG. 2247 shows a nucleotide sequence (SEQ ID NO:2247) of a native sequence PRO50191 cDNA, wherein SEQ ID NO:2247 is a clone designated herein as “DNA329577”.

[2308] FIG. 2248 shows the amino acid sequence (SEQ ID NO:2248) derived from the coding sequence of SEQ ID NO:2247 shown in FIG. 2247.

[2309] FIG. 2249 shows a nucleotide sequence (SEQ ID NO:2249) of a native sequence PRO51820 cDNA, wherein SEQ ID NO:2249 is a clone designated herein as “DNA329578”.

[2310] FIG. 2250 shows the amino acid sequence (SEQ ID NO:2250) derived from the coding sequence of SEQ ID NO:2249 shown in FIG. 2249.

[2311] FIG. 2251 shows a nucleotide sequence (SEQ ID NO:2251) of a native sequence PRO69609 cDNA, wherein SEQ ID NO:2251 is a clone designated herein as “DNA329579”.

[2312] FIG. 2252 shows the amino acid sequence (SEQ ID NO:2252) derived from the coding sequence of SEQ ID NO:2251 shown in FIG. 2251.

[2313] FIG. 2253 shows a nucleotide sequence (SEQ ID NO:2253) of a native sequence PRO57311 cDNA, wherein SEQ ID NO:2253 is a clone designated herein as “DNA327927”.

[2314] FIG. 2254 shows the amino acid sequence (SEQ ID NO:2254) derived from the coding sequence of SEQ ID NO:2253 shown in FIG. 2253.

[2315] FIG. 2255 shows a nucleotide sequence (SEQ ID NO:2255) of a native sequence PRO58197 cDNA, wherein SEQ ID NO:2255 is a clone designated herein as “DNA269791”.

[2316] FIG. 2256 shows the amino acid sequence (SEQ ID NO:2256) derived from the coding sequence of SEQ ID NO:2255 shown in FIG. 2255.

[2317] FIG. 2257 shows a nucleotide sequence (SEQ ID NO:2257) of a native sequence PRO85114 cDNA, wherein SEQ ID NO:2257 is a clone designated herein as “DNA329580”.

[2318] FIG. 2258 shows the amino acid sequence (SEQ ID NO:2258) derived from the coding sequence of SEQ ID NO:2257 shown in FIG. 2257.

[2319] FIG. 2259 shows a nucleotide sequence (SEQ ID NO:2259) of a native sequence PRO85115 cDNA, wherein SEQ ID NO:2259 is a clone designated herein as “DNA329581”.

[2320] FIG. 2260 shows the amino acid sequence (SEQ ID NO:2260) derived from the coding sequence of SEQ ID NO:2259 shown in FIG. 2259.

[2321] FIG. 2261 shows a nucleotide sequence (SEQ ID NO:2261) of a native sequence PRO51602 cDNA, wherein SEQ ID NO:2261 is a clone designated herein as “DNA256578”.

[2322] FIG. 2262 shows the amino acid sequence (SEQ ID NO:2262) derived from the coding sequence of SEQ ID NO:2261 shown in FIG. 2261.

[2323] FIG. 2263 shows a nucleotide sequence (SEQ ID NO:2263) of a native sequence PRO49368 cDNA, wherein SEQ ID NO:2263 is a clone designated herein as “DNA254256”.

[2324] FIG. 2264 shows the amino acid sequence (SEQ ID NO:2264) derived from the coding sequence of SEQ ID NO:2263 shown in FIG. 2263.

[2325] FIG. 2265 shows a nucleotide sequence (SEQ ID NO:2265) of a native sequence PRO50216 cDNA, wherein SEQ ID NO:2265 is a clone designated herein as “DNA255135”.

[2326] FIG. 2266 shows the amino acid sequence (SEQ ID NO:2266) derived from the coding sequence of SEQ ID NO:2265 shown in FIG. 2265.

[2327] FIG. 2267 shows a nucleotide sequence (SEQ ID NO:2267) of a native sequence PRO50365 cDNA, wherein SEQ ID NO:2267 is a clone designated herein as “DNA255292”.

[2328] FIG. 2268 shows the amino acid sequence (SEQ ID NO:2268) derived from the coding sequence of SEQ ID NO:2267 shown in FIG. 2267.

[2329] FIG. 2269 shows a nucleotide sequence (SEQ ID NO:2269) of a native sequence PRO85116 cDNA, wherein SEQ ID NO:2269 is a clone designated herein as “DNA329582”.

[2330] FIG. 2270 shows the amino acid sequence (SEQ ID NO:2270) derived from the coding sequence of SEQ ID NO:2269 shown in FIG. 2269.

[2331] FIG. 2271 shows a nucleotide sequence (SEQ ID NO:2271) of a native sequence PRO50544 cDNA, wherein SEQ ID NO:2271 is a clone designated herein as “DNA255477”.

[2332] FIG. 2272 shows the amino acid sequence (SEQ ID NO:2272) derived from the coding sequence of SEQ ID NO:2271 shown in FIG. 2271.

[2333] FIG. 2273 shows a nucleotide sequence (SEQ ID NO:2273) of a native sequence PRO85117 cDNA, wherein SEQ ID NO:2273 is a clone designated herein as “DNA329583”.

[2334] FIG. 2274 shows the amino acid sequence (SEQ ID NO:2274) derived from the coding sequence of SEQ ID NO:2273 shown in FIG. 2273.

[2335] FIG. 2275 shows a nucleotide sequence (SEQ ID NO:2275) of a native sequence PRO85118 cDNA, wherein SEQ ID NO:2275 is a clone designated herein as “DNA329584”.

[2336] FIG. 2276 shows the amino acid sequence (SEQ ID NO:2276) derived from the coding sequence of SEQ ID NO:2275 shown in FIG. 2275.

[2337] FIG. 2277 shows a nucleotide sequence (SEQ ID NO:2277) of a native sequence PRO59911 cDNA, wherein SEQ ID NO:2277 is a clone designated herein as “DNA271624”.

[2338] FIG. 2278 shows the amino acid sequence (SEQ ID NO:2278) derived from the coding sequence of SEQ ID NO:2277 shown in FIG. 2277.

[2339] FIG. 2279 shows a nucleotide sequence (SEQ ID NO:2279) of a native sequence PRO69503 cDNA, wherein SEQ ID NO:2279 is a clone designated herein as “DNA287224”.

[2340] FIG. 2280 shows the amino acid sequence (SEQ ID NO:2280) derived from the coding sequence of SEQ ID NO:2279 shown in FIG. 2279.

[2341] FIG. 2281 shows a nucleotide sequence (SEQ ID NO:2281) of a native sequence PRO59278 cDNA, wherein SEQ ID NO:2281 is a clone designated herein as “DNA270947”.

[2342] FIG. 2282 shows the amino acid sequence (SEQ ID NO:2282) derived from the coding sequence of SEQ ID NO:2281 shown in FIG. 2281.

[2343] FIG. 2283 shows a nucleotide sequence (SEQ ID NO:2283) of a native sequence PRO85119 cDNA, wherein SEQ ID NO:2283 is a clone designated herein as “DNA329585”.

[2344] FIG. 2284 shows the amino acid sequence (SEQ ID NO:2284) derived from the coding sequence of SEQ ID NO:2283 shown in FIG. 2283.

[2345] FIG. 2285 shows a nucleotide sequence (SEQ ID NO:2285) of a native sequence PRO85120 cDNA, wherein SEQ ID NO:2285 is a clone designated herein as “DNA329586”.

[2346] FIG. 2286 shows the amino acid sequence (SEQ ID NO:2286) derived from the coding sequence of SEQ ID NO:2285 shown in FIG. 2285.

[2347] FIG. 2287 shows a nucleotide sequence (SEQ ID NO:2287) of a native sequence PRO51584 cDNA, wherein SEQ ID NO:2287 is a clone designated herein as “DNA256553”.

[2348] FIG. 2288 shows the amino acid sequence (SEQ ID NO:2288) derived from the coding sequence of SEQ ID NO:2287 shown in FIG. 2287.

[2349] FIG. 2289 shows a nucleotide sequence (SEQ ID NO:2289) of a native sequence PRO61504 cDNA, wherein SEQ ID NO:2289 is a clone designated herein as “DNA273523”.

[2350] FIG. 2290 shows the amino acid sequence (SEQ ID NO:2290) derived from the coding sequence of SEQ ID NO:2289 shown in FIG. 2289.

[2351] FIG. 2291 shows a nucleotide sequence (SEQ ID NO:2291) of a native sequence PRO58541 cDNA, wherein SEQ ID NO:2291 is a clone designated herein as “DNA270152”.

[2352] FIG. 2292 shows the amino acid sequence (SEQ ID NO:2292) derived from the coding sequence of SEQ ID NO:2291 shown in FIG. 2291.

[2353] FIG. 2293 shows a nucleotide sequence (SEQ ID NO:2293) of a native sequence PRO85121 cDNA, wherein SEQ ID NO:2293 is a clone designated herein as “DNA329587”.

[2354] FIG. 2294 shows the amino acid sequence (SEQ ID NO:2294) derived from the coding sequence of SEQ ID NO:2293 shown in FIG. 2293

[2355] FIG. 2295 shows a nucleotide sequence (SEQ ID NO:2295) of a native sequence PRO50682 cDNA, wherein SEQ ID NO:2295 is a clone designated herein as “DNA255619”.

[2356] FIG. 2296 shows the amino acid sequence (SEQ ID NO:2296) derived from the coding sequence of SEQ ID NO:2295 shown in FIG. 2295.

[2357] FIG. 2297 shows a nucleotide sequence (SEQ ID NO:2297) of a native sequence PRO85122 cDNA, wherein SEQ ID NO:2297 is a clone designated herein as “DNA329588”.

[2358] FIG. 2298 shows the amino acid sequence (SEQ ID NO:2298) derived from the coding sequence of SEQ ID NO:2297 shown in FIG. 2297

[2359] FIG. 2299 shows a nucleotide sequence (SEQ ID NO:2299) of a native sequence cDNA, wherein SEQ ID NO:2299 is a clone designated herein as “DNA2561 10”.

[2360] FIG. 2300 shows a nucleotide sequence (SEQ ID NO:2300) of a native sequence PRO85123 cDNA, wherein SEQ ID NO:2300 is a clone designated herein as “DNA329589”.

[2361] FIG. 2301 shows the amino acid sequence (SEQ ID NO:2301) derived from the coding sequence of SEQ ID NO:2300 shown in FIG. 2300.

[2362] FIG. 2302A-B shows a nucleotide sequence (SEQ ID NO:2302) of a native sequence PRO84706 cDNA, wherein SEQ ID NO:2302 is a clone designated herein as “DNA329039”.

[2363] FIG. 2303 shows the amino acid sequence (SEQ ID NO:2303) derived from the coding sequence of SEQ ID NO:2302 shown in FIG. 2302.

[2364] FIG. 2304 shows a nucleotide sequence (SEQ ID NO:2304) of a native sequence PRO57996 cDNA, wherein SEQ ID NO:2304 is a clone designated herein as “DNA328509”.

[2365] FIG. 2305 shows the amino acid sequence (SEQ ID NO:2305) derived from the coding sequence of SEQ ID NO:2304 shown in FIG. 2304.

[2366] FIG. 2306 shows a nucleotide sequence (SEQ ID NO:2306) of a native sequence PRO50614 cDNA, wherein SEQ ID NO:2306 is a clone designated herein as “DNA329590”.

[2367] FIG. 2307 shows the amino acid sequence (SEQ ID NO:2307) derived from the coding sequence of SEQ ID NO:2306 shown in FIG. 2306.

[2368] FIG. 2308 shows a nucleotide sequence (SEQ ID NO:2308) of a native sequence cDNA, wherein SEQ ID NO:2308 is a clone designated herein as “DNA329591”.

[2369] FIG. 2309 shows a nucleotide sequence (SEQ ID NO:2309) of a native sequence PRO85124 cDNA, wherein SEQ ID NO:2309 is a clone designated herein as “DNA329592”.

[2370] FIG. 2310 shows the amino acid sequence (SEQ ID NO:2310) derived from the coding sequence of SEQ ID NO:2309 shown in FIG. 2309.

[2371] FIG. 2311 shows a nucleotide sequence (SEQ ID NO:2311) of a native sequence PRO51777 cDNA, wherein SEQ ID NO:2311 is a clone designated herein as “DNA256846”.

[2372] FIG. 2312 shows the amino acid sequence (SEQ ID NO:2312) derived from the coding sequence of SEQ ID NO:2311 shown in FIG. 2311.

[2373] FIG. 2313 shows a nucleotide sequence (SEQ ID NO:2313) of a native sequence PRO85125 cDNA, wherein SEQ ID NO:2313 is a clone designated herein as “DNA329593”.

[2374] FIG. 2314 shows the amino acid sequence (SEQ ID NO:2314) derived from the coding sequence of SEQ ID NO:2313 shown in FIG. 2313.

[2375] FIG. 2315 shows a nucleotide sequence (SEQ ID NO:2315) of a native sequence PRO50261 cDNA, wherein SEQ ID NO:2315 is a clone designated herein as “DNA255181”.

[2376] FIG. 2316 shows the amino acid sequence (SEQ ID NO:2316) derived from the coding sequence of SEQ ID NO:2315 shown in FIG. 2315.

[2377] FIG. 2317 shows a nucleotide sequence (SEQ ID NO:2317) of a native sequence cDNA, wherein SEQ ID NO:2317 is a clone designated herein as “DNA329594”.

[2378] FIG. 2318 shows a nucleotide sequence (SEQ ID NO:2318) of a native sequence PRO85127 cDNA, wherein SEQ ID NO:2318 is a clone designated herein as “DNA329595”.

[2379] FIG. 2319 shows the amino acid sequence (SEQ ID NO:2319) derived from the coding sequence of SEQ ID NO:2318 shown in FIG. 2318.

[2380] FIG. 2320A-B shows a nucleotide sequence (SEQ ID NO:2320) of a native sequence PRO85128 cDNA, wherein SEQ ID NO:2320 is a clone designated herein as “DNA329596”.

[2381] FIG. 2321 shows the amino acid sequence (SEQ ID NO:2321) derived from the coding sequence of SEQ ID NO:2320 shown in FIG. 2320.

[2382] FIG. 2322 shows a nucleotide sequence (SEQ ID NO:2322) of a native sequence PRO85129 cDNA, wherein SEQ ID NO:2322 is a clone designated herein as “DNA329597”.

[2383] FIG. 2323 shows the amino acid sequence (SEQ ID NO:2323) derived from the coding sequence of SEQ ID NO:2322 shown in FIG. 2322.

[2384] FIG. 2324 shows a nucleotide sequence (SEQ ID NO:2324) of a native sequence PRO23253 cDNA, wherein SEQ ID NO:2324 is a clone designated herein as “DNA329078”.

[2385] FIG. 2325 shows the amino acid sequence (SEQ ID NO:2325) derived from the coding sequence of SEQ ID NO:2324 shown in FIG. 2324.

[2386] FIG. 2326 shows a nucleotide sequence (SEQ ID NO:2326) of a native sequence PRO85130 cDNA, wherein SEQ ID NO:2326 is a clone designated herein as “DNA329598”.

[2387] FIG. 2327 shows the amino acid sequence (SEQ ID NO:2327) derived from the coding sequence of SEQ ID NO:2326 shown in FIG. 2326.

[2388] FIG. 2328 shows a nucleotide sequence (SEQ ID NO:2328) of a native sequence PRO60456 cDNA, wherein SEQ ID NO:2328 is a clone designated herein as “DNA272191”.

[2389] FIG. 2329 shows the amino acid sequence (SEQ ID NO:2329) derived from the coding sequence of SEQ ID NO:2328 shown in FIG. 2328.

[2390] FIG. 2330A-B shows a nucleotide sequence (SEQ ID NO:2330) of a native sequence PRO85131 cDNA, wherein SEQ ID NO:2330 is a clone designated herein as “DNA329599”.

[2391] FIG. 2331 shows the amino acid sequence (SEQ ID NO:2331) derived from the coding sequence of SEQ ID NO:2230 shown in FIG. 2230.

[2392] FIG. 2332 shows a nucleotide sequence (SEQ ID NO:2332) of a native sequence PRO81261 cDNA, wherein SEQ ID NO:2332 is a clone designated herein as “DNA324612”.

[2393] FIG. 2333 shows the amino acid sequence (SEQ ID NO:2333) derived from the coding sequence of SEQ ID NO:2332 shown in FIG. 2332

[2394] FIG. 2334 shows a nucleotide sequence (SEQ ID NO:2334) of a native sequence PRO59570 cDNA, wherein SEQ ID NO:2334 is a clone designated herein as “DNA329600”.

[2395] FIG. 2335 shows the amino acid sequence (SEQ ID NO:2335) derived from the coding sequence of SEQ ID NO:2334 shown in FIG. 2334.

[2396] FIG. 2336A-B shows a nucleotide sequence (SEQ ID NO:2336) of a native sequence PRO50357 cDNA, wherein SEQ ID NO:2336 is a clone designated herein as “DNA255281”.

[2397] FIG. 2337 shows the amino acid sequence (SEQ ID NO:2337) derived from the coding sequence of SEQ ID NO:2336 shown in FIG. 2336.

[2398] FIG. 2338 shows a nucleotide sequence (SEQ ID NO:2338) of a native sequence PRO58933 cDNA, wherein SEQ ID NO:2338 is a clone designated herein as “DNA270558”.

[2399] FIG. 2339 shows the amino acid sequence (SEQ ID NO:2339) derived from the coding sequence of SEQ ID NO:2338 shown in FIG. 2338.

[2400] FIG. 2340 shows a nucleotide sequence (SEQ ID NO:2340) of a native sequence PRO82373 cDNA, wherein SEQ ID NO:2340 is a clone designated herein as “DNA325920”.

[2401] FIG. 2341 shows the amino acid sequence (SEQ ID NO:2341) derived from the coding sequence of SEQ ID NO:2340 shown in FIG. 2340.

[2402] FIG. 2342 shows a nucleotide sequence (SEQ ID NO:2342) of a native sequence PRO58993 cDNA, wherein SEQ ID NO:2342 is a clone designated herein as “DNA324690”.

[2403] FIG. 2343 shows the amino acid sequence (SEQ ID NO:2343) derived from the coding sequence of SEQ ID NO:2342 shown in FIG. 2342.

[2404] FIG. 2344 shows a nucleotide sequence (SEQ ID NO:2344) of a native sequence PRO57930 cDNA, wherein SEQ ID NO:2344 is a clone designated herein as “DNA269514”.

[2405] FIG. 2345 shows the amino acid sequence (SEQ ID NO:2345) derived from the coding sequence of SEQ ID NO:2344 shown in FIG. 2344.

[2406] FIG. 2346 shows a nucleotide sequence (SEQ ID NO:2346) of a native sequence PRO85132 cDNA, wherein SEQ ID NO:2346 is a clone designated herein as “DNA329601”.

[2407] FIG. 2347 shows the amino acid sequence (SEQ ID NO:2347) derived from the coding sequence of SEQ ID NO:2346 shown in FIG. 2346.

[2408] FIG. 2348 shows a nucleotide sequence (SEQ ID NO:2348) of a native sequence PRO49288 cDNA, wherein SEQ ID NO:2348 is a clone designated herein as “DNA254175”.

[2409] FIG. 2349 shows the amino acid sequence (SEQ ID NO:2349) derived from the coding sequence of SEQ ID NO:2348 shown in FIG. 2348.

[2410] FIG. 2350 shows a nucleotide sequence (SEQ ID NO:2350) of a native sequence PRO58175 cDNA, wherein SEQ ID NO:2350 is a clone designated herein as “DNA269766”.

[2411] FIG. 2351 shows the amino acid sequence (SEQ ID NO:2351) derived from the coding sequence of SEQ ID NO:2350 shown in FIG. 2350.

[2412] FIG. 2352 shows a nucleotide sequence (SEQ ID NO:2352) of a native sequence PRO85133 cDNA, wherein SEQ ID NO:2352 is a clone designated herein as “DNA329602”.

[2413] FIG. 2353 shows the amino acid sequence (SEQ ID NO:2353) derived from the coding sequence of SEQ ID NO:2352 shown in FIG. 2352.

[2414] FIG. 2354A-B shows a nucleotide sequence (SEQ ID NO:2354) of a native sequence PRO59246 cDNA, wherein SEQ ID NO:2354 is a clone designated herein as “DNA329603”.

[2415] FIG. 2355 shows the amino acid sequence (SEQ ID NO:2355) derived from the coding sequence of SEQ ID NO:2354 shown in FIG. 2354.

[2416] FIG. 2356 shows a nucleotide sequence (SEQ ID NO:2356) of a native sequence PRO85134 cDNA, wherein SEQ ID NO:2356 is a clone designated herein as “DNA329604”.

[2417] FIG. 2357 shows the amino acid sequence (SEQ ID NO:2357) derived from the coding sequence of SEQ ID NO:2356 shown in FIG. 2356.

[2418] FIG. 2358 shows a nucleotide sequence (SEQ ID NO:2358) of a native sequence PRO85135 cDNA, wherein SEQ ID NO:2358 is a clone designated herein as “DNA329605”.

[2419] FIG. 2359 shows the amino acid sequence (SEQ ID NO:2359) derived from the coding sequence of SEQ ID NO:2358 shown in FIG. 2358.

[2420] FIG. 2360 shows a nucleotide sequence (SEQ ID NO:2360) of a native sequence PRO58219 cDNA, wherein SEQ ID NO:2360 is a clone designated herein as “DNA269816”.

[2421] FIG. 2361 shows the amino acid sequence (SEQ ID NO:2361) derived from the coding sequence of SEQ ID NO:2360 shown in FIG. 2360.

[2422] FIG. 2362 shows a nucleotide sequence (SEQ ID NO:2362) of a native sequence PRO58754 cDNA, wherein SEQ ID NO:2362 is a clone designated herein as “DNA270369”.

[2423] FIG. 2363 shows the amino acid sequence (SEQ ID NO:2363) derived from the coding sequence of SEQ ID NO:2362 shown in FIG. 2362.

[2424] FIG. 2364 shows a nucleotide sequence (SEQ ID NO:2364) of a native sequence PRO85136 cDNA, wherein SEQ ID NO:2364 is a clone designated herein as “DNA329606”.

[2425] FIG. 2365 shows the amino acid sequence (SEQ ID NO:2365) derived from the coding sequence of SEQ ID NO:2364 shown in FIG. 2364.

[2426] FIG. 2366 shows a nucleotide sequence (SEQ ID NO:2366) of a native sequence PRO81893 cDNA, wherein SEQ ID NO:2366 is a clone designated herein as “DNA325355”.

[2427] FIG. 2367 shows the amino acid sequence (SEQ ID NO:2367) derived from the coding sequence of SEQ ID NO:2366 shown in FIG. 2366.

[2428] FIG. 2368 shows a nucleotide sequence (SEQ ID NO:2368) of a native sequence PRO85137 cDNA, wherein SEQ ID NO:2368 is a clone designated herein as “DNA329607”.

[2429] FIG. 2369 shows the amino acid sequence (SEQ ID NO:2369) derived from the coding sequence of SEQ ID NO:2368 shown in FIG. 2368.

[2430] FIG. 2370 shows a nucleotide sequence (SEQ ID NO:2370) of a native sequence PRO70699 cDNA, wherein SEQ ID NO:2370 is a clone designated herein as “DNA293243”.

[2431] FIG. 2371 shows the amino acid sequence (SEQ ID NO:2371) derived from the coding sequence of SEQ ID NO:2370 shown in FIG. 2370.

[2432] FIG. 2372 shows a nucleotide sequence (SEQ ID NO:2372) of a native sequence PRO2388 cDNA, wherein SEQ ID NO:2372 is a clone designated herein as “DNA88513”.

[2433] FIG. 2373 shows the amino acid sequence (SEQ ID NO:2373) derived from the coding sequence of SEQ ID NO:2372 shown in FIG. 2372.

[2434] FIG. 2374 shows a nucleotide sequence (SEQ ID NO:2374) of a native sequence PRO85138 cDNA, wherein SEQ ID NO:2374 is a clone designated herein as “DNA329608”.

[2435] FIG. 2375 shows the amino acid sequence (SEQ ID NO:2375) derived from the coding sequence of SEQ ID NO:2374 shown in FIG. 2374.

[2436] FIG. 2376A-B shows a nucleotide sequence (SEQ ID NO:2376) of a native sequence cDNA, wherein SEQ ID NO:2376 is a clone designated herein as “DNA329051”.

[2437] FIG. 2377 shows a nucleotide sequence (SEQ ID NO:2377) of a native sequence PRO85139 cDNA, wherein SEQ ID NO:2377 is a clone designated herein as “DNA329609”.

[2438] FIG. 2378 shows the amino acid sequence (SEQ ID NO:2378) derived from the coding sequence of SEQ ID NO:2378 shown in Figure

[2439] FIG. 2379 shows a nucleotide sequence (SEQ ID NO:2379) of a native sequence PRO84183 cDNA, wherein SEQ ID NO:2379 is a clone designated herein as “DNA328315”.

[2440] FIG. 2380 shows the amino acid sequence (SEQ ID NO:2380) derived from the coding sequence of SEQ ID NO:2379 shown in FIG. 2379.

[2441] FIG. 2381 shows a nucleotide sequence (SEQ ID NO:2381) of a native sequence cDNA, herein SEQ ID NO:2381 is a clone designated herein as “DNA329610”.

[2442] FIG. 2382 shows a nucleotide sequence (SEQ ID NO:2382) of a native sequence PRO85141 cDNA, wherein SEQ ID NO:2382 is a clone designated herein as “DNA329611”.

[2443] FIG. 2383 shows the amino acid sequence (SEQ ID NO:2383) derived from the coding sequence of SEQ ID NO:2382 shown in FIG. 2382.

[2444] FIG. 2384 shows a nucleotide sequence (SEQ ID NO:2384) of a native sequence cDNA, wherein SEQ ID NO:2384 is a clone designated herein as “DNA256198”.

[2445] FIG. 2385 shows a nucleotide sequence (SEQ ID NO:2385) of a native sequence PRO85142 cDNA, wherein SEQ ID NO:2385 is a clone designated herein as “DNA329612”.

[2446] FIG. 2386 shows the amino acid sequence (SEQ ID NO:2386) derived from the coding sequence of SEQ ID NO:2385 shown in FIG. 2385.

[2447] FIG. 2387 shows a nucleotide sequence (SEQ ID NO:2387) of a native sequence PRO85143 cDNA, wherein SEQ ID NO:2387 is a clone designated herein as “DNA329613”.

[2448] FIG. 2388 shows the amino acid sequence (SEQ ID NO:2388) derived from the coding sequence of SEQ ID NO:2387 shown in FIG. 2387.

[2449] FIG. 2389 shows a nucleotide sequence (SEQ ID NO:2389) of a native sequence cDNA, wherein SEQ ID NO:2389 is a clone designated herein as “DNA329614”.

[2450] FIG. 2390 shows a nucleotide sequence (SEQ ID NO:2390) of a native sequence PRO50379 cDNA, wherein SEQ ID NO:2390 is a clone designated herein as “DNA255306”.

[2451] FIG. 2391 shows the amino acid sequence (SEQ ID NO:2391) derived from the coding sequence of SEQ ID NO:2390 shown in FIG. 2390.

[2452] FIG. 2392 shows a nucleotide sequence (SEQ ID NO:2392) of a native sequence PRO70559 cDNA, wherein SEQ ID NO:2392 is a clone designated herein as “DNA290812”.

[2453] FIG. 2393 shows the amino acid sequence (SEQ ID NO:2393) derived from the coding sequence of SEQ ID NO:2392 shown in FIG. 2392.

[2454] FIG. 2394 shows a nucleotide sequence (SEQ ID NO:2394) of a native sequence cDNA, wherein SEQ ID NO:2394 is a clone designated herein as “DNA256085”.

[2455] FIG. 2395A-B shows a nucleotide sequence (SEQ ID NO:2395) of a native sequence PRO84584 cDNA, wherein SEQ ID NO:2395 is a clone designated herein as “DNA328853”.

[2456] FIG. 2396 shows the amino acid sequence (SEQ ID NO:2396) derived from the coding sequence of SEQ ID NO:2395 shown in FIG. 2395.

[2457] FIG. 2397 shows a nucleotide sequence (SEQ ID NO:2397) of a native sequence PRO85144 cDNA, wherein SEQ ID NO:2397 is a clone designated herein as “DNA329615”.

[2458] FIG. 2398 shows the amino acid sequence (SEQ ID NO:2398) derived from the coding sequence of SEQ ID NO:2397 shown in FIG. 2397.

[2459] FIG. 2399 shows a nucleotide sequence (SEQ ID NO:2399) of a native sequence cDNA, wherein SEQ ID NO:2399 is a clone designated herein as “DNA329616”.

[2460] FIG. 2400 shows a nucleotide sequence (SEQ ID NO:2400) of a native sequence cDNA, wherein SEQ ID NO:2400 is a clone designated herein as “DNA257960”.

[2461] FIG. 2401 shows a nucleotide sequence (SEQ ID NO:2401) of a native sequence PRO85146 cDNA, wherein SEQ ID NO:2401 is a clone designated herein as “DNA329617”.

[2462] FIG. 2402 shows the amino acid sequence (SEQ ID NO:2402) derived from the coding sequence of SEQ ID NO:2401 shown in FIG. 2401.

[2463] FIG. 2403 shows a nucleotide sequence (SEQ ID NO:2403) of a native sequence PRO52682 cDNA, wherein SEQ ID NO:2403 is a clone designated herein as “DNA258747”.

[2464] FIG. 2404 shows the amino acid sequence (SEQ ID NO:2404) derived from the coding sequence of SEQ ID NO:2403 shown in FIG. 2403.

[2465] FIG. 2405 shows a nucleotide sequence (SEQ ID NO:2405) of a native sequence cDNA, wherein SEQ ID NO:2405 is a clone designated herein as “DNA258793”.

[2466] FIG. 2406 shows a nucleotide sequence (SEQ ID NO:2406) of a native sequence cDNA, wherein SEQ ID NO:2406 is a clone designated herein as “DNA258683”.

[2467] FIG. 2407 shows a nucleotide sequence (SEQ ID NO:2407) of a native sequence PRO85147 cDNA, wherein SEQ ID NO:2407 is a clone designated herein as “DNA329618”.

[2468] FIG. 2408 shows the amino acid sequence (SEQ ID NO:2408) derived from the coding sequence of SEQ ID NO:2407 shown in FIG. 2407.

[2469] FIG. 2409 shows a nucleotide sequence (SEQ ID NO:2409) of a native sequence PRO85148 cDNA, wherein SEQ ID NO:2409 is a clone designated herein as “DNA329619”.

[2470] FIG. 2410 shows the amino acid sequence (SEQ ID NO:2410) derived from the coding sequence of SEQ ID NO:2409 shown in FIG. 2409.

[2471] FIG. 2411 shows a nucleotide sequence (SEQ ID NO:2411) of a native sequence PRO85149 cDNA, wherein SEQ ID NO:2411 is a clone designated herein as “DNA329620”.

[2472] FIG. 2412 shows the amino acid sequence (SEQ ID NO:2412) derived from the coding sequence of SEQ ID NO:2411 shown in FIG. 2411.

[2473] FIG. 2413 shows a nucleotide sequence (SEQ ID NO:2413) of a native sequence cDNA, wherein SEQ ID NO:2413 is a clone designated herein as “DNA258763”.

[2474] FIG. 2414 shows a nucleotide sequence (SEQ ID NO:2414) of a native sequence PRO85150 cDNA, wherein SEQ ID NO:2414 is a clone designated herein as “DNA329621”.

[2475] FIG. 2415 shows the amino acid sequence (SEQ ID NO:2415) derived from the coding sequence of SEQ ID NO:2414 shown in FIG. 2414.

[2476] FIG. 2416 shows a nucleotide sequence (SEQ ID NO:2416) of a native sequence cDNA, wherein SEQ ID NO:2416 is a clone designated herein as “DNA259435”.

[2477] FIG. 2417 shows a nucleotide sequence (SEQ ID NO:2417) of a native sequence PRO53966 cDNA, wherein SEQ ID NO:2417 is a clone designated herein as “DNA260036”.

[2478] FIG. 2418 shows the amino acid sequence (SEQ ID NO:2418) derived from the coding sequence of SEQ ID NO:2417 shown in FIG. 2417.

[2479] FIG. 2419 shows a nucleotide sequence (SEQ ID NO:2419) of a native sequence PRO85151 cDNA, wherein SEQ ID NO:2419 is a clone designated herein as “DNA329622”.

[2480] FIG. 2420 shows the amino acid sequence (SEQ ID NO:2420) derived from the coding sequence of SEQ ID NO:2419 shown in FIG. 2419.

[2481] FIG. 2421 shows a nucleotide sequence (SEQ ID NO:2421) of a native sequence PRO85152 cDNA, wherein SEQ ID NO:2421 is a clone designated herein as “DNA329623”.

[2482] FIG. 2422 shows the amino acid sequence (SEQ ID NO:2422) derived from the coding sequence of SEQ ID NO:2421 shown in FIG. 2421.

[2483] FIG. 2423 shows a nucleotide sequence (SEQ ID NO:2423) of a native sequence PRO85153 cDNA, wherein SEQ ID NO:2423 is a clone designated herein as “DNA329624”.

[2484] FIG. 2424 shows the amino acid sequence (SEQ ID NO:2424) derived from the coding sequence of SEQ ID NO:2423 shown in FIG. 2423.

[2485] FIG. 2425 shows a nucleotide sequence (SEQ ID NO:2425) of a native sequence PRO85154 cDNA, wherein SEQ ID NO:2425 is a clone designated herein as “DNA329625”.

[2486] FIG. 2426 shows the amino acid sequence (SEQ ID NO:2426) derived from the coding sequence of SEQ ID NO:2424 shown in FIG. 2425.

[2487] FIG. 2427 shows a nucleotide sequence (SEQ ID NO:2427) of a native sequence cDNA, wherein SEQ ID NO:2427 is a clone designated herein as “DNA258637”.

[2488] FIG. 2428 shows a nucleotide sequence (SEQ ID NO:2428) of a native sequence cDNA, wherein SEQ ID NO:2428 is a clone designated herein as “DNA262810”.

[2489] FIG. 2429 shows a nucleotide sequence (SEQ ID NO:2429) of a native sequence PRO51901 cDNA, wherein SEQ ID NO:2429 is a clone designated herein as “DNA257309”.

[2490] FIG. 2430 shows the amino acid sequence (SEQ ID NO:2430) derived from the coding sequence of SEQ ID NO:2429 shown in FIG. 2429.

[2491] FIG. 2431 shows a nucleotide sequence (SEQ ID NO:2431) of a native sequence PRO85155 cDNA, wherein SEQ ID NO:2431 is a clone designated herein as “DNA329626”.

[2492] FIG. 2432 shows the amino acid sequence (SEQ ID NO:2432) derived from the coding sequence of SEQ ID NO:2431 shown in FIG. 2431.

[2493] FIG. 2433 shows a nucleotide sequence (SEQ ID NO:2433) of a native sequence PRO85156 cDNA, wherein SEQ ID NO:2433 is a clone designated herein as “DNA329627”.

[2494] FIG. 2434 shows the amino acid sequence (SEQ ID NO:2434) derived from the coding sequence of SEQ ID NO:2433 shown in FIG. 2433.

[2495] FIG. 2435 shows a nucleotide sequence (SEQ ID NO:2435) of a native sequence PRO53004 cDNA, wherein SEQ ID NO:2435 is a clone designated herein as “DNA259071”.

[2496] FIG. 2436 shows the amino acid sequence (SEQ ID NO:2436) derived from the coding sequence of SEQ ID NO:2435 shown in FIG. 2435.

[2497] FIG. 2437 shows a nucleotide sequence (SEQ ID NO:2437) of a native sequence PRO85157 cDNA, wherein SEQ ID NO:2437 is a clone designated herein as “DNA329628”.

[2498] FIG. 2438 shows the amino acid sequence (SEQ ID NO:2438) derived from the coding sequence of SEQ ID NO:2437 shown in FIG. 2437.

[2499] FIG. 2439 shows a nucleotide sequence (SEQ ID NO:2439) of a native sequence PRO85158 cDNA, wherein SEQ ID NO:2439 is a clone designated herein as “DNA329629”.

[2500] FIG. 2440 shows the amino acid sequence (SEQ ID NO:2440) derived from the coding sequence of SEQ ID NO:2439 shown in FIG. 2439.

[2501] FIG. 2441 shows a nucleotide sequence (SEQ ID NO:2441) of a native sequence PRO52822 cDNA, wherein SEQ ID NO:2441 is a clone designated herein as “DNA258889”.

[2502] FIG. 2442 shows the amino acid sequence (SEQ ID NO:2442) derived from the coding sequence of SEQ ID NO:2441 shown in FIG. 2441.

### DETAILED DESCRIPTION OF THE PREFERRED EMBODIMENTS

I. Definitions

[2503] The terms “PRO polypeptide” and “PRO” as used herein and when immediately followed by a numerical designation refer to various polypeptides, wherein the complete designation (i.e., PRO/number) refers to specific polypeptide sequences as described herein. The terms “PRO/number polypeptide” and “PRO/number” wherein the term “number” is provided as an actual numerical designation as used herein encompass native sequence polypeptides and polypeptide variants (which are further defined herein). The PRO polypeptides described herein may be isolated from a variety of sources, such as from human tissue types or from another source, or prepared by recombinant or synthetic methods. The term “PRO polypeptide” refers to each individual PRO/number polypeptide disclosed herein. All disclosures in this specification which refer to the “PRO polypeptide” refer to each of the polypeptides individually as well as jointly. For example, descriptions of the preparation of, purification of, derivation of, formation of antibodies to or against, administration of, compositions containing, treatment of a disease with, etc., pertain to each polypeptide of the invention individually. The term “PRO polypeptide” also includes variants of the PRO/number polypeptides disclosed herein.

[2504] A “native sequence PRO polypeptide” comprises a polypeptide having the same amino acid sequence as the corresponding PRO polypeptide derived from nature. Such native sequence PRO polypeptides can be isolated from nature or can be produced by recombinant or synthetic means. The term “native sequence PRO polypeptide” specifically encompasses naturally-occurring truncated or secreted forms of the specific PRO polypeptide (e.g., an extracellular domain sequence), naturally-occurring variant forms (e.g., alternatively spliced forms) and naturally-occurring allelic variants of the polypeptide. In various embodiments of the invention, the native sequence PRO polypeptides disclosed herein are mature or full-length native sequence polypeptides comprising the full-length amino acids sequences shown in the accompanying figures. Start and stop codons are shown in bold font and underlined in the figures. However, while the PRO polypeptide disclosed in the accompanying figures are shown to begin with methionine residues designated herein as amino acid position 1 in the figures, it is conceivable and possible that other methionine residues located either upstream or downstream from the amino acid position 1 in the figures may be employed as the starting amino acid residue for the PRO polypeptides.

[2505] The PRO polypeptide “extracellular domain” or “ECD” refers to a form of the PRO polypeptide which is essentially free of the transmembrane and cytoplasmic domains. Ordinarily, a PRO polypeptide ECD will have less than 1% of such transmembrane and/or cytoplasmic domains and preferably, will have less than 0.5% of such domains. It will be understood that any transmembrane domains identified for the PRO polypeptides of the present invention are identified pursuant to criteria routinely employed in the art for identifying that type of hydrophobic domain. The exact boundaries of a transmembrane domain may vary but most likely by no more than about 5 amino acids at either end of the domain as initially identified herein. Optionally, therefore, an extracellular domain of a PRO polypeptide may contain from about 5 or fewer amino acids on either side of the transmembrane domain/extracellular domain boundary as identified in the Examples or specification and such polypeptides, with or without the associated signal peptide, and nucleic acid encoding them, are contemplated by the present invention.

[2506] The approximate location of the “signal peptides” of the various PRO polypeptides disclosed herein are shown in the present specification and/or the accompanying figures. It is noted, however, that the C-terminal boundary of a signal peptide may vary, but most likely by no more than about 5 amino acids on either side of the signal peptide C-terminal boundary as initially identified herein, wherein the C-terminal boundary of the signal peptide may be identified pursuant to criteria routinely employed in the art for identifying that type of amino acid sequence element (e.g., Nielsen et al., Prot. Eng. 10: 1-6 (1997) and von Heinje et al., Nucl. Acids. Res. 14:4683-4690 (1986)). Moreover, it is also recognized that, in some cases, cleavage of a signal sequence from a secreted polypeptide is not entirely uniform, resulting in more than one secreted species. These mature polypeptides, where the signal peptide is cleaved within no more than about 5 amino acids on either side of the C-terminal boundary of the signal peptide as identified herein, and the polynucleotides encoding them, are contemplated by the present invention.

[2507] “PRO polypeptide variant” means an active PRO polypeptide as defined above or below having at least about 80% amino acid sequence identity with a full-length native sequence PRO polypeptide sequence as disclosed herein, a PRO polypeptide sequence lacking the signal peptide as disclosed herein, an extracellular domain of a PRO polypeptide, with or without the signal peptide, as disclosed herein or any other fragment of a full-length PRO polypeptide sequence as disclosed herein. Such PRO polypeptide variants include, for instance, PRO polypeptides wherein one or more amino acid residues are added, or deleted, at the N- or C-terminus of the full-length native amino acid sequence. Ordinarily, a PRO polypeptide variant will have at least about 80% amino acid sequence identity, alternatively at least about 81% amino acid sequence identity, alternatively at least about 82% amino acid sequence identity, alternatively at least about 83% amino acid sequence identity, alternatively at least about 84% amino acid sequence identity, alternatively at least about 85% amino acid sequence identity, alternatively at least about 86% amino acid sequence identity, alternatively at least about 87% amino acid sequence identity, alternatively at least about 88% amino acid sequence identity, alternatively at least about 89% amino acid sequence identity, alternatively at least about 90% amino acid sequence identity, alternatively at least about 91% amino acid sequence identity, alternatively at least about 92% amino acid sequence identity, alternatively at least about 93% amino acid sequence identity, alternatively at least about 94% amino acid sequence identity, alternatively at least about 95% amino acid sequence identity, alternatively at least about 96% amino acid sequence identity, alternatively at least about 97% amino acid sequence identity, alternatively at least about 98% amino acid sequence identity and alternatively at least about 99% amino acid sequence identity to a full-length native sequence PRO polypeptide sequence as disclosed herein, a PRO polypeptide sequence lacking the signal peptide as disclosed herein, an extracellular domain of a PRO polypeptide, with or without the signal peptide, as disclosed herein or any other specifically defined fragment of a full-length PRO polypeptide sequence as disclosed herein. Ordinarily, PRO variant polypeptides are at least about 10 amino acids in length, alternatively at least about 20 amino acids in length, alternatively at least about 30 amino acids in length, alternatively at least about 40 amino acids in length, alternatively at least about 50 amino acids in length, alternatively at least about 60 amino acids in length, alternatively at least about 70 amino acids in length, alternatively at least about 80 amino acids in length, alternatively at least about 90 amino acids in length, alternatively at least about 100 amino acids in length, alternatively at least about 150 amino acids in length, alternatively at least about 200 amino acids in length, alternatively at least about 300 amino acids in length, or more.

[2508] “Percent (%) amino acid sequence identity” with respect to the PRO polypeptide sequences identified herein is defined as the percentage of amino acid residues in a candidate sequence that are identical with the amino acid residues in the specific PRO polypeptide sequence, after aligning the sequences and introducing gaps, if necessary, to achieve the maximum percent sequence identity, and not considering any conservative substitutions as part of the sequence identity. Alignment for purposes of determining percent amino acid sequence identity can be achieved in various ways that are within the skill in the art, for instance, using publicly available computer software such as BLAST, BLAST-2, ALIGN or Megalign (DNASTAR) software. Those skilled in the art can determine appropriate parameters for measuring alignment, including any algorithms needed to achieve maximal alignment over the full length of the sequences being compared. For purposes herein, however, % amino acid sequence identity values are generated using the sequence comparison computer program ALIGN-2, wherein the complete source code for the ALIGN-2 program is provided in Table 1 below. The ALIGN-2 sequence comparison computer program was authored by Genentech, Inc. and the source code shown in Table 1 below has been filed with user documentation in the U.S. Copyright Office, Washington D.C., 20559, where it is registered under U.S. Copyright Registration No. TXU510087. The ALIGN-2 program is publicly available through Genentech, Inc., South San Francisco, Calif. or may be compiled from the source code provided in Table 1 below. The ALIGN-2 program should be compiled for use on a UNIX operating system, preferably digital UNIX V4.0D. All sequence comparison parameters are set by the ALIGN-2 program and do not vary.

[2509] In situations where ALIGN-2 is employed for amino acid sequence comparisons, the % amino acid sequence identity of a given amino acid sequence A to, with, or against a given amino acid sequence B (which can alternatively be phrased as a given amino acid sequence A that has or comprises a certain % amino acid sequence identity to, with, or against a given amino acid sequence B) is calculated as follows:
100 times the fraction X/Y
where X is the number of amino acid residues scored as identical matches by the sequence alignment program ALIGN-2 in that program's alignment of A and B, and where Y is the total number of amino acid residues in B. It will be appreciated that where the length of amino acid sequence A is not equal to the length of amino acid sequence B, the % amino acid sequence identity of A to B will not equal the % amino acid sequence identity of B to A. As examples of % amino acid sequence identity calculations using this method, Tables 2 and 3 demonstrate how to calculate the % amino acid sequence identity of the amino acid sequence designated “Comparison Protein” to the amino acid sequence designated “PRO”, wherein “PRO” represents the amino acid sequence of a hypothetical PRO polypeptide of interest, “Comparison Protein” represents the amino acid sequence of a polypeptide against which the “PRO” polypeptide of interest is being compared, and “X, “Y” and “Z” each represent different hypothetical amino acid residues.

[2510] Unless specifically stated otherwise, all % amino acid sequence identity values used herein are obtained as described in the immediately preceding paragraph using the ALIGN-2 computer program. However, % amino acid sequence identity values may also be obtained as described below by using the WU-BLAST-2 computer program (Altschul et al., Methods in Enzymology 266:460-480 (1996)). Most of the WU-BLAST-2 search parameters are set to the default values. Those not set to default values, i.e., the adjustable parameters, are set with the following values: overlap span=1, overlap fraction=0.125, word threshold (T)=11, and scoring matrix=BLOSUM62. When WU-BLAST-2 is employed, a % amino acid sequence identity value is determined by dividing (a) the number of matching identical amino acid residues between the amino acid sequence of the PRO polypeptide of interest having a sequence derived from the native PRO polypeptide and the comparison amino acid sequence of interest (i.e., the sequence against which the PRO polypeptide of interest is being compared which may be a PRO variant polypeptide) as determined by WU-BLAST-2 by (b) the total number of amino acid residues of the PRO polypeptide of interest. For example, in the statement “a polypeptide comprising an the amino acid sequence A which has or having at least 80% amino acid sequence identity to the amino acid sequence B”, the amino acid sequence A is the comparison amino acid sequence of interest and the amino acid sequence B is the amino acid sequence of the PRO polypeptide of interest.

[2511] Percent amino acid sequence identity may also be determined using the sequence comparison program NCBI-BLAST2 (Altschul et al., Nucleic Acids Res. 25:3389-3402 (1997)). The NCBI-BLAST2 sequence comparison program may be downloaded from http://www.ncbi.nlm.nih.gov or otherwise obtained from the National Institute of Health, Bethesda, Md. NCBI-BLAST2 uses several search parameters, wherein all of those search parameters are set to default values including, for example, unmask=yes, strand=all, expected occurrences=10, minimum low complexity length=15/5, multi-pass e-value=0.01, constant for multi-pass=25, dropoff for final gapped alignment=25 and scoring matrix=BLOSUM62.

[2512] In situations where NCBI-BLAST2 is employed for amino acid sequence comparisons, the % amino acid sequence identity of a given amino acid sequence A to, with, or against a given amino acid sequence B (which can alternatively be phrased as a given amino acid sequence A that has or comprises a certain % amino acid sequence identity to, with, or against a given amino acid sequence B) is calculated as follows:
100 times the fraction X/Y
where X is the number of amino acid residues scored as identical matches by the sequence alignment program NCBI-BLAST2 in that program's alignment of A and B, and where Y is the total number of amino acid residues in B. It will be appreciated that where the length of amino acid sequence A is not equal to the length of amino acid sequence B, the % amino acid sequence identity of A to B will not equal the % amino acid sequence identity of B to A.

[2513] “PRO variant polynucleotide” or “PRO variant nucleic acid sequence” means a nucleic acid molecule which encodes an active PRO polypeptide as defined below and which has at least about 80% nucleic acid sequence identity with a nucleotide acid sequence encoding a full-length native sequence PRO polypeptide sequence as disclosed herein, a full-length native sequence PRO polypeptide sequence lacking the signal peptide as disclosed herein, an extracellular domain of a PRO polypeptide, with or without the signal peptide, as disclosed herein or any other fragment of a full-length PRO polypeptide sequence as disclosed herein. Ordinarily, a PRO variant polynucleotide will have at least about 80% nucleic acid sequence identity, alternatively at least about 81% nucleic acid sequence identity, alternatively at least about 82% nucleic acid sequence identity, alternatively at least about 83% nucleic acid sequence identity, alternatively at least about 84% nucleic acid sequence identity, alternatively at least about 85% nucleic acid sequence identity, alternatively at least about 86% nucleic acid sequence identity, alternatively at least about 87% nucleic acid sequence identity, alternatively at least about 88% nucleic acid sequence identity, alternatively at least about 89% nucleic acid sequence identity, alternatively at least about 90% nucleic acid sequence identity, alternatively at least about 91% nucleic acid sequence identity, alternatively at least about [symbol] nucleic acid sequence identity, alternatively at least about 93% nucleic acid sequence identity, alternatively at least about 94% nucleic acid sequence identity, alternatively at least about 95% nucleic acid [symbol] sequence identity, alternatively at least about 96% nucleic acid sequence identity, alternatively at least about [symbol] nucleic acid sequence identity, alternatively at least about 98% nucleic acid sequence identity and [symbol] alternatively at least about 99% nucleic acid sequence identity with a nucleic acid sequence encoding a full-length native sequence PRO polypeptide sequence as disclosed herein, a full-length native sequence PRO polypeptide sequence lacking the signal peptide as disclosed herein, an extracellular domain of a PRO polypeptide, with or without the signal sequence, as disclosed herein or any other fragment of a full-length PRO polypeptide sequence as disclosed herein. Variants do not encompass the native nucleotide sequence.

[2514] Ordinarily, PRO variant polynucleotides are at least about 30 nucleotides in length, alternatively at least about 60 nucleotides in length, alternatively at least about 90 nucleotides in length, alternatively at least about 120 nucleotides in length, alternatively at least about 150 nucleotides in length, alternatively at least about 180 nucleotides in length, alternatively at least about 210 nucleotides in length, alternatively at least about 240 nucleotides in length, alternatively at least about 270 nucleotides in length, alternatively at least about 300 nucleotides in length, alternatively at least about 450 nucleotides in length, alternatively at least about 600 nucleotides in length, alternatively at least about 900 nucleotides in length, or more.

[2515] “Percent (%) nucleic acid sequence identity” with respect to PRO-encoding nucleic acid sequences identified herein is defined as the percentage of nucleotides in a candidate sequence that are identical with the nucleotides in the PRO nucleic acid sequence of interest, after aligning the sequences and introducing gaps, if necessary, to achieve the maximum percent sequence identity. Alignment for purposes of determining percent nucleic acid sequence identity can be achieved in various ways that are within the skill in the art, for instance, using publicly available computer software such as BLAST, BLAST-2, ALIGN or Megalign (DNASTAR) software. For purposes herein, however, % nucleic acid sequence identity values are generated using the sequence comparison computer program ALIGN-2, wherein the complete source code for the ALIGN-2 program is provided in Table 1 below. The ALIGN-2 sequence comparison computer program was authored by Genentech, Inc. and the source code shown in Table 1 below has been filed with user documentation in the U.S. Copyright Office, Washington D.C., 20559, where it is registered under U.S. Copyright Registration No. TXU510087. The ALIGN-2 program is publicly available through Genentech, Inc., South San Francisco, Calif. or may be compiled from the source code provided in Table 1 below. The ALIGN-2 program should be compiled for use on a UNIX operating system, preferably digital UNIX V4.0D. All sequence comparison parameters are set by the ALIGN-2 program and do not vary.

[2516] In situations where ALIGN-2 is employed for nucleic acid sequence comparisons, the % nucleic acid sequence identity of a given nucleic acid sequence C to, with, or against a given nucleic acid sequence D (which can alternatively be phrased as a given nucleic acid sequence C that has or comprises a certain % nucleic acid sequence identity to, with, or against a given nucleic acid sequence D) is calculated as follows:
100 times the fraction W/Z
where W is the number of nucleotides scored as identical matches by the sequence alignment program ALIGN-2 in that program's alignment of C and D, and where Z is the total number of nucleotides in D. It will be appreciated that where the length of nucleic acid sequence C is not equal to the length of nucleic acid sequence D, the % nucleic acid sequence identity of C to D will not equal the % nucleic acid sequence identity of D to C. As examples of % nucleic acid sequence identity calculations, Tables 4 and 5, demonstrate how to calculate the % nucleic acid sequence identity of the nucleic acid sequence designated “Comparison DNA” to the nucleic acid sequence designated “PRO-DNA”, wherein “PRO-DNA” represents a hypothetical PRO-encoding nucleic acid sequence of interest, “Comparison DNA” represents the nucleotide sequence of a nucleic acid molecule against which the “PRO-DNA” nucleic acid molecule of interest is being compared, and “N”, “L” and “V” each represent different hypothetical nucleotides.

[2517] Unless specifically stated otherwise, all % nucleic acid sequence identity values used herein are obtained as described in the immediately preceding paragraph using the ALIGN-2 computer program. However, % nucleic acid sequence identity values may also be obtained as described below by using the WU-BLAST-2 computer program (Altschul et al., Methods in Enzymology 266:460-480 (1996)). Most of the WU-BLAST-2 search parameters are set to the default values. Those not set to default values, i.e., the adjustable parameters, are set with the following values: overlap span=1, overlap fraction=0.125, word threshold (T)=11, and scoring matrix=BLOSUM62. When WU-BLAST-2 is employed, a % nucleic acid sequence identity value is determined by dividing (a) the number of matching identical nucleotides between the nucleic acid sequence of the PRO polypeptide-encoding nucleic acid molecule of interest having a sequence derived from the native sequence PRO polypeptide-encoding nucleic acid and the comparison nucleic acid molecule of interest (i.e., the sequence against which the PRO polypeptide-encoding nucleic acid molecule of interest is being compared which may be a variant PRO polynucleotide) as determined by WU-BLAST-2 by (b) the total number of nucleotides of the PRO polypeptide-encoding nucleic acid molecule of interest. For example, in the statement “an isolated nucleic acid molecule comprising a nucleic acid sequence A which has or having at least 80% nucleic acid sequence identity to the nucleic acid sequence B”, the nucleic acid sequence A is the comparison nucleic acid molecule of interest and the nucleic acid sequence B is the nucleic acid sequence of the PRO polypeptide-encoding nucleic acid molecule of interest.

[2518] Percent nucleic acid sequence identity may also be determined using the sequence comparison program NCBI-BLAST2 (Altschul et al., Nucleic Acids Res. 25:3389-3402 (1997)). The NCBI-BLAST2 sequence comparison program may be downloaded from http://www.ncbi.nlm.nih.gov or otherwise obtained from the National Institute of Health, Bethesda, Md. NCBI-BLAST2 uses several search parameters, wherein all of those search parameters are set to default values including, for example, unmask=yes, strand=all, expected occurrences=10, minimum low complexity length=15/5, multi-pass e-value=0.01, constant for multi-pass=25, dropoff for final gapped alignment=25 and scoring matrix=BLOSUM62.

[2519] In situations where NCBI-BLAST2 is employed for sequence comparisons, the % nucleic acid sequence identity of a given nucleic acid sequence C to, with, or against a given nucleic acid sequence D (which can alternatively be phrased as a given nucleic acid sequence C that has or comprises a certain % nucleic acid sequence identity to, with, or against a given nucleic acid sequence D) is calculated as follows:
100 times the fraction W/Z
where W is the number of nucleotides scored as identical matches by the sequence alignment program NCBI-BLAST2 in that program's alignment of C and D, and where Z is the total number of nucleotides in D. It will be appreciated that where the length of nucleic acid sequence C is not equal to the length of nucleic acid sequence D, the % nucleic acid sequence identity of C to D will not equal the % nucleic acid sequence identity of D to C.

[2520] In other embodiments, PRO variant polynucleotides are nucleic acid molecules that encode an active PRO polypeptide and which are capable of hybridizing, preferably under stringent hybridization and wash conditions, to nucleotide sequences encoding a full-length PRO polypeptide as disclosed herein. PRO variant polypeptides may be those that are encoded by a PRO variant polynucleotide.

[2521] “Isolated,” when used to describe the various polypeptides disclosed herein, means polypeptide that has been identified and separated and/or recovered from a component of its natural environment. Contaminant components of its natural environment are materials that would typically interfere with diagnostic or therapeutic uses for the polypeptide, and may include enzymes, hormones, and other proteinaceous or non-proteinaceous solutes. In preferred embodiments, the polypeptide will be purified (1) to a degree sufficient to obtain at least 15 residues of N-terminal or internal amino acid sequence by use of a spinning cup sequenator, or (2) to homogeneity by SDS-PAGE under non-reducing or reducing conditions using Coomassie blue or, preferably, silver stain. Isolated polypeptide includes polypeptide in situ within recombinant cells, since at least one component of the PRO polypeptide natural environment will not be present. Ordinarily, however, isolated polypeptide will be prepared by at least one purification step.

[2522] An “isolated” PRO polypeptide-encoding nucleic acid or other polypeptide-encoding nucleic acid is a nucleic acid molecule that is identified and separated from at least one contaminant nucleic acid molecule with which it is ordinarily associated in the natural source of the polypeptide-encoding nucleic acid. An isolated polypeptide-encoding nucleic acid molecule is other than in the form or setting in which it is found in nature. Isolated polypeptide-encoding nucleic acid molecules therefore are distinguished from the specific polypeptide-encoding nucleic acid molecule as it exists in natural cells. However, an isolated polypeptide-encoding nucleic acid molecule includes polypeptide-encoding nucleic acid molecules contained in cells that ordinarily express the polypeptide where, for example, the nucleic acid molecule is in a chromosomal location different from that of natural cells.

[2523] The term “control sequences” refers to DNA sequences necessary for the expression of an operably linked coding sequence in a particular host organism. The control sequences that are suitable for prokaryotes, for example, include a promoter, optionally an operator sequence, and a ribosome binding site. Eukaryotic cells are known to utilize promoters, polyadenylation signals, and enhancers.

[2524] Nucleic acid is “operably linked” when it is placed into a functional relationship with another nucleic acid sequence. For example, DNA for a presequence or secretory leader is operably linked to DNA for a polypeptide if it is expressed as a preprotein that participates in the secretion of the polypeptide; a promoter or enhancer is operably linked to a coding sequence if it affects the transcription of the sequence; or a ribosome binding site is operably linked to a coding sequence if it is positioned so as to facilitate translation. Generally, “operably linked” means that the DNA sequences being linked are contiguous, and, in the case of a secretory leader, contiguous and in reading phase. However, enhancers do not have to be contiguous. Linking is accomplished by ligation at convenient restriction sites. If such sites do not exist, the synthetic oligonucleotide adaptors or linkers are used in accordance with conventional practice.

[2525] The term “antibody” is used in the broadest sense and specifically covers, for example, single anti-PRO monoclonal antibodies (including agonist, antagonist, and neutralizing antibodies), anti-PRO antibody compositions with polyepitopic specificity, single chain anti-PRO antibodies, and fragments of anti-PRO antibodies (see below). The term “monoclonal antibody” as used herein refers to an antibody obtained from a population of substantially homogeneous antibodies, i.e., the individual antibodies comprising the population are identical except for possible naturally-occurring mutations that may be present in minor amounts.

[2526] “Stringency” of hybridization reactions is readily determinable by one of ordinary skill in the art, and generally is an empirical calculation dependent upon probe length, washing temperature, and salt concentration. In general, longer probes require higher temperatures for proper annealing, while shorter probes need lower temperatures. Hybridization generally depends on the ability of denatured DNA to reanneal when complementary strands are present in an environment below their melting temperature. The higher the degree of desired homology between the probe and hybridizable sequence, the higher the relative temperature which can be used. As a result, it follows that higher relative temperatures would tend to make the reaction conditions more stringent, while lower temperatures less so. For additional details and explanation of stringency of hybridization reactions, see Ausubel et al., Current Protocols in Molecular Biology, Wiley Interscience Publishers, (1995).

[2527] “Stringent conditions” or “high stringency conditions”, as defined herein, may be identified by those that: (1) employ low ionic strength and high temperature for washing, for example 0.015 M sodium chloride/0.0015 M sodium citrate/0.1% sodium dodecyl sulfate at 50° C.; (2) employ during hybridization a denaturing agent, such as formamide, for example, 50% (v/v) formamide with 0.1% bovine serum albumin/0.1% Ficoll/0.1% polyvinylpyrrolidone/50 mM sodium phosphate buffer at pH 6.5 with 750 mM sodium chloride, 75 mM sodium citrate at 42° C.; or (3) employ 50% formamide, 5×SSC (0.75 M NaCl, 0.075 M sodium citrate), 50 mM sodium phosphate (pH 6.8), 0.1% sodium pyrophosphate, 5× Denhardt's solution, sonicated salmon sperm DNA (50 μg/ml), 0.1% SDS, and 10% dextran sulfate at 42° C., with washes at 42° C. in 0.2×SSC (sodium chloride/sodium citrate) and 50% formamide at 55° C., followed by a high-stringency wash consisting of 0.1×SSC containing EDTA at 55° C.

[2528] “Moderately stringent conditions” may be identified as described by Sambrook et al., Molecular Cloning: A Laboratory Manual, New York: Cold Spring Harbor Press, 1989, and include the use of washing solution and hybridization conditions (e.g., temperature, ionic strength and % SDS) less stringent that those described above. An example of moderately stringent conditions is overnight incubation at 37° C. in a solution comprising: 20% formamide, 5×SSC (150 mM NaCl, 15 mM trisodium citrate), 50 mM sodium phosphate (pH 7.6), 5× Denhardt's solution, 10% dextran sulfate, and 20 mg/ml denatured sheared salmon sperm DNA, followed by washing the filters in 1×SSC at about 37-50° C. The skilled artisan will recognize how to adjust the temperature, ionic strength, etc. as necessary to accommodate factors such as probe length and the like.

[2529] The term “epitope tagged” when used herein refers to a chimeric polypeptide comprising a PRO polypeptide fused to a “tag polypeptide”. The tag polypeptide has enough residues to provide an epitope against which an antibody can be made, yet is short enough such that it does not interfere with activity of the polypeptide to which it is fused. The tag polypeptide preferably also is fairly unique so that the antibody does not substantially cross-react with other epitopes. Suitable tag polypeptides generally have at least six amino acid residues and usually between about 8 and 50 amino acid residues (preferably, between about 10 and 20 amino acid residues).

[2530] As used herein, the term “immunoadhesin” designates antibody-like molecules which combine the binding specificity of a heterologous protein (an “adhesin”) with the effector functions of immunoglobulin constant domains. Structurally, the immunoadhesins comprise a fusion of an amino acid sequence with the desired binding specificity which is other than the antigen recognition and binding site of an antibody (i.e., is “heterologous”), and an immunoglobulin constant domain sequence. The adhesin part of an immunoadhesin molecule typically is a contiguous amino acid sequence comprising at least the binding site of a receptor or a ligand. The immunoglobulin constant domain sequence in the immunoadhesin may be obtained from any immunoglobulin, such as IgG-1, IgG-2, IgG-3, or IgG-4 subtypes, IgA (including IgA-1 and IgA-2), IgE, IgD or IgM.

[2531] “Active” or “activity” for the purposes herein refers to form(s) of a PRO polypeptide which retain a biological and/or an immunological activity of native or naturally-occurring PRO, wherein “biological” activity refers to a biological function (either inhibitory or stimulatory) caused by a native or naturally-occurring PRO other than the ability to induce the production of an antibody against an antigenic epitope possessed by a native or naturally-occurring PRO and an “immunological” activity refers to the ability to induce the production of an antibody against an antigenic epitope possessed by a native or naturally-occurring PRO.

[2532] The term “antagonist” is used in the broadest sense, and includes any molecule that partially or fully blocks, inhibits, or neutralizes a biological activity of a native PRO polypeptide disclosed herein. In a similar manner, the term “agonist” is used in the broadest sense and includes any molecule that mimics a biological activity of a native PRO polypeptide disclosed herein. Suitable agonist or antagonist molecules specifically include agonist or antagonist antibodies or antibody fragments, fragments or amino acid sequence variants of native PRO polypeptides, peptides, antisense oligonucleotides, small organic molecules, etc. Methods for identifying agonists or antagonists of a PRO polypeptide may comprise contacting a PRO polypeptide with a candidate agonist or antagonist molecule and measuring a detectable change in one or more biological activities normally associated with the PRO polypeptide.

[2533] “Treatment” refers to both therapeutic treatment and prophylactic or preventative measures, wherein the object is to prevent or slow down (lessen) the targeted pathologic condition or disorder. Those in need of treatment include those already with the disorder as well as those prone to have the disorder or those in whom the disorder is to be prevented.

[2534] “Chronic” administration refers to administration of the agent(s) in a continuous mode as opposed to an acute mode, so as to maintain the initial therapeutic effect (activity) for an extended period of time. “Intermittent” administration is treatment that is not consecutively done without interruption, but rather is cyclic in nature.

[2535] “Mammal” for purposes of treatment refers to any animal classified as a mammal, including humans, domestic and farm animals, and zoo, sports, or pet animals, such as dogs, cats, cattle, horses, sheep, pigs, goats, rabbits, etc. Preferably, the mammal is human.

[2536] Administration “in combination with” one or more further therapeutic agents includes simultaneous (concurrent) and consecutive administration in any order.

[2537] “Carriers” as used herein include pharmaceutically acceptable carriers, excipients, or stabilizers which are nontoxic to the cell or mammal being exposed thereto at the dosages and concentrations employed. Often the physiologically acceptable carrier is an aqueous pH buffered solution. Examples of physiologically acceptable carriers include buffers such as phosphate, citrate, and other organic acids; antioxidants including ascorbic acid; low molecular weight (less than about 10 residues) polypeptide; proteins, such as serum albumin, gelatin, or immunoglobulins; hydrophilic polymers such as polyvinylpyrrolidone; amino acids such as glycine, glutamine, asparagine, arginine or lysine; monosaccharides, disaccharides, and other carbohydrates including glucose, mannose, or dextrins; chelating agents such as EDTA; sugar alcohols such as mannitol or sorbitol; salt-forming counterions such as sodium; and/or nonionic surfactants such as TWEEN™, polyethylene glycol (PEG), and PLURONICS™.

[2538] “Antibody fragments” comprise a portion of an intact antibody, preferably the antigen binding or variable region of the intact antibody. Examples of antibody fragments include Fab, Fab′, F(ab′)₂, and Fv fragments; diabodies; linear antibodies (Zapata et al., Protein Eng. 8(10): 1057-1062 [1995]); single-chain antibody molecules; and multispecific antibodies formed from antibody fragments.

[2539] Papain digestion of antibodies produces two identical antigen-binding fragments, called “Fab” fragments, each with a single antigen-binding site, and a residual “Fc” fragment, a designation reflecting the ability to crystallize readily. Pepsin treatment yields an F(ab′)₂ fragment that has two antigen-combining sites and is still capable of cross-linking antigen.

[2540] “Fv” is the minimum antibody fragment which contains a complete antigen-recognition and -binding site. This region consists of a dimer of one heavy- and one light-chain variable domain in tight, non-covalent association. It is in this configuration that the three CDRs of each variable domain interact to define an antigen-binding site on the surface of the V_{H}-V_{L} dimer. Collectively, the six CDRs confer antigen-binding specificity to the antibody. However, even a single variable domain (or half of an Fv comprising only three CDRs specific for an antigen) has the ability to recognize and bind antigen, although at a lower affinity than the entire binding site.

[2541] The Fab fragment also contains the constant domain of the light chain and the first constant domain (CH1) of the heavy chain. Fab fragments differ from Fab′ fragments by the addition of a few residues at the carboxy terminus of the heavy chain CH1 domain including one or more cysteines from the antibody hinge region. Fab′-SH is the designation herein for Fab′ in which the cysteine residue(s) of the constant domains bear a free thiol group. F(ab′)₂ antibody fragments originally were produced as pairs of Fab′ fragments which have hinge cysteines between them. Other chemical couplings of antibody fragments are also known.

[2542] The “light chains” of antibodies (immunoglobulins) from any vertebrate species can be assigned to one of two clearly distinct types, called kappa and lambda, based on the amino acid sequences of their constant domains.

[2543] Depending on the amino acid sequence of the constant domain of their heavy chains, [symbol] immunoglobulins can be assigned to different classes. There are five major classes of immunoglobulins: [symbol] IgD, IgE, IgG, and IgM, and several of these may be further divided into subclasses (isotypes), e.g., [symbol] IgG1, IgG2, IgG3, IgG4, IgA, and IgA2.

[2544] “Single-chain Fv” or “sFv” antibody fragments comprise the V_{H} and V_{L} domains of antibody, wherein these domains are present in a single polypeptide chain. Preferably, the Fv polypeptide further [symbol] comprises a polypeptide linker between the V_{H} and V_{L} domains which enables the sFv to form the desired [symbol] ture for antigen binding. For a review of sFv, see Pluckthun in The Pharmacology of Monoclonal Antibodies, vol. 113, Rosenburg and Moore eds., Springer-Verlag, New York, pp. 269-315 (1994).

[2545] The term “diabodies” refers to small antibody fragments with two antigen-binding sites, which fragments comprise a heavy-chain variable domain (V_{H}) connected to a light-chain variable domain (V_{L}) in the same polypeptide chain (V_{H}-V_{L}). By using a linker that is too short to allow pairing between the two domains on the same chain, the domains are forced to pair with the complementary domains of another chain and create two antigen-binding sites. Diabodies are described more fully in, for example, EP 404,097; WO 93/11161; and Hollinger et al., Proc. Natl. Acad. Sci. USA, 90:6444-6448 (1993).

[2546] An “isolated” antibody is one which has been identified and separated and/or recovered from a component of its natural environment. Contaminant components of its natural environment are materials which would interfere with diagnostic or therapeutic uses for the antibody, and may include enzymes, hormones, and other proteinaceous or nonproteinaceous solutes. In preferred embodiments, the antibody will be purified (1) to greater than 95% by weight of antibody as determined by the Lowry method, and most preferably more than 99% by weight, (2) to a degree sufficient to obtain at least 15 residues of N-terminal or internal amino acid sequence by use of a spinning cup sequenator, or (3) to homogeneity by SDS-PAGE under reducing or nonreducing conditions using Coomassie blue or, preferably, silver stain. Isolated antibody includes the antibody in situ within recombinant cells since at least one component of the antibody's natural environment will not be present. Ordinarily, however, isolated antibody will be prepared by at least one purification step.

[2547] An antibody that “specifically binds to” or is “specific for” a particular polypeptide or an epitope on a particular polypeptide is one that binds to that particular polypeptide or epitope on a particular polypeptide without substantially binding to any other polypeptide or polypeptide epitope.

[2548] The word “label” when used herein refers to a detectable compound or composition which is conjugated directly or indirectly to the antibody so as to generate a “labeled” antibody. The label may be detectable by itself (e.g. radioisotope labels or fluorescent labels) or, in the case of an enzymatic label, may catalyze chemical alteration of a substrate compound or composition which is detectable.

[2549] By “solid phase” is meant a non-aqueous matrix to which the antibody of the present invention can adhere. Examples of solid phases encompassed herein include those formed partially or entirely of glass (e.g., controlled pore glass), polysaccharides (e.g., agarose), polyacrylamides, polystyrene, polyvinyl alcohol and silicones. In certain embodiments, depending on the context, the solid phase can comprise the well of an assay plate; in others it is a purification column (e.g., an affinity chromatography column). This term also includes a discontinuous solid phase of discrete particles, such as those described in U.S. Pat. No. 4,275,149.

[2550] A “liposome” is a small vesicle composed of various types of lipids, phospholipids and/or surfactant which is useful for delivery of a drug (such as a PRO polypeptide or antibody thereto) to a mammal. The components of the liposome are commonly arranged in a bilayer formation, similar to the lipid arrangement of biological membranes.

[2551] A “small molecule” is defined herein to have a molecular weight below about 500 Daltons.

[2552] The term “immune related disease” means a disease in which a component of the immune system of a mammal causes, mediates or otherwise contributes to a morbidity in the mammal. Also included are diseases in which stimulation or intervention of the immune response has an ameliorative effect on progression of the disease. Included within this term are immune-mediated inflammatory diseases, non-immune-mediated inflammatory diseases, infectious diseases, immunodeficiency diseases, neoplasia, etc.

[2553] The term “T cell mediated disease” means a disease in which T cells directly or indirectly mediate or otherwise contribute to a morbidity in a mammal. The T cell mediated disease may be associated with cell mediated effects, lymphokine mediated effects, etc., and even effects associated with B cells if the B cells are stimulated, for example, by the lymphokines secreted by T cells.

[2554] Examples of immune-related and inflammatory diseases, some of which are immune or T cell mediated, which can be treated according to the invention include systemic lupus erythematosis, rheumatoid arthritis, juvenile chronic arthritis, spondyloarthropathies, systemic sclerosis (scleroderma), idiopathic inflammatory myopathies (dermatomyositis, polymyositis), Sjögren's syndrome, systemic vasculitis, sarcoidosis, autoimmune hemolytic anemia (immune pancytopenia, paroxysmal nocturnal hemoglobinuria), autoimmune thrombocytopenia (idiopathic thrombocytopenic purpura, immune-mediated thrombocytopenia), thyroiditis (Grave's disease, Hashimoto's thyroiditis, juvenile lymphocytic thyroiditis, atrophic thyroiditis), diabetes mellitus, immune-mediated renal disease (glomerulonephritis, tubulointerstitial nephritis), demyelinating diseases of the central and peripheral nervous systems such as multiple sclerosis, idiopathic demyelinating polyneuropathy or Guillain-Barré syndrome, and chronic inflammatory demyelinating polyneuropathy, hepatobiliary diseases such as infectious hepatitis (hepatitis A, B, C, D, E and other non-hepatotropic viruses), autoimmune chronic active hepatitis, primary biliary cirrhosis, granulomatous hepatitis, and sclerosing cholangitis, inflammatory bowel disease (ulcerative colitis: Crohn's disease), gluten-sensitive enteropathy, and Whipple's disease, autoimmune or immune-mediated skin diseases including bullous skin diseases, erythema multiforme and contact dermatitis, psoriasis, allergic diseases such as asthma, allergic rhinitis, atopic dermatitis, food hypersensitivity and urticaria, immunologic diseases of the lung such as eosinophilic pneumonias, idiopathic pulmonary fibrosis and hypersensitivity pneumonitis, transplantation associated diseases including graft rejection and graft-versus-host-disease. Infectious diseases including viral diseases such as AIDS (HIV infection), hepatitis A, B, C, D, and E, herpes, etc., bacterial infections, fungal infections, protozoal infections and parasitic infections.

[2555] The term “effective amount” is a concentration or amount of a PRO polypeptide and/or agonist/antagonist which results in achieving a particular stated purpose. An “effective amount” of a PRO polypeptide or agonist or antagonist thereof may be determined empirically. Furthermore, a “therapeutically effective amount” is a concentration or amount of a PRO polypeptide and/or agonist/antagonist which is effective for achieving a stated therapeutic effect. This amount may also be determined empirically.

[2556] The term “cytotoxic agent” as used herein refers to a substance that inhibits or prevents the function of cells and/or causes destruction of cells. The term is intended to include radioactive isotopes (e.g., I¹³¹, I¹²⁵, Y⁹⁰ and Re¹⁸⁶), chemotherapeutic agents, and toxins such as enzymatically active toxins of bacterial, fungal, plant or animal origin, or fragments thereof.

[2557] A “chemotherapeutic agent” is a chemical compound useful in the treatment of cancer. Examples of chemotherapeutic agents include adriamycin, doxorubicin, epirubicin, 5-fluorouracil, cytosine arabinoside (“Ara-C”), cyclophosphamide, thiotepa, busulfan, cytoxin, taxoids, e.g., paclitaxel (Taxol, Bristol-Myers Squibb Oncology, Princeton, N.J.), and doxetaxel (Taxotere, Rhône-Poulenc Rorer, Antony, France), toxotere, methotrexate, cisplatin, melphalan, vinblastine, bleomycin, etoposide, ifosfamide, mitomycin C, mitoxantrone, vincristine, vinorelbine, carboplatin, teniposide, daunomycin, carminomycin, aminopterin, dactinomycin, mitomycins, esperamicins (see U.S. Pat. No. 4,675,187), melphalan and other related nitrogen mustards. Also included in this definition are hormonal agents that act to regulate or inhibit hormone action on tumors such as tamoxifen and onapristone.

[2558] A “growth inhibitory agent” when used herein refers to a compound or composition which inhibits growth of a cell, especially cancer cell overexpressing any of the genes identified herein, either in vitro or in vivo. Thus, the growth inhibitory agent is one which significantly reduces the percentage of cells overexpressing such genes in S phase. Examples of growth inhibitory agents include agents that block cell cycle progression (at a place other than S phase), such as agents that induce G1 arrest and M-phase arrest. Classical M-phase blockers include the vincas (vincristine and vinblastine), taxol, and topo II inhibitors such as doxorubicin, epirubicin, daunorubicin, etoposide, and bleomycin. Those agents that arrest G1 also spill over into S-phase arrest, for example, DNA alkylating agents such as tamoxifen, prednisone, dacarbazine, mechlorethamine, cisplatin, methotrexate, 5-fluorouracil, and ara-C. Further information can be found in The Molecular Basis of Cancer, Mendelsohn and Israel, eds., Chapter 1, entitled “Cell cycle regulation, oncogens, and antineoplastic drugs” by Murakami et al. (WB Saunders: Philadelphia, 1995), especially p. 13.

[2559] The term “cytokine” is a generic term for proteins released by one cell population which act on another cell as intercellular mediators. Examples of such cytokines are lymphokines, monokines, and traditional polypeptide hormones. Included among the cytokines are growth hormone such as human growth hormone, N-methionyl human growth hormone, and bovine growth hormone; parathyroid hormone; thyroxine; insulin; proinsulin; relaxin; prorelaxin; glycoprotein hormones such as follicle stimulating hormone (FSH), thyroid stimulating hormone (TSH), and luteinizing hormone (LH); hepatic growth factor; fibroblast growth factor; prolactin; placental lactogen; tumor necrosis factor-α and -β; mullerian-inhibiting substance; mouse gonadotropin-associated peptide; inhibin; activin; vascular endothelial growth factor; integrin; thrombopoietin (TPO); nerve growth factors such as NGF-β; platelet-growth factor; transforming growth factors (TGFs) such as TGF-α and TGF-β; insulin-like growth factor-I and -II; erythropoietin (EPO); osteoinductive factors; interferons such as interferon-α, -β, and -γ, colony stimulating factors (CSFs) such as macrophage-CSF (M-CSF); granulocyte-macrophage-CSF (GM-CSF); and granulocyte-CSF (G-CSF); interleukins (ILs) such as IL-1, IL-1α, IL-2, IL-3, IL-4, IL-5, IL-6, IL-7, IL-8, IL-9, IL-11, IL-12; a tumor necrosis factor such as TNF-α or TNF-β; and other polypeptide factors including LIF and kit ligand (KL). As used herein, the term cytokine includes proteins from natural sources or from recombinant cell culture and biologically active equivalents of the native sequence cytokines.

[2560] As used herein, the term “immunoadhesin” designates antibody-like molecules which combine the binding specificity of a heterologous protein (an “adhesin”) with the effector functions of immunoglobulin constant domains. Structurally, the immunoadhesins comprise a fusion of an amino acid sequence with the desired binding specificity which is other than the antigen recognition and binding site of an antibody (i.e., is “heterologous”), and an immunoglobulin constant domain sequence. The adhesin part of an immunoadhesin molecule typically is a contiguous amino acid sequence comprising at least the binding site of a receptor or a ligand. The immunoglobulin constant domain sequence in the immunoadhesin may be obtained from any immunoglobulin, such as IgG-1, IgG-2, IgG-3, or IgG-4 subtypes, IgA (including IgA-1 and IgA-2), IgE, IgD or IgM.

[2561] As used herein, the term “inflammatory cells” designates cells that enhance the inflammatory response such as mononuclear cells, eosinophils, macrophages, and polymorphonuclear neutrophils (PMN).

TABLE 2

| | | |
|---|---|---|
| PRO | XXXXXXXXXXXXXXX | (Length = 15 amino acids) |
| Comparison | XXXXXYYYYYYY | (Length = 12 amino acids) |
| Protein | | |

% amino acid sequence identity =(the number of identically matching amino acid residues between the two polypeptide sequences as determined by ALIGN-2) divided by (the total number of amino acid residues of the PRO polypeptide) = 5 divided by 15 = 33.3%

[2562] TABLE 3

| | | |
|---|---|---|
| PRO | XXXXXXXXXX | (Length = 10 amino acids) |
| Comparison | XXXXXYYYYYYZZYZ | (Length = 15 amino acids) |
| Protein | | |

% amino acid sequence identity = (the number of identically matching amino acid residues between the two polypeptide sequences as determined by ALIGN-2) divided by (the total number of amino acid residues of the PRO polypeptide) = 5 divided by 10 = 50%

[2563] TABLE 4

| | | |
|---|---|---|
| PRO-DNA | NNNNNNNNNNNNNN | (Length = 14 nucleotides) |
| Comparison | NNNNNNLLLLLLLLLL | (Length = 16 nucleotides) |
| DNA | | |

% nucleic acid sequence identity = (the number of identically matching nucleotides between the two nucleic acid sequences as determined by ALIGN-2) divided by (the total number of nucleotides of the PRO-DNA nucleic acid sequence) = 6 divided by 14 = 42.9%

[2564] TABLE 5

| | | |
|---|---|---|
| PRO-DNA | NNNNNNNNNNNN | (Length = 12 nucleotides) |
| Comparison | NNNNLLLVV | (Length = 9 nucleotides) |
| DNA | | |

% nucleic acid sequence identity = (the number of identically matching nucleotides between the two nucleic acid sequences as determined by ALIGN-2) divided by (the total number of nucleotides of the PRO-DNA nucleic acid sequence) = 4 divided by 12 = 33.3%

II. Compositions and Methods of the Invention

[2565] A. Full-Length PRO Polypeptides

[2566] The present invention provides newly identified and isolated nucleotide sequences encoding polypeptides referred to in the present application as PRO polypeptides. In particular, cDNAs encoding various PRO polypeptides have been identified and isolated, as disclosed in further detail in the Examples below. However, for sake of simplicity, in the present specification the protein encoded by the full length native nucleic acid molecules disclosed herein as well as all further native homologues and variants included in the foregoing definition of PRO, will be referred to as “PRO/number”, regardless of their origin or mode of preparation.

[2567] As disclosed in the Examples below, various cDNA clones have been disclosed. The predicted amino acid sequence can be determined from the nucleotide sequence using routine skill. For the PRO polypeptides and encoding nucleic acids described herein, Applicants have identified what is believed to be the reading frame best identifiable with the sequence information available at the time.

[2568] B. PRO Polypeptide Variants

[2569] In addition to the full-length native sequence PRO polypeptides described herein, it is contemplated that PRO variants can be prepared. PRO variants can be prepared by introducing appropriate nucleotide changes into the PRO DNA, and/or by synthesis of the desired PRO polypeptide. Those skilled in the art will appreciate that amino acid changes may alter post-translational processes of the PRO, such as changing the number or position of glycosylation sites or altering the membrane anchoring characteristics.

[2570] Variations in the native full-length sequence PRO or in various domains of the PRO described herein, can be made, for example, using any of the techniques and guidelines for conservative and non-conservative mutations set forth, for instance, in U.S. Pat. No. 5,364,934. Variations may be a substitution, deletion or insertion of one or more codons encoding the PRO that results in a change in the amino acid sequence of the PRO as compared with the native sequence PRO. Optionally, the variation is by substitution of at least one amino acid with any other amino acid in one or more of the domains of the PRO. Guidance in determining which amino acid residue may be inserted, substituted or deleted without adversely affecting the desired activity may be found by comparing the sequence of the PRO with that of homologous known protein molecules and minimizing the number of amino acid sequence changes made in regions of high homology. Amino acid substitutions can be the result of replacing one amino acid with another amino acid having similar structural and/or chemical properties, such as the replacement of a leucine with a serine, i.e., conservative amino acid replacements. Insertions or deletions may optionally be in the range of about 1 to 5 amino acids. The variation allowed may be determined by systematically making insertions, deletions or substitutions of amino acids in the sequence and testing the resulting variants for activity exhibited by the full-length or mature native sequence.

[2571] PRO polypeptide fragments are provided herein. Such fragments may be truncated at the N-terminus or C-terminus, or may lack internal residues, for example, when compared with a full length native protein. Certain fragments lack amino acid residues that are not essential for a desired biological activity of the PRO polypeptide.

[2572] PRO fragments may be prepared by any of a number of conventional techniques. Desired peptide fragments may be chemically synthesized. An alternative approach involves generating PRO fragments by enzymatic digestion, e.g., by treating the protein with an enzyme known to cleave proteins at sites defined by particular amino acid residues, or by digesting the DNA with suitable restriction enzymes and isolating the desired fragment. Yet another suitable technique involves isolating and amplifying a DNA fragment encoding a desired polypeptide fragment, by polymerase chain reaction (PCR). Oligonucleotides that define the desired termini of the DNA fragment are employed at the 5′ and 3′ primers in the PCR. Preferably, PRO polypeptide fragments share at least one biological and/or immunological activity with the native PRO polypeptide disclosed herein.

[2573] In particular embodiments, conservative substitutions of interest are shown in Table 6 under the heading of preferred substitutions. If such substitutions result in a change in biological activity, then more substantial changes, denominated exemplary substitutions in Table 6, or as further described below in reference to amino acid classes, are introduced and the products screened.

TABLE 6

| Original | Exemplary | Preferred |
|---|---|---|
| Residue | Substitutions | Substitutions |
| Ala (A) | val; leu; ile | val |
| Arg (R) | lys; gin; asn | lys |
| Asn (N) | gln; his; lys; arg | gln |
| [symbol] (D) | glu | glu |
| [symbol] (C) | ser | ser |
| [symbol] (Q) | asn | asn |
| [symbol] (E) | asp | asp |
| Gly (G) | pro; ala | ala |
| [symbol] (H) | asn; gln; lys; arg | arg |
| [symbol] | leu; val; met; ala; phe; | leu |
| | norleucine | |
| [symbol] (L) | norleucine; ile; val; | ile |
| | met; ala; phe | |
| [symbol] (K) | arg; gln; asn | arg |
| Met (M) | leu; phe; ile | leu |
| Phe (F) | leu; val; ile; ala; tyr | leu |
| Pro (P) | ala | ala |
| Ser (S) | thr | thr |
| Thr (T) | ser | ser |
| Trp (W) | tyr; phe | tyr |
| Tyr (Y) | trp; phe; thr; ser | phe |
| Val (V) | ile; leu; met; phe; | leu |
| | ala; norleucine | |

[2574] Substantial modifications in function or immunological identity of the PRO polypeptide are accomplished by selecting substitutions that differ significantly in their effect on maintaining (a) the structure of the polypeptide backbone in the area of the substitution, for example, as a sheet or helical conformation, (b) the charge or hydrophobicity of the molecule at the target site, or (c) the bulk of the side chain. Naturally occurring residues are divided into groups based on common side-chain properties:

(1) hydrophobic: norleucine, met, ala, val, leu, ile;

(2) neutral hydrophilic: cys, ser, thr;

(3) acidic: asp, glu;

(4) basic: asn, gln, his, lys, arg;

(5) residues that influence chain orientation: gly, pro; and

(6) aromatic: trp, tyr, phe.

[2575] Non-conservative substitutions will entail exchanging a member of one of these classes for another class. Such substituted residues also may be introduced into the conservative substitution sites or, more preferably, into the remaining (non-conserved) sites.

[2576] The variations can be made using methods known in the art such as oligonucleotide-mediated (site-directed) mutagenesis, alanine scanning, and PCR mutagenesis. Site-directed mutagenesis [Carter et al., Nucl. Acids Res., 13:4331 (1986); Zoller et al., Nucl. Acids Res., 10:6487 (1987)], cassette mutagenesis [Wells et al., Gene, 34:315 (1985)], restriction selection mutagenesis [Wells et al., Philos. Trans. R. Soc. London SerA, 317:415 (1986)] or other known techniques can be performed on the cloned DNA to produce the PRO variant DNA.

[2577] Scanning amino acid analysis can also be employed to identify one or more amino acids along a contiguous sequence. Among the preferred scanning amino acids are relatively small, neutral amino acids. Such amino acids include alanine, glycine, serine, and cysteine. Alanine is typically a preferred scanning amino acid among this group because it eliminates the side-chain beyond the beta-=bon and is less likely to alter the main-chain conformation of the variant [Cunningham and Wells, Science, 244: 1081-1085 (1989)]. Alanine is also typically preferred because it is the most common amino acid. Further, it is frequently found in both buried and exposed positions [Creighton, The Proteins, (W.H. Freeman & Co., N.Y.); Chothia, J. Mol. Biol., 150:1 (1976)]. If alanine substitution does not yield adequate amounts of variant, an isoteric amino acid can be used.

[2578] C. Modifications of PRO

[2579] Covalent modifications of PRO are included within the scope of this invention. One type of covalent modification includes reacting targeted amino acid residues of a PRO polypeptide with an organic derivatizing agent that is capable of reacting with selected side chains or the N- or C-terminal residues of the PRO. Derivatization with bifunctional agents is useful, for instance, for crosslinking PRO to a water-insoluble support matrix or surface for use in the method for purifying anti-PRO antibodies, and vice-versa. Commonly used crosslinking agents include, e.g., 1,1-bis(diazoacetyl)-2-phenylethane, glutaraldehyde, N-hydroxysuccinimide esters, for example, esters with 4-azidosalicylic acid, homobifunctional imidoesters, including disuccinimidyl esters such as 3,3′-dithiobis(succinimidylpropionate), bifunctional maleimides such as bis-N-maleimido-1,8-octane and agents such as methyl-3-[(p-azidophenyl)dithio]propioimidate.

[2580] Other modifications include deamidation of glutaminyl and asparaginyl residues to the corresponding glutamyl and aspartyl residues, respectively, hydroxylation of proline and lysine, phosphorylation of hydroxyl groups of seryl or threonyl residues, methylation of the α-amino groups of lysine, arginine, and histidine side chains [T. E. Creighton, Proteins: Structure and Molecular Properties, W.H. Freeman & Co., San Francisco, pp. 79-86 (1983)], acetylation of the N-terminal amine, and amidation of any C-terminal carboxyl group.

[2581] Another type of covalent modification of the PRO polypeptide included within the scope of this invention comprises altering the native glycosylation pattern of the polypeptide. “Altering the native glycosylation pattern” is intended for purposes herein to mean deleting one or more carbohydrate moieties found in native sequence PRO (either by removing the underlying glycosylation site or by deleting the glycosylation by chemical and/or enzymatic means), and/or adding one or more glycosylation sites that are not present in the native sequence PRO. In addition, the phrase includes qualitative changes in the glycosylation of the native proteins, involving a change in the nature and proportions of the various carbohydrate moieties present.

[2582] Addition of glycosylation sites to the PRO polypeptide may be accomplished by altering the amino acid sequence. The alteration may be made, for example, by the addition of, or substitution by, one or more serine or threonine residues to the native sequence PRO (for O-linked glycosylation sites). The PRO amino acid sequence may optionally be altered through changes at the DNA level, particularly by mutating the DNA encoding the PRO polypeptide at preselected bases such that codons are generated that will translate into the desired amino acids.

[2583] Another means of increasing the number of carbohydrate moieties on the PRO polypeptide is by chemical or enzymatic coupling of glycosides to the polypeptide. Such methods are described in the art, e.g., in WO 87/05330 published 11 Sep. 1987, and in Aplin and Wriston, CRC Crit. Rev. Biochem., pp. 259-306 (1981).

[2584] Removal of carbohydrate moieties present on the PRO polypeptide may be accomplished chemically or enzymatically or by mutational substitution of codons encoding for amino acid residues that serve as targets for glycosylation. Chemical deglycosylation techniques are known in the art and described, for instance, by Hakimuddin, et al., Arch. Biochem. Biophys., 259:52 (1987) and by Edge et al., Anal. Biochem., 118:131 (1981). Enzymatic cleavage of carbohydrate moieties on polypeptides can be achieved by the use of a variety of endo- and exo-glycosidases as described by Thotakura et al., Meth. Enzymol., 138:350 (1987).

[2585] Another type of covalent modification of PRO comprises linking the PRO polypeptide to one of a variety of nonproteinaceous polymers, e.g., polyethylene glycol (PEG), polypropylene glycol, or polyoxyalkylenes, in the manner set forth in U.S. Pat. No. 4,640,835; 4,496,689; 4,301,144; 4,670,417; 4,791,192 or 4,179,337.

[2586] The PRO of the present invention may also be modified in a way to form a chimeric molecule comprising PRO fused to another, heterologous polypeptide or amino acid sequence.

[2587] In one embodiment, such a chimeric molecule comprises a fusion of the PRO with a tag polypeptide which provides an epitope to which an anti-tag antibody can selectively bind. The epitope tag is generally placed at the amino- or carboxyl-terminus of the PRO. The presence of such epitope-tagged forms of the PRO can be detected using an antibody against the tag polypeptide. Also, provision of the epitope tag enables the PRO to be readily purified by affinity purification using an anti-tag antibody or another type of affinity matrix that binds to the epitope tag. Various tag polypeptides and their respective antibodies are well known in the art. Examples include poly-histidine (poly-his) or poly-histidine-glycine (poly-his-gly) tags; the flu HA tag polypeptide and its antibody 12CA5 [Field et al., Mol. Cell. Biol., 8:2159-2165 (1988)]; the c-myc tag and the 8F9, 3C7, 6E10, G4, B7 and 9E10 antibodies thereto [Evan et al., Molecular and Cellular Biology, 5:3610-3616 (1985)]; and the Herpes Simplex virus glycoprotein D (gD) tag and its antibody [Paborsky et al., Protein Engineering, 3(6):547-553 (1990)]. Other tag polypeptides include the Flag-peptide [Hopp et al., BioTechnology, 6:1204-1210 (1988)]; the KT3 epitope peptide [Martin et al., Science, 255:192-194 (1992)]; an alpha-tubulin epitope peptide [Skinner et al., J. Biol. Chem., 266:15163-15166 (1991)]; and the T7 gene 10 protein peptide tag [Lutz-Freyermuth et al., Proc. Natl. Acad. Sci. USA, 87:6393-6397 (1990)].

[2588] In an alternative embodiment, the chimeric molecule may comprise a fusion of the PRO with an immunoglobulin or a particular region of an immunoglobulin. For a bivalent form of the chimeric molecule (also referred to as an “immunoadhesin”), such a fusion could be to the Fc region of an IgG molecule. The Ig fusions preferably include the substitution of a soluble (transmembrane domain deleted or inactivated) form of a PRO polypeptide in place of at least one variable region within an Ig molecule. In a particularly preferred embodiment, the immunoglobulin fusion includes the hinge, CH2 and CH3, or the hinge, CH1, CH2 and CH3 regions of an IgG1 molecule. For the production of immunoglobulin fusions see also U.S. Pat. No. 5,428,130 issued Jun. 27, 1995.

[2589] D. Preparation of PRO

[2590] The description below relates primarily to production of PRO by culturing cells transformed or transfected with a vector containing PRO nucleic acid. It is, of course, contemplated that alternative methods, which are well known in the art, may be employed to prepare PRO. For instance, the PRO sequence, or portions thereof, may be produced by direct peptide synthesis using solid-phase techniques [see, e.g., Stewart et al., Solid-Phase Peptide Synthesis, W.H. Freeman Co., San Francisco, Calif. (1969); Merrifield, J. Am. Chem. Soc., 85:2149-2154 (1963)]. In vitro protein synthesis may be performed using manual techniques or by automation. Automated synthesis may be accomplished, for instance, using an Applied Biosystems Peptide Synthesizer (Foster City, Calif.) using manufacturer's instructions. Various portions of the PRO may be chemically synthesized separately and combined using chemical or enzymatic methods to produce the full-length PRO.

[2591] 1. Isolation of DNA Encoding PRO

[2592] DNA encoding PRO may be obtained from a cDNA library prepared from tissue believed to possess the PRO mRNA and to express it at a detectable level. Accordingly, human PRO DNA can be conveniently obtained from a cDNA library prepared from human tissue, such as described in the Examples. The PRO-encoding gene may also be obtained from a genomic library or by known synthetic procedures (e.g., automated nucleic acid synthesis).

[2593] Libraries can be screened with probes (such as antibodies to the PRO or oligonucleotides of at least about 20-80 bases) designed to identify the gene of interest or the protein encoded by it. Screening the cDNA or genomic library with the selected probe may be conducted using standard procedures, such as described in Sambrook et al., Molecular Cloning: A Laboratory Manual (New York: Cold Spring Harbor Laboratory Press, 1989). An alternative means to isolate the gene encoding PRO is to use PCR methodology [Sambrook et al., supra; Dieffenbach et al., PCR Primer: A Laboratory Manual (Cold Spring Harbor Laboratory Press, 1995)].

[2594] The Examples below describe techniques for screening a cDNA library. The oligonucleotide sequences selected as probes should be of sufficient length and sufficiently unambiguous that false positives are minimized. The oligonucleotide is preferably labeled such that it can be detected upon hybridization to DNA in the library being screened. Methods of labeling are well known in the art, and include the use of radiolabels like ³²P-labeled ATP, biotinylation or enzyme labeling. Hybridization conditions, including moderate stringency and high stringency, are provided in Sambrook et al., supra.

[2595] Sequences identified in such library screening methods can be compared and aligned to other known sequences deposited and available in public databases such as GenBank or other private sequence databases. Sequence identity (at either the amino acid or nucleotide level) within defined regions of the molecule or across the full-length sequence can be determined using methods known in the art and as described herein.

[2596] Nucleic acid having protein coding sequence may be obtained by screening selected cDNA or genomic libraries using the deduced amino acid sequence disclosed herein for the first time, and, if necessary, using conventional primer extension procedures as described in Sambrook et al., supra, to detect precursors and processing intermediates of mRNA that may not have been reverse-transcribed into cDNA.

[2597] 2. Selection and Transformation of Host Cells

[2598] Host cells are transfected or transformed with expression or cloning vectors described herein for PRO production and cultured in conventional nutrient media modified as appropriate for inducing promoters, selecting transformants, or amplifying the genes encoding the desired sequences. The culture conditions, such as media, temperature, pH and the like, can be selected by the skilled artisan without undue experimentation. In general, principles, protocols, and practical techniques for maximizing the productivity of cell cultures can be found in Mammalian Cell Biotechnology: a Practical Approach, M. Butler, ed. (IRL Press, 1991) and Sambrook et al., supra.

[2599] Methods of eukaryotic cell transfection and prokaryotic cell transformation are known to the ordinarily skilled artisan, for example, CaCl₂, CaPO₄, liposome-mediated and electroporation. Depending on the host cell used, transformation is performed using standard techniques appropriate to such cells. The calcium treatment employing calcium chloride, as described in Sambrook et al., supra, or electroporation is generally used for prokaryotes. Infection with Agrobacterium tumefaciens is used for transformation of certain plant cells, as described by Shaw et al., Gene, 23:315 (1983) and WO 89/05859 published 29 Jun. 1989. For mammalian cells without such cell walls, the calcium phosphate precipitation method of Graham and van der Eb, Virology, 52:456-457 (1978) can be employed. General aspects of mammalian cell host system transfections have been described in U.S. Pat. No. 4,399,216. Transformations into yeast are typically carried out according to the method of Van Solingen et al., J. Bact., 130:946 (1977) and Hsiao et al., Proc. Natl. Acad. Sci. (USA), 76:3829 (1979). However, other methods for introducing DNA into cells, such as by nuclear microinjection, electroporation, bacterial protoplast fusion with intact cells, or polycations, e.g., polybrene, polyornithine, may also be used. For various techniques for transforming mammalian cells, see Keown et al., Methods in Enzymology, 185:527-537 (1990) and Mansour et al., Nature, 336:348-352 (1988).

[2600] Suitable host cells for cloning or expressing the DNA in the vectors herein include prokaryote, yeast, or higher eukaryote cells. Suitable prokaryotes include but are not limited to eubacteria, such as Gram-negative or Gram-positive organisms, for example, Enterobacteriaceae such as E. coli. Various E. coli strains are publicly available, such as E. coli K12 strain MM294 (ATCC 31,446); E. coli X1776 (ATCC 31,537); E. coli strain W3110 (ATCC 27,325) and K5772 (ATCC 53,635). Other suitable prokaryotic host cells include Enterobacteriaceae such as Escherichia, e.g., E. coli, Enterobacter, Erwinia, Klebsiella, Proteus, Salmonella, e.g., Salmonella typhimurium, Serratia, e.g., Serratia marcescans, and Shigella, as well as Bacilli such as B. subtilis and B. licheniformis (e.g., B. licheniformis 41P disclosed in DD 266,710 published 12 Apr. 1989), Pseudomonas such as P. aeruginosa, and Streptomyces. These examples are illustrative rather than limiting. Strain W3110 is one particularly preferred host or parent host because it is a common host strain for recombinant DNA product fermentations. Preferably, the host cell secretes minimal amounts of proteolytic enzymes. For example, strain W3110 may be modified to effect a genetic mutation in the genes encoding proteins endogenous to the host with examples of such hosts including E. coli W3110 strain 1A2, which has the complete genotype tonA; E. coli W3110 strain 9E4, which has the complete genotype tonA ptr3; E. coli W3110 strain 27C7 (ATCC 55,244), which has the complete genotype tonA ptr3 phoA E15 (argF-lac)169 degP ompT kan^{r}; E. coli W3110 strain 37D6, which has the complete genotype tonA ptr3 phoA E15 (argF-lac)169 degP ompT rbs7 ilvG kan^{r}; E. coli W3110 strain 40B4, which is strain 37D6 with a non-kanamycin resistant degP deletion mutation; and an E. coli strain having mutant periplasmic protease disclosed in U.S. Pat. No. 4,946,783 issued 7 Aug. 1990. Alternatively, in vitro methods of cloning, e.g., PCR or other nucleic acid polymerase reactions, are suitable.

[2601] In addition to prokaryotes, eukaryotic microbes such as filamentous fungi or yeast are suitable cloning or expression hosts for PRO-encoding vectors. Saccharomyces cerevisiae is a commonly used lower eukaryotic host microorganism. Others include Schizosaccharomyces pombe (Beach and Nurse, Nature, 290: 140 [1981]; EP 139,383 published 2 May 1985); Kluyveromyces hosts (U.S. Pat. No. 4,943,529; Fleer et al., Bio/Technology, 9:968-975 (1991)) such as, e.g., K. lactis (MW98-8C, CBS683, CBS4574; Louvencourt et al., J. Bacteriol., 154(2):737-742 [1983]), K. fragilis (ATCC 12,424), K. bulgaricus (ATCC 16,045), K. wickeramii (ATCC 24,178), K. waltii (ATCC 56,500), K. drosophilarum (ATCC 36,906; Van den Berg et al., Bio/Technology, 8:135 (1990)), K. thermotolerans, and K. marxianus; yarrowia (EP 402,226); Pichia pastoris (EP 183,070; Sreekrishna et al., J. Basic Microbiol., 28:265-278 [1988]); Candida; Trichoderma reesia (EP 244,234); Neurospora crassa (Case et al., Proc. Natl. Acad. Sci. USA, 76:5259-5263 [1979]); Schwanniomyces such as Schwanniomyces occidentalis (EP 394,538 published 31 Oct. 1990); and filamentous fungi such as, e.g., Neurospora, Penicillium, Tolypocladium (WO 91/00357 published 10 Jan. 1991), and Aspergillus hosts such as A. nidulanis (Ballance et al., Biochem. Biophys. Res. Commun., 112:284-289 [1983]; Tilburn et al., Gene, 26:205-221 [1983]; Yelton et al., Proc. Natl. Acad. Sci. USA, 81: 1470-1474 [1984]) and A. niger (Kelly and Hynes, EMBO J., 4:475-479 [1985]). Methylotropic yeasts are suitable herein and include, but are not limited to, yeast capable of growth on methanol selected from the genera consisting of Hansenula, Candida, Kloeckera, Pichia, Saccharomyces, Torulopsis, and Rhodotorula. A list of specific species that are exemplary of this class of yeasts may be found in C. Anthony, The Biochemistry of Methylotrophs, 269 (1982).

[2602] Suitable host cells for the expression of glycosylated PRO are derived from multicellular organisms. Examples of invertebrate cells include insect cells such as Drosophila S2 and Spodoptera Sf9, as well as plant cells. Examples of useful mammalian host cell lines include Chinese hamster ovary (CHO) and COS cells. More specific examples include monkey kidney CV1 line transformed by SV40 (COS-7, ATCC CRL 1651); human embryonic kidney line (293 or 293 cells subcloned for growth in suspension culture, Graham et al., J. Gen Virol., 36:59 (1977)); Chinese hamster ovary cells/-DHFR (CHO, Urlaub and Chasin, Proc. Natl. Acad. Sci. USA, 77:4216 (1980)); mouse sertoli cells (TM4, Mather, Biol. Reprod., 23:243-251 (1980)); human lung cells (W138, ATCC CCL 75); human liver cells (Hep G2, HB 8065); and mouse mammary tumor (MMT 060562, ATCC CCL51). The selection of the appropriate host cell is deemed to be within the skill in the art.

[2603] 3. Selection and Use of a Replicable Vector

[2604] The nucleic acid (e.g., cDNA or genomic DNA) encoding PRO may be inserted into a replicable vector for cloning (amplification of the DNA) or for expression. Various vectors are publicly available. The vector may, for example, be in the form of a plasmid, cosmid, viral particle, or phage. The appropriate nucleic acid sequence may be inserted into the vector by a variety of procedures. In general, DNA is inserted into an appropriate restriction endonuclease site(s) using techniques known in the art. Vector components generally include, but are not limited to, one or more of a signal sequence, an origin of replication, one or more marker genes, an enhancer element, a promoter, and a transcription termination sequence. Construction of suitable vectors containing one or more of these components employs standard ligation techniques which are known to the skilled artisan.

[2605] The PRO may be produced recombinantly not only directly, but also as a fusion polypeptide with a heterologous polypeptide, which may be a signal sequence or other polypeptide having a specific cleavage site at the N-terminus of the mature protein or polypeptide. In general, the signal sequence may be a component of the vector, or it may be a part of the PRO-encoding DNA that is inserted into the vector. The [symbol] sequence may be a prokaryotic signal sequence selected, for example, from the group of the alkaline [symbol] phatase, penicillinase, lpp, or heat-stable enterotoxin II leaders. For yeast secretion the signal sequence [symbol] be, e.g., the yeast invertase leader, alpha factor leader (including Saccharomyces and Kluyveromyces α [symbol] -leaders, the latter described in U.S. Pat. No. 5,010,182), or acid phosphatase leader, the C. albicans [symbol] amylase leader (EP 362,179 published 4 Apr. 1990), or the signal described in WO 90/13646 [symbol] ed 15 Nov. 1990. In mammalian cell expression, mammalian signal sequences may be used to [symbol] secretion of the protein, such as signal sequences from secreted polypeptides of the same or related [symbol] species, as well as viral secretory leaders.

[2606] Both expression and cloning vectors contain a nucleic acid sequence that enables the vector to replicate in one or more selected host cells. Such sequences are well known for a variety of bacteria, yeast, and viruses. The origin of replication from the plasmid pBR322 is suitable for most Gram-negative bacteria, the 2μ plasmid origin is suitable for yeast, and various viral origins (SV40, polyoma, adenovirus, VSV or BPV) are useful for cloning vectors in mammalian cells.

[2607] Expression and cloning vectors will typically contain a selection gene, also termed a selectable marker. Typical selection genes encode proteins that (a) confer resistance to antibiotics or other toxins, e.g., ampicillin, neomycin, methotrexate, or tetracycline, (b) complement auxotrophic deficiencies, or (c) supply critical nutrients not available from complex media, e.g., the gene encoding D-alanine racemase for Bacilli.

[2608] An example of suitable selectable markers for mammalian cells are those that enable the identification of cells competent to take up the PRO-encoding nucleic acid, such as DHFR or thymidine kinase. An appropriate host cell when wild-type DHFR is employed is the CHO cell line deficient in DHFR activity, prepared and propagated as described by Urlaub et al., Proc. Natl. Acad. Sci. USA, 77:4216 (1980). A suitable selection gene for use in yeast is the trp1 gene present in the yeast plasmid YRp7 [Stinchcomb et al., Nature, 282:39 (1979); Kingsman et al., Gene, 7:141 (1979); Tschemper et al., Gene, 10:157 (1980)]. The trp1 gene provides a selection marker for a mutant strain of yeast lacking the ability to grow in tryptophan, for example, ATCC No. 44076 or PEP4-1 [Jones, Genetics, 85:12 (1977)].

[2609] Expression and cloning vectors usually contain a promoter operably linked to the PRO-encoding nucleic acid sequence to direct mRNA synthesis. Promoters recognized by a variety of potential host cells are well known. Promoters suitable for use with prokaryotic hosts include the β-lactamase and lactose promoter systems [Chang et al., Nature, 275:615 (1978); Goeddel et al., Nature, 281:544 (1979)], alkaline phosphatase, a tryptophan (trp) promoter system [Goeddel, Nucleic Acids Res., 8:4057 (1980); EP 36,776], and hybrid promoters such as the tac promoter [deBoer et al., Proc. Natl. Acad. Sci. USA, 80:21-25 (1983)]. Promoters for use in bacterial systems also will contain a Shine-Dalgarno (S.D.) sequence operably linked to the DNA encoding PRO.

[2610] Examples of suitable promoting sequences for use with yeast hosts include the promoters for 3-phosphoglycerate kinase [Hitzeman et al., J. Biol. Chem., 255:2073 (1980)] or other glycolytic enzymes [Hess et al., J. Adv. Enzyme Reg., 7:149 (1968); Holland, Biochemistry, 17:4900 (1978)], such as enolase, glyceraldehyde-3-phosphate dehydrogenase, hexokinase, pyruvate decarboxylase, phosphofructokinase, glucose-6-phosphate isomerase, 3-phosphoglycerate mutase, pyruvate kinase, triosephosphate isomerase, phosphoglucose isomerase, and glucokinase.

[2611] Other yeast promoters, which are inducible promoters having the additional advantage of transcription controlled by growth conditions, are the promoter regions for alcohol dehydrogenase 2, isocytochrome C, acid phosphatase, degradative enzymes associated with nitrogen metabolism, metallothionein, glyceraldehyde-3-phosphate dehydrogenase, and enzymes responsible for maltose and galactose utilization. Suitable vectors and promoters for use in yeast expression are further described in EP 73,657.

[2612] PRO transcription from vectors in mammalian host cells is controlled, for example, by promoters obtained from the genomes of viruses such as polyoma virus, fowlpox virus (UK 2,211,504 published 5 Jul. 1989), adenovirus (such as Adenovirus 2), bovine papilloma virus, avian sarcoma virus, cytomegalovirus, a retrovirus, hepatitis-B virus and Simian Virus 40 (SV40), from heterologous mammalian promoters, e.g., the actin promoter or an immunoglobulin promoter, and from heat-shock promoters, provided such promoters are compatible with the host cell systems.

[2613] Transcription of a DNA encoding the PRO by higher eukaryotes may be increased by inserting an enhancer sequence into the vector. Enhancers are cis-acting elements of DNA, usually about from 10 to 300 bp, that act on a promoter to increase its transcription. Many enhancer sequences are now known from mammalian genes (globin, elastase, albumin, α-fetoprotein, and insulin). Typically, however, one will use an enhancer from a eukaryotic cell virus. Examples include the SV40 enhancer on the late side of the replication origin (bp 100-270), the cytomegalovirus early promoter enhancer, the polyoma enhancer on the late side of the replication origin, and adenovirus enhancers. The enhancer may be spliced into the vector at a position 5′ or 3′ to the PRO coding sequence, but is preferably located at a site 5′ from the promoter.

[2614] Expression vectors used in eukaryotic host cells (yeast, fungi, insect, plant, animal, human, or nucleated cells from other multicellular organisms) will also contain sequences necessary for the termination of transcription and for stabilizing the mRNA. Such sequences are commonly available from the 5′ and, occasionally 3′, untranslated regions of eukaryotic or viral DNAs or cDNAs. These regions contain nucleotide segments transcribed as polyadenylated fragments in the untranslated portion of the mRNA encoding PRO.

[2615] Still other methods, vectors, and host cells suitable for adaptation to the synthesis of PRO in recombinant vertebrate cell culture are described in Gething et al., Nature, 293:620-625 (1981); Mantei et al., Nature, 281:40-46 (1979); EP 117,060; and EP 117,058.

[2616] 4. Detecting Gene Amplification/Expression

[2617] Gene amplification and/or expression may be measured in a sample directly, for example, by conventional Southern blotting, Northern blotting to quantitate the transcription of mRNA [Thomas, Proc. Natl. Acad. Sci. USA. 77:5201-5205 (1980)], dot blotting (DNA analysis), or in situ hybridization, using an appropriately labeled probe, based on the sequences provided herein. Alternatively, antibodies may be employed that can recognize specific duplexes, including DNA duplexes, RNA duplexes, and DNA-RNA hybrid duplexes or DNA-protein duplexes. The antibodies in turn may be labeled and the assay may be carried out where the duplex is bound to a surface, so that upon the formation of duplex on the surface, the presence of antibody bound to the duplex can be detected.

[2618] Gene expression, alternatively, may be measured by immunological methods, such as immunohistochemical staining of cells or tissue sections and assay of cell culture or body fluids, to quantitate directly the expression of gene product. Antibodies useful for immunohistochemical staining and/or assay of sample fluids may be either monoclonal or polyclonal, and may be prepared in any mammal. Conveniently, the antibodies may be prepared against a native sequence PRO polypeptide or against a synthetic peptide based on the DNA sequences provided herein or against exogenous sequence fused to PRO DNA and encoding a specific antibody epitope.

[2619] 5. Purification of Polypeptide

[2620] Forms of PRO may be recovered from culture medium or from host cell lysates. If membrane-bound, it can be released from the membrane using a suitable detergent solution (e.g. Triton-X 100) or by enzymatic cleavage. Cells employed in expression of PRO can be disrupted by various physical or chemical means, such as freeze-thaw cycling, sonication, mechanical disruption, or cell lysing agents.

[2621] It may be desired to purify PRO from recombinant cell proteins or polypeptides. The following procedures are exemplary of suitable purification procedures: by fractionation on an ion-exchange column; ethanol precipitation; reverse phase HPLC; chromatography on silica or on a cation-exchange resin such as DEAE; chromatofocusing; SDS-PAGE; ammonium sulfate precipitation; gel filtration using, for example, Sephadex G-75; protein A Sepharose columns to remove contaminants such as IgG; and metal chelating columns to bind epitope-tagged forms of the PRO. Various methods of protein purification may be employed and such methods are known in the art and described for example in Deutscher, Methods in Enzymology 182 (1990); Scopes, Protein Purification: Principles and Practice, Springer-Verlag, New York (1982). The purification step(s) selected will depend, for example, on the nature of the production process used and the particular PRO produced.

[2622] E. Tissue Distribution

[2623] The location of tissues expressing the PRO can be identified by determining mRNA expression in various human tissues. The location of such genes provides information about which tissues are most likely to be affected by the stimulating and inhibiting activities of the PRO polypeptides. The location of a gene in a specific tissue also provides sample tissue for the activity blocking assays discussed below.

[2624] As noted before, gene expression in various tissues may be measured by conventional Southern blotting, Northern blotting to quantitate the transcription of mRNA (Thomas, Proc. Natl. Acad. Sci. USA, 77:5201-5205 [1980]), dot blotting (DNA analysis), or in situ hybridization, using an appropriately labeled probe, based on the sequences provided herein. Alternatively, antibodies may be employed that can recognize specific duplexes, including DNA duplexes, RNA duplexes, and DNA-RNA hybrid duplexes or DNA-protein duplexes.

[2625] Gene expression in various tissues, alternatively, may be measured by immunological methods, such as immunohistochemical staining of tissue sections and assay of cell culture or body fluids, to quantitate directly the expression of gene product. Antibodies useful for immunohistochemical staining and/or assay of sample fluids may be either monoclonal or polyclonal, and may be prepared in any mammal. Conveniently, the antibodies may be prepared against a native sequence of a PRO polypeptide or against a synthetic peptide based on the DNA sequences encoding the PRO polypeptide or against an exogenous sequence fused to a DNA encoding a PRO polypeptide and encoding a specific antibody epitope. General techniques for generating antibodies, and special protocols for Northern blotting and in situ hybridization are provided below.

[2626] F. Antibody Binding Studies

[2627] The activity of the PRO polypeptides can be further verified by antibody binding studies, in which the ability of anti-PRO antibodies to inhibit the effect of the PRO polypeptides, respectively, on tissue cells is tested. Exemplary antibodies include polyclonal, monoclonal, humanized, bispecific, and heteroconjugate antibodies, the preparation of which will be described hereinbelow.

[2628] Antibody binding studies may be carried out in any known assay method, such as competitive binding assays, direct and indirect sandwich assays, and immunoprecipitation assays. Zola, Monoclonal Antibodies: A Manual of Techniques, pp. 147-158 (CRC Press, Inc., 1987).

[2629] Competitive binding assays rely on the ability of a labeled standard to compete with the test sample analyte for binding with a limited amount of antibody. The amount of target protein in the test sample is inversely proportional to the amount of standard that becomes bound to the antibodies. To facilitate determining the amount of standard that becomes bound, the antibodies preferably are insolubilized before or after the competition, so that the standard and analyte that are bound to the antibodies may conveniently be separated from the standard and analyte which remain unbound.

[2630] Sandwich assays involve the use of two antibodies, each capable of binding to a different immunogenic portion, or epitope, of the protein to be detected. In a sandwich assay, the test sample analyte is bound by a first antibody which is immobilized on a solid support, and thereafter a second antibody binds to the analyte, thus forming an insoluble three-part complex. See, e.g., U.S. Pat. No. 4,376,110. The second antibody may itself be labeled with a detectable moiety (direct sandwich assays) or may be measured using an anti-immunoglobulin antibody that is labeled with a detectable moiety (indirect sandwich assay). For example, one type of sandwich assay is an ELISA assay, in which case the detectable moiety is an enzyme.

[2631] For immunohistochemistry, the tissue sample may be fresh or frozen or may be embedded in paraffin and fixed with a preservative such as formalin, for example.

[2632] G. Cell-Based Assays

[2633] Cell-based assays and animal models for immune related diseases can be used to further understand the relationship between the genes and polypeptides identified herein and the development and pathogenesis of immune related disease.

[2634] In a different approach, cells of a cell type known to be involved in a particular immune related disease are transfected with the cDNAs described herein, and the ability of these cDNAs to stimulate or inhibit immune function is analyzed. Suitable cells can be transfected with the desired gene, and monitored for immune function activity. Such transfected cell lines can then be used to test the ability of poly- or monoclonal antibodies or antibody compositions to inhibit or stimulate immune function, for example to modulate T-cell proliferation or inflammatory cell infiltration. Cells transfected with the coding sequences of the genes identified herein can further be used to identify drug candidates for the treatment of immune related diseases.

[2635] In addition, primary cultures derived from transgenic animals (as described below) can be used in the cell-based assays herein, although stable cell lines are preferred. Techniques to derive continuous cell lines from transgenic animals are well known in the art (see, e.g., Small et al., Mol. Cell. Biol. 5: 642-648 [1985]).

[2636] One suitable cell based assay is the mixed lymphocyte reaction (MLR). Current Protocols in Immunology, unit 3.12; edited by J E Coligan, A M Kruisbeek, D H Marglies, B M Shevach, W Strober, National Institutes of Health, Published by John Wiley & Sons, Inc. In this assay, the ability of a test compound to stimulate or inhibit the proliferation of activated T cells is assayed. A suspension of responder T cells is cultured with allogeneic stimulator cells and the proliferation of T cells is measured by uptake of tritiated thymidine. This assay is a general measure of T cell reactivity. Since the majority of T cells respond to and produce IL-2 upon activation, differences in responsiveness in this assay in part reflect differences in IL-2 production by the responding cells. The MLR results can be verified by a standard lymphokine (IL-2) detection assay. Current Protocols in Immunology, above, 3.15, 6.3.

[2637] A proliferative T cell response in an MLR assay may be due to direct mitogenic properties of an assayed molecule or to external antigen induced activation. Additional verification of the T cell stimulatory activity of the PRO polypeptides can be obtained by a costimulation assay. T cell activation requires an antigen specific signal mediated through the T-cell receptor (TCR) and a costimulatory signal mediated through a second ligand binding interaction, for example, the B7 (CD80, CD86)/CD28 binding interaction. CD28 crosslinking increases lymphokine secretion by activated T cells. T cell activation has both negative and positive controls through the binding of ligands which have a negative or positive effect. CD28 and CTLA-4 are related glycoproteins in the Ig superfamily which bind to B7. CD28 binding to B7 has a positive costimulation effect of T cell activation; conversely, CTLA-4 binding to B7 has a T cell deactivating effect Chambers, C. A. and Allison, J. P., Curr. Opin. Immunol. (1997) 9:396. Schwartz, R. H., Cell (1992) 71:1065; Linsey, P. S. and Ledbetter, J. A., Annu. Rev. Immunol. (1993) 11:191; June, C. H. et al, Immunol. Today (1994) 15:321; Jenkins, M. K., Immunity (1994) 1:405. In a costimulation assay, the PRO polypeptides are assayed for T cell costimulatory or inhibitory activity.

[2638] Direct use of a stimulating compound as in the invention has been validated in experiments with 4-1BB glycoprotein, a member of the tumor necrosis factor receptor family, which binds to a ligand (4-1BBL) expressed on primed T cells and signals T cell activation and growth. Alderson, M. E. et al., J. Immunol. (1994) 24:2219.

[2639] The use of an agonist stimulating compound has also been validated experimentally. Activation of 4-1BB by treatment with an agonist anti-4-1BB antibody enhances eradication of tumors. Hellstrom, I. and Hellstrom, K. E., Crit. Rev. Immunol. (1998) 18:1. Immunoadjuvant therapy for treatment of tumors, described in more detail below, is another example of the use of the stimulating compounds of the invention.

[2640] Alternatively, an immune stimulating or enhancing effect can also be achieved by administration of a PRO which has vascular permeability enhancing properties. Enhanced vascular permeability would be beneficial to disorders which can be attenuated by local infiltration of immune cells (e.g., monocytes, eosinophils, PMNs) and inflammation.

[2641] On the other hand, PRO polypeptides, as well as other compounds of the invention, which are direct inhibitors of T cell proliferation/activation, lymphokine secretion, and/or vascular permeability can be directly used to suppress the immune response. These compounds are useful to reduce the degree of the immune response and to treat immune related diseases characterized by a hyperactive, superoptimal, or autoimmune response. This use of the compounds of the invention has been validated by the experiments described above in which CTLA-4 binding to receptor B7 deactivates T cells. The direct inhibitory compounds of the invention function in an analogous manner. The use of compound which suppress vascular permeability would be expected to reduce inflammation. Such uses would be beneficial in treating conditions associated with excessive inflammation.

[2642] Alternatively, compounds, e.g., antibodies, which bind to stimulating PRO polypeptides and block the stimulating effect of these molecules produce a net inhibitory effect and can be used to suppress the T cell mediated immune response by inhibiting T cell proliferation/activation and/or lymphokine secretion. Blocking the stimulating effect of the polypeptides suppresses the immune response of the mammal. This use has been validated in experiments using an anti-IL2 antibody. In these experiments, the antibody binds to IL2 and blocks binding of IL2 to its receptor thereby achieving a T cell inhibitory effect.

[2643] H. Animal Models

[2644] The results of the cell based in vitro assays can be further verified using in vivo animal models and assays for T-cell function. A variety of well known animal models can be used to further understand the role of the genes identified herein in the development and pathogenesis of immune related disease, and to test the efficacy of candidate therapeutic agents, including antibodies, and other antagonists of the native polypeptides, including small molecule antagonists. The in vivo nature of such models makes them predictive of responses in human patients. Animal models of immune related diseases include both non-recombinant and recombinant (transgenic) animals. Non-recombinant animal models include, for example, rodent, e.g., murine models. Such models can be generated by introducing cells into syngeneic mice using standard techniques, e.g., subcutaneous injection, tail vein injection, spleen implantation, intraperitoneal implantation, implantation under the renal capsule, etc.

[2645] Graft-versus-host disease occurs when immunocompetent cells are transplanted into immunosuppressed or tolerant patients. The donor cells recognize and respond to host antigens. The response can vary from life threatening severe inflammation to mild cases of diarrhea and weight loss. Graft-versus-host disease models provide a means of assessing T cell reactivity against MHC antigens and minor transplant antigens. A suitable procedure is described in detail in Current Protocols in Immunology, above, unit 4.3.

[2646] An animal model for skin allograft rejection is a means of testing the ability of T cells to mediate in vivo tissue destruction and a measure of their role in transplant rejection. The most common and accepted models use murine tail-skin grafts. Repeated experiments have shown that skin allograft rejection is mediated by T cells, helper T cells and killer-effector T cells, and not antibodies. Auchincloss, H. Jr. and Sachs, D. H., Fundamental Immunology, 2nd ed., W. E. Paul ed., Raven Press, NY, 1989, 889-992. A suitable procedure is described in detail in Current Protocols in Immunology, above, unit 4.4. Other transplant rejection models which can be used to test the compounds of the invention are the allogeneic heart transplant models described by Tanabe, M. et al, Transplantation (1994) 58:23 and Tinubu, S. A. et al., J. Immunol. (1994) 4330-4338.

[2647] Animal models for delayed type hypersensitivity provides an assay of cell mediated immune function as well. Delayed type hypersensitivity reactions are a T cell mediated in vivo immune response characterized by inflammation which does not reach a peak until after a period of time has elapsed after challenge with an antigen. These reactions also occur in tissue specific autoimmune diseases such as [symbol] Multiple sclerosis (MS) and experimental autoimmune encephalomyelitis (EAE, a model for MS). A [symbol] able procedure is described in detail in Current Protocols in Immunology, above, unit 4.5.

[2648] EAE is a T cell mediated autoimmune disease characterized by T cell and mononuclear cell [symbol] inflammation and subsequent demyelination of axons in the central nervous system. EAE is generally [symbol] dered to be a relevant animal model for MS in humans. Bolton, C., Multiple Sclerosis (1995) 1:143. [symbol] a acute and relapsing-remitting models have been developed. The compounds of the invention can be [symbol] for T cell stimulatory or inhibitory activity against immune mediated demyelinating disease using the [symbol] ocol described in Current Protocols in Immunology, above, units 15.1 and 15.2. See also the models for myelin disease in which oligodendrocytes or Schwann cells are grafted into the central nervous system as described in Duncan, I. D. et al, Molec. Med. Today (1997) 554-561.

[2649] Contact hypersensitivity is a simple delayed type hypersensitivity in vivo assay of cell mediated immune function. In this procedure, cutaneous exposure to exogenous haptens which gives rise to a delayed type hypersensitivity reaction which is measured and quantitated. Contact sensitivity involves an initial sensitizing phase followed by an elicitation phase. The elicitation phase occurs when the T lymphocytes encounter an antigen to which they have had previous contact. Swelling and inflammation occur, making this an excellent model of human allergic contact dermatitis. A suitable procedure is described in detail in Current Protocols in Immunology, Eds. J. E. Cologan, A. M. Kruisbeek, D. H. Margulies, E. M. Shevach and W. Strober, John Wiley & Sons, Inc., 1994, unit 4.2. See also Grabbe, S. and Schwarz, T, Immun. Today 19 (1): 3744 (1998).

[2650] An animal model for arthritis is collagen-induced arthritis. This model shares clinical, histological and immunological characteristics of human autoimmune rheumatoid arthritis and is an acceptable model for human autoimmune arthritis. Mouse and rat models are characterized by synovitis, erosion of cartilage and subchondral bone. The compounds of the invention can be tested for activity against autoimmune arthritis using the protocols described in Current Protocols in Immunology, above, units 15.5. See also the model using a monoclonal antibody to CD18 and VLA-4 integrins described in Issekutz, A. C. et al., Immunology (1996) 88:569.

[2651] A model of asthma has been described in which antigen-induced airway hyper-reactivity, pulmonary eosinophilia and inflammation are induced by sensitizing an animal with ovalbumin and then challenging the animal with the same protein delivered by aerosol. Several animal models (guinea pig, rat, non-human primate) show symptoms similar to atopic asthma in humans upon challenge with aerosol antigens. Murine models have many of the features of human asthma. Suitable procedures to test the compounds of the invention for activity and effectiveness in the treatment of asthma are described by Wolyniec, W. W. et al, Am. J. Respir. Cell Mol. Biol. (1998) 18:777 and the references cited therein.

[2652] Additionally, the compounds of the invention can be tested on animal models for psoriasis like diseases. Evidence suggests a T cell pathogenesis for psoriasis. The compounds of the invention can be tested in the scid/scid mouse model described by Schon, M. P. et al Nat. Med. (1997) 3:183, in which the mice demonstrate histopathologic skin lesions resembling psoriasis. Another suitable model is the human skid/scid mouse chimera prepared as described by Nickoloff, B. J. et al, Am. J. Path. (1995) 146:580.

[2653] Recombinant (transgenic) animal models can be engineered by introducing the coding portion of the genes identified herein into the genome of animals of interest, using standard techniques for producing transgenic animals. Animals that can serve as a target for transgenic manipulation include, without limitation, mice, rats, rabbits, guinea pigs, sheep, goats, pigs, and non-human primates, e.g., baboons, chimpanzees and monkeys. Techniques known in the art to introduce a transgene into such animals include pronucleic microinjection (Hoppe and Wanger, U.S. Pat. No. 4,873,191); retrovirus-mediated gene transfer into germ lines (e.g., Van der Putten et al., Proc. Natl. Acad. Sci. USA 82, 6148-615 [1985]); gene targeting in embryonic stem cells (Thompson et al., Cell 56, 313-321 [1989]); electroporation of embryos (Lo, Mol. Cel. Biol. 3, 1803-1814 [1983]); sperm-mediated gene transfer (Lavitrano et al., Cell 57, 717-73 [1989]). For review, see, for example, U.S. Pat. No. 4,736,866.

[2654] For the purpose of the present invention, transgenic animals include those that carry the transgene only in part of their cells (“mosaic animals”). The transgene can be integrated either as a single transgene, or in concatamers, e.g., head-to-head or head-to-tail tandems. Selective introduction of a transgene into a particular cell type is also possible by following, for example, the technique of Lasko et al., Proc. Natl. Acad. Sci. USA 89, 6232-636 (1992).

[2655] The expression of the transgene in transgenic animals can be monitored by standard techniques. For example, Southern blot analysis or PCR amplification can be used to verify the integration of the transgene. The level of mRNA expression can then be analyzed using techniques such as in situ hybridization, Northern blot analysis, PCR, or immunocytochemistry.

[2656] The animals may be further examined for signs of immune disease pathology, for example by histological examination to determine infiltration of immune cells into specific tissues. Blocking experiments can also be performed in which the transgenic animals are treated with the compounds of the invention to determine the extent of the T cell proliferation stimulation or inhibition of the compounds. In these experiments, blocking antibodies which bind to the PRO polypeptide, prepared as described above, are administered to the animal and the effect on immune function is determined.

[2657] Alternatively, “knock out” animals can be constructed which have a defective or altered gene encoding a polypeptide identified herein, as a result of homologous recombination between the endogenous gene encoding the polypeptide and altered genomic DNA encoding the same polypeptide introduced into an embryonic cell of the animal. For example, cDNA encoding a particular polypeptide can be used to clone genomic DNA encoding that polypeptide in accordance with established techniques. A portion of the genomic DNA encoding a particular polypeptide can be deleted or replaced with another gene, such as a gene encoding a selectable marker which can be used to monitor integration. Typically, several kilobases of unaltered flanking DNA (both at the 5′ and 3′ ends) are included in the vector [see e.g., Thomas and Capecchi, Cell, 51:503 (1987) for a description of homologous recombination vectors]. The vector is introduced into an embryonic stem cell line (e.g., by electroporation) and cells in which the introduced DNA has homologously recombined with the endogenous DNA are selected [see e.g., Li et al., Cell, 69:915 (1992)]. The selected cells are then injected into a blastocyst of an animal (e.g., a mouse or rat) to form aggregation chimeras [see e.g., Bradley, in Teratocarcinomas and Embryonic Stem Cells: A Practical Approach, E. J. Robertson, ed. (IRL, Oxford, 1987), pp. 113-152]. A chimeric embryo can then be implanted into a suitable pseudopregnant female foster animal and the embryo brought to term to create a “knock out” animal. Progeny harboring the homologously recombined DNA in their germ cells can be identified by standard techniques and used to breed animals in which all cells of the animal contain the homologously recombined DNA. Knockout animals can be characterized for instance, for their ability to defend against certain pathological conditions and for their development of pathological conditions due to absence of the polypeptide.

[2658] I. ImmunoAdjuvant Therapy

[2659] In one embodiment, the immunostimulating compounds of the invention can be used in immunoadjuvant therapy for the treatment of tumors (cancer). It is now well established that T cells recognize human tumor specific antigens. One group of tumor antigens, encoded by the MAGE, BAGE and GAGE families of genes, are silent in all adult normal tissues, but are expressed in significant amounts in tumors, such as melanomas, lung tumors, head and neck tumors, and bladder carcinomas. DeSmet, C. et al., (1996) Proc. Natl. Acad. Sci. USA, 93:7149. It has been shown that costimulation of T cells induces tumor regression and an antitumor response both in vitro and in vivo. Melero, I. et al., Nature Medicine (1997) 3:682; Kwon, E. D. et al., Proc. Natl. Acad. Sci. USA (1997) 94: 8099; Lynch, D. H. et al, Nature Medicine (1997) 3:625; Finn, O. J. and Lotze, M. T., J. Immunol. (1998) 21:114. The stimulatory compounds of the invention can be administered as adjuvants, alone or together with a growth regulating agent, cytotoxic agent or chemotherapeutic agent, to stimulate T cell proliferation/activation and an antitumor response to tumor antigens. The growth regulating, cytotoxic, or chemotherapeutic agent may be administered in conventional amounts using known administration regimes. Immunostimulating activity by the compounds of the invention allows reduced amounts of the growth regulating, cytotoxic, or chemotherapeutic agents thereby potentially lowering the toxicity to the patient.

[2660] J. Screening Assays for Drug Candidates

[2661] Screening assays for drug candidates are designed to identify compounds that bind to or complex with the polypeptides encoded by the genes identified herein or a biologically active fragment thereof, or otherwise interfere with the interaction of the encoded polypeptides with other cellular proteins. Such screening assays will include assays amenable to high-throughput screening of chemical libraries, making them particularly suitable for identifying small molecule drug candidates. Small molecules contemplated include synthetic organic or inorganic compounds, including peptides, preferably soluble peptides, (poly)peptide-immunoglobulin fusions, and, in particular, antibodies including, without limitation, poly- and monoclonal antibodies and antibody fragments, single-chain antibodies, anti-idiotypic antibodies, and chimeric or humanized versions of such antibodies or fragments, as well as human antibodies and antibody fragments. The assays can be performed in a variety of formats, including protein-protein binding assays, biochemical screening assays, immunoassays and cell based assays, which are well characterized in the art. All assays are common in that they call for contacting the drug candidate with a polypeptide encoded by a nucleic acid identified herein under conditions and for a time sufficient to allow these two components to interact.

[2662] In binding assays, the interaction is binding and the complex formed can be isolated or detected in the reaction mixture. In a particular embodiment, the polypeptide encoded by the gene identified herein or the drug candidate is immobilized on a solid phase, e.g., on a microtiter plate, by covalent or non-covalent attachments. Non-covalent attachment generally is accomplished by coating the solid surface with a solution of the polypeptide and drying. Alternatively, an immobilized antibody, e.g., a monoclonal antibody, specific for the polypeptide to be immobilized can be used to anchor it to a solid surface. The assay is performed by adding the non-immobilized component, which may be labeled by a detectable label, to the immobilized component, e.g., the coated surface containing the anchored component. When the reaction is complete, the non-reacted components are removed, e.g., by washing, and complexes anchored on the solid surface are detected. When the originally non-immobilized component carries a detectable label, the detection of label immobilized on the surface indicates that complexing occurred. Where the originally non-immobilized component does not carry a label, complexing can be detected, for example, by using a labelled antibody specifically binding the immobilized complex.

[2663] If the candidate compound interacts with but does not bind to a particular protein encoded by a gene identified herein, its interaction with that protein can be assayed by methods well known for detecting protein-protein interactions. Such assays include traditional approaches, such as, cross-linking, co-immunoprecipitation, and co-purification through gradients or chromatographic columns. In addition, protein-protein interactions can be monitored by using a yeast-based genetic system described by Fields and co-workers [Fields and Song, Nature (London) 340, 245-246 (1989); Chien et al., Proc. Natl. Acad. Sci. USA 88, 9578-9582 (1991)] as disclosed by Chevray and Nathans, Proc. Natl. Acad. Sci. USA 89, 5789-5793 (1991). Many transcriptional activators, such as yeast GAL4, consist of two physically discrete modular domains, one acting as the DNA-binding domain, while the other one functioning as the transcription activation domain. The yeast expression system described in the foregoing publications (generally referred to as the “two-hybrid system”) takes advantage of this property, and employs two hybrid proteins, one in which the target protein is fused to the DNA-binding domain of GAL4, and another, in which candidate activating proteins are fused to the activation domain. The expression of a GAL1-lacZ reporter gene under control of a GAL4-activated promoter depends on reconstitution of GAL4 activity via protein-protein interaction. Colonies containing interacting polypeptides are detected with a chromogenic substrate for β-galactosidase. A complete kit (MATCHMAKER™) for identifying protein-protein interactions between two specific proteins using the two-hybrid technique is commercially available from Clontech. This system can also be extended to map protein domains involved in specific protein interactions as well as to pinpoint amino acid residues that are crucial for these interactions.

[2664] In order to find compounds that interfere with the interaction of a gene identified herein and other intra- or extracellular components can be tested, a reaction mixture is usually prepared containing the product of the gene and the intra- or extracellular component under conditions and for a time allowing for the interaction and binding of the two products. To test the ability of a test compound to inhibit binding, the reaction is run in the absence and in the presence of the test compound. In addition, a placebo may be added to a third reaction mixture, to serve as positive control. The binding (complex formation) between the test compound and the intra- or extracellular component present in the mixture is monitored as described above. The formation of a complex in the control reaction(s) but not in the reaction mixture containing the test compound indicates that the test compound interferes with the interaction of the test compound and its reaction partner.

[2665] K. Compositions and Methods for the Treatment of Immune Related Diseases

[2666] The compositions useful in the treatment of immune related diseases include, without limitation, proteins, antibodies, small organic molecules, peptides, phosphopeptides, antisense and ribozyme molecules, triple helix molecules, etc. that inhibit or stimulate immune function, for example, T cell proliferation/activation, lymphokine release, or immune cell infiltration.

[2667] For example, antisense RNA and RNA molecules act to directly block the translation of mRNA by hybridizing to targeted mRNA and preventing protein translation. When antisense DNA is used, oligodeoxyribonucleotides derived from the translation initiation site, e.g., between about −10 and +10 positions of the target gene nucleotide sequence, are preferred.

[2668] Ribozymes are enzymatic RNA molecules capable of catalyzing the specific cleavage of RNA. Ribozymes act by sequence-specific hybridization to the complementary target RNA, followed by endonucleolytic cleavage. Specific ribozyme cleavage sites within a potential RNA target can be identified by known techniques. For further details see, e.g., Rossi, Current Biology 4, 469-471 (1994), and PCT publication No. WO 97/33551 (published Sep. 18, 1997).

[2669] Nucleic acid molecules in triple helix formation used to inhibit transcription should be single-stranded and composed of deoxynucleotides. The base composition of these oligonucleotides is designed such that it promotes triple helix formation via Hoogsteen base pairing rules, which generally require sizeable stretches of purines or pyrimidines on one strand of a duplex. For further details see, e.g., PCT publication No. WO 97/33551, supra.

[2670] These molecules can be identified by any or any combination of the screening assays discussed above and/or by any other screening techniques well known for those skilled in the art.

[2671] L. Anti-PRO Antibodies

[2672] The present invention further provides anti-PRO antibodies. Exemplary antibodies include polyclonal, monoclonal, humanized, bispecific, and heteroconjugate antibodies.

[2673] 1. Polyclonal Antibodies

[2674] The anti-PRO antibodies may comprise polyclonal antibodies. Methods of preparing polyclonal antibodies are known to the skilled artisan. Polyclonal antibodies can be raised in a mammal, for example, by one or more injections of an immunizing agent and, if desired, an adjuvant. Typically, the immunizing agent and/or adjuvant will be injected in the mammal by multiple subcutaneous or intraperitoneal injections. The immunizing agent may include the PRO polypeptide or a fusion protein thereof. It may be useful to conjugate the immunizing agent to a protein known to be immunogenic in the mammal being immunized. Examples of such immunogenic proteins include but are not limited to keyhole limpet hemocyanin, serum albumin, bovine thyroglobulin, and soybean trypsin inhibitor. Examples of adjuvants which may be employed include Freund's complete adjuvant and MPL-TDM adjuvant (monophosphoryl Lipid A, synthetic trehalose dicorynomycolate). The immunization protocol may be selected by one skilled in the art without undue experimentation.

[2675] 2. Monoclonal Antibodies

[2676] The anti-PRO antibodies may, alternatively, be monoclonal antibodies. Monoclonal antibodies may be prepared using hybridoma methods, such as those described by Kohler and Milstein, Nature, 256:495 (1975). In a hybridoma method, a mouse, hamster, or other appropriate host animal, is typically immunized with an immunizing agent to elicit lymphocytes that produce or are capable of producing antibodies that will specifically bind to the immunizing agent. Alternatively, the lymphocytes may be immunized in vitro.

[2677] The immunizing agent will typically include the PRO polypeptide or a fusion protein thereof. Generally, either peripheral blood lymphocytes (“PBLs”) are used if cells of human origin are desired, or spleen cells or lymph node cells are used if non-human mammalian sources are desired. The lymphocytes are then fused with an immortalized cell line using a suitable fusing agent, such as polyethylene glycol, to form a hybridoma cell [Goding, Monoclonal Antibodies: Principles and Practice, Academic Press, (1986) pp. 59-103]. Immortalized cell lines are usually transformed mammalian cells, particularly myeloma cells of rodent, bovine and human origin. Usually, rat or mouse myeloma cell lines are employed. The hybridoma cells may be cultured in a suitable culture medium that preferably contains one or more substances that inhibit the growth or survival of the unfused, immortalized cells. For example, if the parental cells lack the enzyme hypoxanthine guanine phosphoribosyl transferase (HGPRT or HPRT), the culture medium for the hybridomas typically will include hypoxanthine, aminopterin, and thymidine (“HAT medium”), which substances prevent the growth of HGPRT-deficient cells.

[2678] Preferred immortalized cell lines are those that fuse efficiently, support stable high level expression of antibody by the selected antibody-producing cells, and are sensitive to a medium such as HAT medium. More preferred immortalized cell lines are murine myeloma lines, which can be obtained, for instance, from the Salk Institute Cell Distribution Center, San Diego, Calif. and the American Type Culture Collection, Manassas, Va. Human myeloma and mouse-human heteromyeloma cell lines also have been described for the production of human monoclonal antibodies [Kozbor, J. Immunol., 133:3001 (1984); Brodeur et al., Monoclonal Antibody Production Techniques and Applications, Marcel Dekker, Inc., New York, (1987) pp. 51-63].

[2679] The culture medium in which the hybridoma cells are cultured can then be assayed for the presence of monoclonal antibodies directed against PRO. Preferably, the binding specificity of monoclonal antibodies produced by the hybridoma cells is determined by immunoprecipitation or by an in vitro binding assay, such as radioimmunoassay (RIA) or enzyme-linked immunoabsorbent assay (ELISA). Such techniques and assays are known in the art. The binding affinity of the monoclonal antibody can, for example, be determined by the Scatchard analysis of Munson and Pollard, Anal. Biochem., 107:220 (1980).

[2680] After the desired hybridoma cells are identified, the clones may be subcloned by limiting dilution procedures and grown by standard methods [Goding, supra]. Suitable culture media for this purpose include, for example, Dulbecco's Modified Eagle's Medium and RPMI-1640 medium. Alternatively, the hybridoma cells may be grown in vivo as ascites in a mammal.

[2681] The monoclonal antibodies secreted by the subclones may be isolated or purified from the culture medium or ascites fluid by conventional immunoglobulin purification procedures such as, for example, protein A-Sepharose, hydroxylapatite chromatography, gel electrophoresis, dialysis, or affinity chromatography.

[2682] The monoclonal antibodies may also be made by recombinant DNA methods, such as those described in U.S. Pat. No. 4,816,567. DNA encoding the monoclonal antibodies of the invention can be readily isolated and sequenced using conventional procedures (e.g., by using oligonucleotide probes that are capable of binding specifically to genes encoding the heavy and light chains of murine antibodies). The hybridoma cells of the invention serve as a preferred source of such DNA. Once isolated, the DNA may be placed into expression vectors, which are then transfected into host cells such as simian COS cells, Chinese [symbol] ster ovary (CHO) cells, or myeloma cells that do not otherwise produce immunoglobulin protein, to [symbol] the synthesis of monoclonal antibodies in the recombinant host cells. The DNA also may be modified, for example, by substituting the coding sequence for human heavy and light chain constant [symbol] ains in place of the homologous murine sequences [U.S. Pat. No. 4,816,567; Morrison et al., supra] or [symbol] covalently joining to the immunoglobulin coding sequence all or part of the coding sequence for a non- [symbol] immunoglobulin polypeptide. Such a non-immunoglobulin polypeptide can be substituted for the constant [symbol] ains of an antibody of the invention, or can be substituted for the variable domains of one antigen- [symbol] mbining site of an antibody of the invention to create a chimeric bivalent antibody.

[2683] The antibodies may be monovalent antibodies. Methods for preparing monovalent antibodies are well known in the art. For example, one method involves recombinant expression of immunoglobulin light chain and modified heavy chain. The heavy chain is truncated generally at any point in the Fc region so as to prevent heavy chain crosslinking. Alternatively, the relevant cysteine residues are substituted with another amino acid residue or are deleted so as to prevent crosslinking.

[2684] In vitro methods are also suitable for preparing monovalent antibodies. Digestion of antibodies to produce fragments thereof, particularly, Fab fragments, can be accomplished using routine techniques known in the art.

[2685] 3. Human and Humanized Antibodies

[2686] The anti-PRO antibodies of the invention may further comprise humanized antibodies or human antibodies. Humanized forms of non-human (e.g., murine) antibodies are chimeric immunoglobulins, immunoglobulin chains or fragments thereof (such as Fv, Fab, Fab′, F(ab′)₂ or other antigen-binding subsequences of antibodies) which contain minimal sequence derived from non-human immunoglobulin. Humanized antibodies include human immunoglobulins (recipient antibody) in which residues from a complementary determining region (CDR) of the recipient are replaced by residues from a CDR of a non-human species (donor antibody) such as mouse, rat or rabbit having the desired specificity, affinity and capacity. In some instances, Fv framework residues of the human immunoglobulin are replaced by corresponding non-human residues. Humanized antibodies may also comprise residues which are found neither in the recipient antibody nor in the imported CDR or framework sequences. In general, the humanized antibody will comprise substantially all of at least one, and typically two, variable domains, in which all or substantially all of the CDR regions correspond to those of a non-human immunoglobulin and all or substantially all of the FR regions are those of a human immunoglobulin consensus sequence. The humanized antibody optimally also will comprise at least a portion of an immunoglobulin constant region (Fc), typically that of a human immunoglobulin [Jones et al., Nature, 321:522-525 (1986); Riechmann et al., Nature, 332:323-329 (1988); and Presta, Curr. Op. Struct. Biol., 2:593-596 (1992)].

[2687] Methods for humanizing non-human antibodies are well known in the art. Generally, a humanized antibody has one or more amino acid residues introduced into it from a source which is non-human. These non-human amino acid residues are often referred to as “import” residues, which are typically taken from an “import” variable domain. Humanization can be essentially performed following the method of Winter and co-workers [Jones et al., Nature, 321:522-525 (1986); Riechmann et al., Nature, 332:323-327 (1988); Verhoeyen et al., Science, 239:1534-1536 (1988)], by substituting rodent CDRs or CDR sequences for the corresponding sequences of a human antibody. Accordingly, such “humanized” antibodies are chimeric antibodies (U.S. Pat. No. 4,816,567), wherein substantially less than an intact human variable domain has been substituted by the corresponding sequence from a non-human species. In practice, humanized antibodies are typically human antibodies in which some CDR residues and possibly some FR residues are substituted by residues from analogous sites in rodent antibodies.

[2688] Human antibodies can also be produced using various techniques known in the art, including phage display libraries [Hoogenboom and Winter, J. Mol. Biol., 227:381 (1991); Marks et al., J. Mol. Biol., 222:581 (1991)]. The techniques of Cole et al. and Boerner et al. are also available for the preparation of human monoclonal antibodies (Cole et al., Monoclonal Antibodies and Cancer Therapy, Alan R. Liss, p. 77 (1985) and Boerner et al., J. Immunol., 147(1):86-95 (1991)). Similarly, human antibodies can be made by introducing of human immunoglobulin loci into transgenic animals, e.g., mice in which the endogenous immunoglobulin genes have been partially or completely inactivated. Upon challenge, human antibody production is observed, which closely resembles that seen in humans in all respects, including gene rearrangement, assembly, and antibody repertoire. This approach is described, for example, in U.S. Pat. Nos. 5,545,807; 5,545,806; 5,569,825; 5,625,126; 5,633,425; 5,661,016, and in the following scientific publications: Marks et al., Bio/Technology 10, 779-783 (1992); Lonberg et al., Nature 368 856-859 (1994); Morrison, Nature 368, 812-13 (1994); Fishwild et al., Nature Biotechnology 14, 845-51 (1996); Neuberger, Nature Biotechnology 14, 826 (1996); Lonberg and Huszar, Intern. Rev. Immunol. 13 65-93 (1995).

[2689] The antibodies may also be affinity matured using known selection and/or mutagenesis methods as described above. Preferred affinity matured antibodies have an affinity which is five times, more preferably 10 times, even more preferably 20 or 30 times greater than the starting antibody (generally murine, humanized or human) from which the matured antibody is prepared.

[2690] 4. Bispecific Antibodies

[2691] Bispecific antibodies are monoclonal, preferably human or humanized, antibodies that have binding specificities for at least two different antigens. In the present case, one of the binding specificities is for the PRO, the other one is for any other antigen, and preferably for a cell-surface protein or receptor or receptor subunit.

[2692] Methods for making bispecific antibodies are known in the art. Traditionally, the recombinant production of bispecific antibodies is based on the co-expression of two immunoglobulin heavy-chain/light-chain pairs, where the two heavy chains have different specificities [Milstein and Cuello, Nature, 305:537-539 (1983)]. Because of the random assortment of immunoglobulin heavy and light chains, these hybridomas (quadromas) produce a potential mixture of ten different antibody molecules, of which only one has the correct bispecific structure. The purification of the correct molecule is usually accomplished by affinity chromatography steps. Similar procedures are disclosed in WO 93/08829, published 13 May 1993, and in Traunecker et al., EMBO J., 10:3655-3659 (1991).

[2693] Antibody variable domains with the desired binding specificities (antibody-antigen combining sites) can be fused to immunoglobulin constant domain sequences. The fusion preferably is with an immunoglobulin heavy-chain constant domain, comprising at least part of the hinge, CH2, and CH3 regions. It is preferred to have the first heavy-chain constant region (CH1) containing the site necessary for light-chain binding present in at least one of the fusions. DNAs encoding the immunoglobulin heavy-chain fusions and, if desired, the immunoglobulin light chain, are inserted into separate expression vectors, and are co-transfected into a suitable host organism. For further details of generating bispecific antibodies see, for example, Suresh et al., Methods in Enzymology, 121:210 (1986).

[2694] According to another approach described in WO 96/27011, the interface between a pair of antibody molecules can be engineered to maximize the percentage of heterodimers which are recovered from recombinant cell culture. The preferred interface comprises at least a part of the CH3 region of an antibody constant domain. In this method, one or more small amino acid side chains from the interface of the first antibody molecule are replaced with larger side chains (e.g. tyrosine or tryptophan). Compensatory “cavities” of identical or similar size to the large side chain(s) are created on the interface of the second antibody molecule by replacing large amino acid side chains with smaller ones (e.g. alanine or threonine). This provides a mechanism for increasing the yield of the heterodimer over other unwanted end-products such as homodimers.

[2695] Bispecific antibodies can be prepared as full length antibodies or antibody fragments (e.g. F(ab′)₂ bispecific antibodies). Techniques for generating bispecific antibodies from antibody fragments have been described in the literature. For example, bispecific antibodies can be prepared can be prepared using chemical linkage. Brennan et al., Science 229:81 (1985) describe a procedure wherein intact antibodies are proteolytically cleaved to generate F(ab′)₂ fragments. These fragments are reduced in the presence of the dithiol complexing agent sodium arsenite to stabilize vicinal dithiols and prevent intermolecular disulfide formation. The Fab′ fragments generated are then converted to thionitrobenzoate (TNB) derivatives. One of the Fab′-TNB derivatives is then reconverted to the Fab′-thiol by reduction with mercaptoethylamine and is mixed with an equimolar amount of the other Fab′-TNB derivative to form the bispecific antibody. The bispecific antibodies produced can be used as agents for the selective immobilization of enzymes.

[2696] Fab′ fragments may be directly recovered from E. coli and chemically coupled to form bispecific antibodies. Shalaby et al., J. Exp. Med. 175:217-225 (1992) describe the production of a fully humanized bispecific antibody F(ab′)₂ molecule. Each Fab′ fragment was separately secreted from E. coli and subjected to directed chemical coupling in vitro to form the bispecific antibody. The bispecific antibody thus formed was able to bind to cells overexpressing the ErbB2 receptor and normal human T cells, as well as trigger the lytic activity of human cytotoxic lymphocytes against human breast tumor targets.

[2697] Various technique for making and isolating bispecific antibody fragments directly from recombinant cell culture have also been described. For example, bispecific antibodies have been produced using leucine zippers. Kostelny et al., J. Immunol. 148(5):1547-1553 (1992). The leucine zipper peptides from the Fos and Jun proteins were linked to the Fab′ portions of two different antibodies by gene fusion. The antibody homodimers were reduced at the hinge region to form monomers and then re-oxidized to form the antibody heterodimers. This method can also be utilized for the production of antibody homodimers. The “diabody” technology described by Hollinger et al., Proc. Natl. Acad. Sci. USA 90:6444-6448 (1993) has provided an alternative mechanism for making bispecific antibody fragments. The fragments comprise a heavy-chain variable domain (V_{H}) connected to a light-chain variable domain (V_{L}) by a linker which is too short to allow pairing between the two domains on the same chain. Accordingly, the V_{H} and V_{L} domains of one fragment are forced to pair with the complementary V_{L} and V_{H} domains of another fragment, thereby forming two antigen-binding sites. Another strategy for making bispecific antibody fragments by the use of single-chain Fv (sFv) dimers has also been reported. See, Gruber et al., J. Immunol. 152:5368 (1994). Antibodies with more than two valencies are contemplated. For example, trispecific antibodies can be prepared. Tutt et al., J. Immunol. 147:60 (1991).

[2698] Exemplary bispecific antibodies may bind to two different epitopes on a given PRO polypeptide herein. Alternatively, an anti-PRO polypeptide arm may be combined with an arm which binds to a triggering molecule on a leukocyte such as a T-cell receptor molecule (e.g. CD2, CD3, CD28, or B7), or Fc receptors for IgG (FcγR), such as FcγRI (CD64), FcγRII (CD32) and FcγRIII (CD16) so as to focus cellular defense mechanisms to the cell expressing the particular PRO polypeptide. Bispecific antibodies may also be used to localize cytotoxic agents to cells which express a particular PRO polypeptide. These antibodies possess a PRO-binding arm and an arm which binds a cytotoxic agent or a radionuclide chelator, such as EOTUBE, DPTA, DOTA, or TETA. Another bispecific antibody of interest binds the PRO polypeptide and further binds tissue factor (TF).

[2699] 5. Heteroconjugate Antibodies

[2700] Heteroconjugate antibodies are also within the scope of the present invention. Heteroconjugate antibodies are composed of two covalently joined antibodies. Such antibodies have, for example, been proposed to target immune system cells to unwanted cells [U.S. Pat. No. 4,676,980], and for treatment of HIV infection [WO 91/00360; WO 92/200373; EP 03089]. It is contemplated that the antibodies may be prepared in vitro using known methods in synthetic protein chemistry, including those involving crosslinking agents. For example, immunotoxins may be constructed using a disulfide exchange reaction or by forming a thioether bond. Examples of suitable reagents for this purpose include iminothiolate and methyl-4-mercaptobutyrimidate and those disclosed, for example, in U.S. Pat. No. 4,676,980.

[2701] 6. Effector Function Engineering

[2702] It may be desirable to modify the antibody of the invention with respect to effector function, so as to enhance, e.g., the effectiveness of the antibody in treating cancer. For example, cysteine residue(s) may be introduced into the Fc region, thereby allowing interchain disulfide bond formation in this region. The homodimeric antibody thus generated may have improved internalization capability and/or increased complement-mediated cell killing and antibody-dependent cellular cytotoxicity (ADCC). See Caron et al., J. Exp Med., 176: 1191-1195 (1992) and Shopes, J. Immunol., 148: 2918-2922 (1992). Homodimeric antibodies with enhanced anti-tumor activity may also be prepared using heterobifunctional cross-linkers as described in Wolff et al. Cancer Research, 53: 2560-2565 (1993). Alternatively, an antibody can be engineered that has dual Fc regions and may thereby have enhanced complement lysis and ADCC capabilities. See Stevenson et al., Anti-Cancer Drug Design, 3: 219-230 (1989).

[2703] 7. Immunoconjugates

[2704] The invention also pertains to immunoconjugates comprising an antibody conjugated to a cytotoxic agent such as a chemotherapeutic agent, toxin (e.g., an enzymatically active toxin of bacterial, fungal, plant, or animal origin, or fragments thereof), or a radioactive isotope (i.e., a radioconjugate).

[2705] Chemotherapeutic agents useful in the generation of such immunoconjugates have been described above. Enzymatically active toxins and fragments thereof that can be used include diphtheria A chain, nonbinding active fragments of diphtheria toxin, exotoxin A chain (from Pseudomonas aeruginosa), ricin A chain, abrin A chain, modeccin A chain, alpha-sarcin, Aleurites fordii proteins, dianthin proteins, Phytolaca americana proteins (PAPI, PAPII, and PAP-S), momordica charantia inhibitor, curcin, crotin, sapaonaria officinalis inhibitor, gelonin, mitogellin, restrictocin, phenomycin, enomycin, and the tricothecenes. A variety of radionuclides are available for the production of radioconjugated antibodies. Examples include ²¹²Bi, ¹³¹I, ¹³¹In, ⁹⁰Y, and ¹⁸⁶Re.

[2706] Conjugates of the antibody and cytotoxic agent are made using a variety of bifunctional protein-coupling agents such as N-succinimidyl-3-(2-pyridyldithiol)propionate (SPDP), iminothiolane (IT), bifunctional derivatives of imidoesters (such as dimethyl adipimidate HCL), active esters (such as disuccinimidyl suberate), aldehydes (such as glutareldehyde), bis-azido compounds (such as bis(p-azidobenzoyl)hexanediamine), bis-diazonium derivatives (such as bis-(p-diazoniumbenzoyl)ethylenediamine), diisocyanates (such as tolyene 2,6-diisocyanate), and bis-active fluorine compounds (such as 1,5-difluoro-2,4-dinitrobenzene). For example, a ricin immunotoxin can be prepared as described in Vitetta et al., Science, 238: 1098 (1987). Carbon-14-labeled 1-isothiocyanatobenzyl-3-methyldiethylene triaminepentaacetic acid (MX-DTPA) is an exemplary chelating agent for conjugation of radionucleotide to the antibody. See WO94/11026.

[2707] In another embodiment, the antibody may be conjugated to a “receptor” (such streptavidin) for utilization in tumor pretargeting wherein the antibody-receptor conjugate is administered to the patient, followed by removal of unbound conjugate from the circulation using a clearing agent and then administration of a “ligand” (e.g., avidin) that is conjugated to a cytotoxic agent (e.g., a radionucleotide).

[2708] 8. Immunoliposomes

[2709] The antibodies disclosed herein may also be formulated as immunoliposomes. Liposomes containing the antibody are prepared by methods known in the art, such as described in Epstein et al., Proc. Natl. Acad. Sci. USA, 82: 3688 (1985); Hwang et al., Proc. Natl. Acad. Sci. USA, 77: 4030 (1980); and U.S. Pat. Nos. 4,485,045 and 4,544,545. Liposomes with enhanced circulation time are disclosed in U.S. Pat. No. 5,013,556.

[2710] Particularly useful liposomes can be generated by the reverse-phase evaporation method with a lipid composition comprising phosphatidylcholine, cholesterol, and PEG-derivatized phosphatidylethanolamine (PEG-PE). Liposomes are extruded through filters of defined pore size to yield liposomes with the desired diameter. Fab′ fragments of the antibody of the present invention can be conjugated to the liposomes as described in Martin et al., J. Biol. Chem., 257: 286-288 (1982) via a disulfide-interchange reaction. A chemotherapeutic agent (such as Doxorubicin) is optionally contained within the liposome. See Gabizon et al., J. National Cancer Inst., 81(19):1484 (1989).

[2711] M. Pharmaceutical Compositions

[2712] The active PRO molecules of the invention (e.g., PRO polypeptides, anti-PRO antibodies, and/or variants of each) as well as other molecules identified by the screening assays disclosed above, can be administered for the treatment of immune related diseases, in the form of pharmaceutical compositions.

[2713] Therapeutic formulations of the active PRO molecule, preferably a polypeptide or antibody of the invention, are prepared for storage by mixing the active molecule having the desired degree of purity with optional pharmaceutically acceptable carriers, excipients or stabilizers (Remington's Pharmaceutical Sciences 16th edition, Osol, A. Ed. [1980]), in the form of lyophilized formulations or aqueous solutions. Acceptable carriers, excipients, or stabilizers are nontoxic to recipients at the dosages and concentrations employed, and include buffers such as phosphate, citrate, and other organic acids; antioxidants including ascorbic acid and methionine; preservatives (such as octadecyldimethylbenzyl ammonium chloride; hexamethonium chloride; benzalkonium chloride, benzethonium chloride; phenol, butyl or benzyl alcohol; alkyl parabens such as methyl or propyl paraben; catechol; resorcinol; cyclohexanol; 3-pentanol; and m-cresol); low molecular weight (less than about 10 residues) polypeptides; proteins, such as serum albumin, gelatin, or immunoglobulins; hydrophilic polymers such as polyvinylpyrrolidone; amino acids such as glycine, glutamine, asparagine, histidine, arginine, or lysine; monosaccharides, disaccharides, and other carbohydrates including glucose, mannose, or dextrins; chelating agents such as EDTA; sugars such as sucrose, mannitol, trehalose or sorbitol; salt-forming counter-ions such as sodium; metal complexes (e.g., Zn-protein complexes); and/or non-ionic surfactants such as TWEEN™, PLURONICS™ or polyethylene glycol (PEG).

[2714] Compounds identified by the screening assays disclosed herein can be formulated in an analogous manner, using standard techniques well known in the art.

[2715] Lipofections or liposomes can also be used to deliver the PRO molecule into cells. Where antibody fragments are used, the smallest inhibitory fragment which specifically binds to the binding domain of the target protein is preferred. For example, based upon the variable region sequences of an antibody, peptide molecules can be designed which retain the ability to bind the target protein sequence. Such peptides can be synthesized chemically and/or produced by recombinant DNA technology (see, e.g., Marasco et al., Proc. Natl. Acad. Sci. USA 90, 7889-7893 [1993]).

[2716] The formulation herein may also contain more than one active compound as necessary for the particular indication being treated, preferably those with complementary activities that do not adversely affect each other. Alternatively, or in addition, the composition may comprise a cytotoxic agent, cytokine or growth inhibitory agent. Such molecules are suitably present in combination in amounts that are effective for the purpose intended.

[2717] The active PRO molecules may also be entrapped in microcapsules prepared, for example, by coacervation techniques or by interfacial polymerization, for example, hydroxymethylcellulose or gelatin-microcapsules and poly-(methylmethacylate) microcapsules, respectively, in colloidal drug delivery systems (for example, liposomes, albumin microspheres, microemulsions, nano-particles and nanocapsules) or in macroemulsions. Such techniques are disclosed in Remington's Pharmaceutical Sciences 16th edition, Osol, A. Ed. (1980).

[2718] The formulations to be used for in vivo administration must be sterile. This is readily accomplished by filtration through sterile filtration membranes.

[2719] Sustained-release preparations or the PRO molecules may be prepared. Suitable examples of sustained-release preparations include semipermeable matrices of solid hydrophobic polymers containing the antibody, which matrices are in the form of shaped articles, e.g., films, or microcapsules. Examples of sustained-release matrices include polyesters, hydrogels (for example, poly(2-hydroxyethyl-methacrylate), or poly(vinylalcohol)), polylactides (U.S. Pat. No. 3,773,919), copolymers of L-glutamic acid and γ-ethyl-L- [symbol] mate, non-degradable ethylene-vinyl acetate, degradable lactic acid-glycolic acid copolymers such as [symbol] UPRON DEPOT™ (injectable microspheres composed of lactic acid-glycolic acid copolymer and [symbol] prolide acetate), and poly-D-(−)-3-hydroxybutyric acid. While polymers such as ethylene-vinyl acetate [symbol] lactic acid-glycolic acid enable release of molecules for over 100 days, certain hydrogels release proteins [symbol] shorter time periods. When encapsulated antibodies remain in the body for a long time, they may [symbol] or aggregate as a result of exposure to moisture at 37° C., resulting in a loss of biological activity [symbol] possible changes in immunogenicity. Rational strategies can be devised for stabilization depending on [symbol] mechanism involved. For example, if the aggregation mechanism is discovered to be intermolecular S—S [symbol] formation through thio-disulfide interchange, stabilization may be achieved by modifying sulfhydryl residues, lyophilizing from acidic solutions, controlling moisture content, using appropriate additives, and developing specific polymer matrix compositions.

[2720] N. Methods of Treatment

[2721] It is contemplated that the polypeptides, antibodies and other active compounds of the present invention may be used to treat various immune related diseases and conditions, such as T cell mediated diseases, including those characterized by infiltration of inflammatory cells into a tissue, stimulation of T-cell proliferation, inhibition of T-cell proliferation, increased or decreased vascular permeability or the inhibition thereof.

[2722] Exemplary conditions or disorders to be treated with the polypeptides, antibodies and other compounds of the invention, include, but are not limited to systemic lupus erythematosis, rheumatoid arthritis, juvenile chronic arthritis, osteoarthritis, spondyloarthropathies, systemic sclerosis (scleroderma), idiopathic inflammatory myopathies (dermatomyositis, polymyositis), Sjögren's syndrome, systemic vasculitis, sarcoidosis, autoimmune hemolytic anemia (immune pancytopenia, paroxysmal nocturnal hemoglobinuria), autoimmune thrombocytopenia (idiopathic thrombocytopenic purpura, immune-mediated thrombocytopenia), thyroiditis (Grave's disease, Hashimoto's thyroiditis, juvenile lymphocytic thyroiditis, atrophic thyroiditis), diabetes mellitus, immune-mediated renal disease (glomerulonephritis, tubulointerstitial nephritis), demyelinating diseases of the central and peripheral nervous systems such as multiple sclerosis, idiopathic demyelinating polyneuropathy or Guillain-Barré syndrome, and chronic inflammatory demyelinating polyneuropathy, hepatobiliary diseases such as infectious hepatitis (hepatitis A, B, C, D, E and other non-hepatotropic viruses), autoimmune chronic active hepatitis, primary biliary cirrhosis, granulomatous hepatitis, and sclerosing cholangitis, inflammatory bowel disease (ulcerative colitis: Crohn's disease), gluten-sensitive enteropathy, and Whipple's disease, autoimmune or immune-mediated skin diseases including bullous skin diseases, erythema multiforme and contact dermatitis, psoriasis, allergic diseases such as asthma, allergic rhinitis, atopic dermatitis, food hypersensitivity and urticaria, immunologic diseases of the lung such as eosinophilic pneumonias, idiopathic pulmonary fibrosis and hypersensitivity pneumonitis, transplantation associated diseases including graft rejection and graft-versus-host-disease.

[2723] In systemic lupus erythematosus, the central mediator of disease is the production of auto-reactive antibodies to self proteins/tissues and the subsequent generation of immune-mediated inflammation. Antibodies either directly or indirectly mediate tissue injury. Though T lymphocytes have not been shown to be directly involved in tissue damage, T lymphocytes are required for the development of auto-reactive antibodies. The genesis of the disease is thus T lymphocyte dependent. Multiple organs and systems are affected clinically including kidney, lung, musculoskeletal system, mucocutaneous, eye, central nervous system, cardiovascular system, gastrointestinal tract, bone marrow and blood.

[2724] Rheumatoid arthritis (RA) is a chronic systemic autoimmune inflammatory disease that mainly involves the synovial membrane of multiple joints with resultant injury to the articular cartilage. The pathogenesis is T lymphocyte dependent and is associated with the production of rheumatoid factors, auto-antibodies directed against self IgG, with the resultant formation of immune complexes that attain high levels in joint fluid and blood. These complexes in the joint may induce the marked infiltrate of lymphocytes and monocytes into the synovium and subsequent marked synovial changes; the joint space/fluid if infiltrated by similar cells with the addition of numerous neutrophils. Tissues affected are primarily the joints, often in symmetrical pattern. However, extra-articular disease also occurs in two major forms. One form is the development of extra-articular lesions with ongoing progressive joint disease and typical lesions of pulmonary fibrosis, vasculitis, and cutaneous ulcers. The second form of extra-articular disease is the so called Felty's syndrome which occurs late in the RA disease course, sometimes after joint disease has become quiescent, and involves the presence of neutropenia, thrombocytopenia and splenomegaly. This can be accompanied by vasculitis in multiple organs with formations of infarcts, skin ulcers and gangrene. Patients often also develop rheumatoid nodules in the subcutis tissue overlying affected joints; the nodules late stage have necrotic centers surrounded by a mixed inflammatory cell infiltrate. Other manifestations which can occur in RA include: pericarditis, pleuritis, coronary arteritis, intestitial pneumonitis with pulmonary fibrosis, keratoconjunctivitis sicca, and rhematoid nodules.

[2725] Juvenile chronic arthritis is a chronic idiopathic inflammatory disease which begins often at less than 16 years of age. Its phenotype has some similarities to RA; some patients which are rhematoid factor positive are classified as juvenile rheumatoid arthritis. The disease is sub-classified into three major categories: pauciarticular, polyarticular, and systemic. The arthritis can be severe and is typically destructive and leads to joint ankylosis and retarded growth. Other manifestations can include chronic anterior uveitis and systemic amyloidosis.

[2726] Spondyloarthropathies are a group of disorders with some common clinical features and the common association with the expression of HLA-B27 gene product. The disorders include: ankylosing sponylitis, Reiter's syndrome (reactive arthritis), arthritis associated with inflammatory bowel disease, spondylitis associated with psoriasis, juvenile onset spondyloarthropathy and undifferentiated spondyloarthropathy. Distinguishing features include sacroileitis with or without spondylitis; inflammatory asymmetric arthritis; association with HLA-B27 (a serologically defined allele of the HLA-B locus of class I MHC); ocular inflammation, and absence of autoantibodies associated with other rheumatoid disease. The cell most implicated as key to induction of the disease is the CD8+ T lymphocyte, a cell which targets antigen presented by class I MHC molecules. CD8+ T cells may react against the class I MHC allele HLA-B27 as if it were a foreign peptide expressed by MHC class I molecules. It has been hypothesized that an epitope of HLA-B27 may mimic a bacterial or other microbial antigenic epitope and thus induce a CD8+ T cells response.

[2727] Systemic sclerosis (scleroderma) has an unknown etiology. A hallmark of the disease is induration of the skin; likely this is induced by an active inflammatory process. Scleroderma can be localized or systemic; vascular lesions are common and endothelial cell injury in the microvasculature is an early and important event in the development of systemic sclerosis; the vascular injury may be immune mediated. An immunologic basis is implied by the presence of mononuclear cell infiltrates in the cutaneous lesions and the presence of anti-nuclear antibodies in many patients. ICAM-1 is often upregulated on the cell surface of fibroblasts in skin lesions suggesting that T cell interaction with these cells may have a role in the pathogenesis of the disease. Other organs involved include: the gastrointestinal tract: smooth muscle atrophy and fibrosis resulting in abnormal peristalsis/motility; kidney: concentric subendothelial intimal proliferation affecting small arcuate and interlobular arteries with resultant reduced renal cortical blood flow, results in proteinuria, azotemia and hypertension; skeletal muscle: atrophy, interstitial fibrosis; inflammation; lung: interstitial pneumonitis and interstitial fibrosis; and heart: contraction band necrosis, scarring/fibrosis.

[2728] Idiopathic inflammatory myopathies including dermatomyositis, polymyositis and others are disorders of chronic muscle inflammation of unknown etiology resulting in muscle weakness. Muscle injury/inflammation is often symmetric and progressive. Autoantibodies are associated with most forms. These myositis-specific autoantibodies are directed against and inhibit the function of components, proteins and RNA's, involved in protein synthesis.

[2729] Sjögren's syndrome is due to immune-mediated inflammation and subsequent functional destruction of the tear glands and salivary glands. The disease can be associated with or accompanied by inflammatory connective tissue diseases. The disease is associated with autoantibody production against Ro and La antigens, both of which are small RNA-protein complexes. Lesions result in keratoconjunctivitis sicca, xerostomia, with other manifestations or associations including bilary cirrhosis, peripheral or sensory neuropathy, and palpable purpura.

[2730] Systemic vasculitis are diseases in which the primary lesion is inflammation and subsequent damage to blood vessels which results in ischemia/necrosis/degeneration to tissues supplied by the affected vessels and eventual end-organ dysfunction in some cases. Vasculitides can also occur as a secondary lesion or sequelae to other immune-inflammatory mediated diseases such as rheumatoid arthritis, systemic sclerosis, etc., particularly in diseases also associated with the formation of immune complexes. Diseases in the primary systemic vasculitis group include: systemic necrotizing vasculitis: polyarteritis nodosa, allergic angiitis and granulomatosis, polyangiitis; Wegener's granulomatosis; lymphomatoid granulomatosis; and giant cell arteritis. Miscellaneous vasculitides include: mucocutaneous lymph node syndrome (MLNS or Kawasaki's disease), isolated CNS vasculitis, Behet's disease, thromboangitis obliterans (Buerger's disease) and cutaneous necrotizing venulitis. The pathogenic mechanism of most of the types of vasculitis listed is believed to be primarily due to the deposition of immunoglobulin complexes in the vessel wall and subsequent induction of an inflammatory response either via ADCC, complement activation, or both.

[2731] Sarcoidosis is a condition of unknown etiology which is characterized by the presence of epitheloid granulomas in nearly any tissue in the body; involvement of the lung is most common. The pathogenesis involves the persistence of activated macrophages and lymphoid cells at sites of the disease with subsequent chronic sequelae resultant from the release of locally and systemically active products released by these cell types.

[2732] Autoimmune hemolytic anemia including autoimmune hemolytic anemia, immune pancytopenia, and paroxysmal noctural hemoglobinuria is a result of production of antibodies that react with antigens expressed on the surface of red blood cells (and in some cases other blood cells including platelets as well) and is a reflection of the removal of those antibody coated cells via complement mediated lysis and/or ADCC/Fc-receptor-mediated mechanisms.

[2733] In autoimmune thrombocytopenia including thrombocytopenic purpura, and immune-mediated thrombocytopenia in other clinical settings, platelet destruction/removal occurs as a result of either antibody or complement attaching to platelets and subsequent removal by complement lysis, ADCC or FC-receptor mediated mechanisms.

[2734] Thyroiditis including Grave's disease, Hashimoto's thyroiditis, juvenile lymphocytic thyroiditis, and atrophic thyroiditis, are the result of an autoimmune response against thyroid antigens with production of antibodies that react with proteins present in and often specific for the thyroid gland. Experimental models exist including spontaneous models: rats (BUF and BB rats) and chickens (obese chicken strain); inducible models: immunization of animals with either thyroglobulin, thyroid microsomal antigen (thyroid peroxidase).

[2735] Type I diabetes mellitus or insulin-dependent diabetes is the autoimmune destruction of pancreatic islet β cells; this destruction is mediated by auto-antibodies and auto-reactive T cells. Antibodies to insulin or the insulin receptor can also produce the phenotype of insulin-non-responsiveness.

[2736] Immune mediated renal diseases, including glomerulonephritis and tubulointerstitial nephritis, are the result of antibody or T lymphocyte mediated injury to renal tissue either directly as a result of the production of autoreactive antibodies or T cells against renal antigens or indirectly as a result of the deposition of antibodies and/or immune complexes in the kidney that are reactive against other, non-renal antigens. Thus other immune-mediated diseases that result in the formation of immune-complexes can also induce immune mediated renal disease as an indirect sequelae. Both direct and indirect immune mechanisms result in inflammatory response that produces/induces lesion development in renal tissues with resultant organ function impairment and in some cases progression to renal failure. Both humoral and cellular immune mechanisms can be involved in the pathogenesis of lesions.

[2737] Demyelinating diseases of the central and peripheral nervous systems, including Multiple Sclerosis; idiopathic demyelinating polyneuropathy or Guillain-Barré syndrome; and Chronic Inflammatory Demyelinating Polyneuropathy, are believed to have an autoimmune basis and result in nerve demyelination as a result of damage caused to oligodendrocytes or to myelin directly. In MS there is evidence to suggest that disease induction and progression is dependent on T lymphocytes. Multiple Sclerosis is a demyelinating disease that is T lymphocyte-dependent and has either a relapsing-remitting course or a chronic progressive course. The etiology is unknown; however, viral infections, genetic predisposition, environment, and autoimmunity all contribute. Lesions contain infiltrates of predominantly T lymphocyte mediated, microglial cells and infiltrating macrophages; CD4+ T lymphocytes are the predominant cell type at lesions. The mechanism of oligodendrocyte cell death and subsequent demyelination is not known but is likely T lymphocyte driven.

[2738] Inflammatory and Fibrotic Lung Disease, including Eosinophilic Pneumonias; Idiopathic Pulmonary Fibrosis, and Hypersensitivity Pneumonitis may involve a disregulated immune-inflammatory response. Inhibition of that response would be of therapeutic benefit.

[2739] Autoimmune or Immune-mediated Skin Disease including Bullous Skin Diseases, Erythema Multiforme, and Contact Dermatitis are mediated by auto-antibodies, the genesis of which is T lymphocyte-dependent.

[2740] Psoriasis is a T lymphocyte-mediated inflammatory disease. Lesions contain infiltrates of T lymphocytes, macrophages and antigen processing cells, and some neutrophils.

[2741] Allergic diseases, including asthma; allergic rhinitis; atopic dermatitis; food hypersensitivity; and urticaria are T lymphocyte dependent. These diseases are predominantly mediated by T lymphocyte induced inflammation, IgE mediated-inflammation or a combination of both.

[2742] Transplantation associated diseases, including Graft rejection and Graft-Versus-Host-Disease (GVHD) are T lymphocyte-dependent; inhibition of T lymphocyte function is ameliorative.

[2743] Other diseases in which intervention of the immune and/or inflammatory response have benefit are infectious disease including but not limited to viral infection (including but not limited to AIDS, hepatitis A, B, C, D, E and herpes) bacterial infection, fungal infections, and protozoal and parasitic infections (molecules (or derivatives/agonists) which stimulate the MLR can be utilized therapeutically to enhance the immune response to infectious agents), diseases of immunodeficiency (molecules/derivatives/agonists) which stimulate the MLR can be utilized therapeutically to enhance the immune response for conditions of inherited, acquired, infectious induced (as in HIV infection), or iatrogenic (i.e., as from chemotherapy) immunodeficiency, and neoplasia.

[2744] It has been demonstrated that some human cancer patients develop an antibody and/or T lymphocyte response to antigens on neoplastic cells. It has also been shown in animal models of neoplasia that enhancement of the immune response can result in rejection or regression of that particular neoplasm. Molecules that enhance the T lymphocyte response in the MLR have utility in vivo in enhancing the immune response against neoplasia. Molecules which enhance the T lymphocyte proliferative response in the MLR (or small molecule agonists or antibodies that affected the same receptor in an agonistic fashion) can be used therapeutically to treat cancer. Molecules that inhibit the lymphocyte response in the MLR also function in vivo during neoplasia to suppress the immune response to a neoplasm; such molecules can either be expressed by the neoplastic cells themselves or their expression can be induced by the neoplasm in other cells. Antagonism of such inhibitory molecules (either with antibody, small molecule antagonists or other means) enhances immune-mediated tumor rejection.

[2745] Additionally, inhibition of molecules with proinflammatory properties may have therapeutic benefit in reperfusion injury; stroke; myocardial infarction; atherosclerosis; acute lung injury; hemorrhagic shock; burn; sepsis/septic shock; acute tubular necrosis; endometriosis; degenerative joint disease and pancreatis.

[2746] The compounds of the present invention, e.g., polypeptides or antibodies, are administered to a mammal, preferably a human, in accord with known methods, such as intravenous administration as a bolus or by continuous infusion over a period of time, by intramuscular, intraperitoneal, intracerobrospinal, subcutaneous, intra-articular, intrasynovial, intrathecal, oral, topical, or inhalation (intranasal, intrapulmonary) routes. Intravenous or inhaled administration of polypeptides and antibodies is preferred.

[2747] In immunoadjuvant therapy, other therapeutic regimens, such administration of an anticancer agent, may be combined with the administration of the proteins, antibodies or compounds of the instant invention. For example, the patient to be treated with a the immunoadjuvant of the invention may also receive an anti-cancer agent (chemotherapeutic agent) or radiation therapy. Preparation and dosing schedules for such chemotherapeutic agents may be used according to manufacturers' instructions or as determined empirically by the skilled practitioner. Preparation and dosing schedules for such chemotherapy are also described in Chemotherapy Service Ed., M. C. Perry, Williams & Wilkins, Baltimore, Md. (1992). The chemotherapeutic agent may precede, or follow administration of the immunoadjuvant or may be given simultaneously therewith. Additionally, an anti-estrogen compound such as tamoxifen or an anti-progesterone such as onapristone (see, EP 616812) may be given in dosages known for such molecules.

[2748] It may be desirable to also administer antibodies against other immune disease associated or tumor associated antigens, such as antibodies which bind to CD20, CD11a, CD18, ErbB2, EGFR, ErbB3, ErbB4, or vascular endothelial factor (VEGF). Alternatively, or in addition, two or more antibodies binding the same or two or more different antigens disclosed herein may be coadministered to the patient. Sometimes, it may be beneficial to also administer one or more cytokines to the patient. In one embodiment, the PRO polypeptides are coadministered with a growth inhibitory agent. For example, the growth inhibitory agent may be administered first, followed by a PRO polypeptide. However, simultaneous administration or administration first is also contemplated. Suitable dosages for the growth inhibitory agent are those presently used and may be lowered due to the combined action (synergy) of the growth inhibitory agent and the PRO polypeptide.

[2749] For the treatment or reduction in the severity of immune related disease, the appropriate dosage of an a compound of the invention will depend on the type of disease to be treated, as defined above, the severity and course of the disease, whether the agent is administered for preventive or therapeutic purposes, previous therapy, the patient's clinical history and response to the compound, and the discretion of the attending physician. The compound is suitably administered to the patient at one time or over a series of treatments.

[2750] For example, depending on the type and severity of the disease, about 1 μg/kg to 15 mg/kg (e.g., 0.1-20 mg/kg) of polypeptide or antibody is an initial candidate dosage for administration to the patient, whether, for example, by one or more separate administrations, or by continuous infusion. A typical daily dosage might range from about 1 μg/kg to 100 mg/kg or more, depending on the factors mentioned above. For repeated administrations over several days or longer, depending on the condition, the treatment is sustained until a desired suppression of disease symptoms occurs. However, other dosage regimens may be useful. The progress of this therapy is easily monitored by conventional techniques and assays.

[2751] O. Articles of Manufacture

[2752] In another embodiment of the invention, an article of manufacture containing materials (e.g., comprising a PRO molecule) useful for the diagnosis or treatment of the disorders described above is provided. The article of manufacture comprises a container and an instruction. Suitable containers include, for example, bottles, vials, syringes, and test tubes. The containers may be formed from a variety of materials such as glass or plastic. The container holds a composition which is effective for diagnosing or treating the condition and may have a sterile access port (for example the container may be an intravenous solution bag or a vial having a stopper pierceable by a hypodermic injection needle). The active agent in the composition is usually a polypeptide or an antibody of the invention. An instruction or label on, or associated with, the container indicates that the composition is used for diagnosing or treating the condition [symbol] choice. The article of manufacture may further comprise a second container comprising a [symbol] pharmaceutically-acceptable buffer, such as phosphate-buffered saline, Ringer's solution and dextrose [symbol] on. It may further include other materials desirable from a commercial and user standpoint, including [symbol] buffers, diluents, filters, needles, syringes, and package inserts with instructions for use.

[2753] P. Diagnosis and Prognosis of Immune Related Disease

[2754] Cell surface proteins, such as proteins which are overexpressed in certain immune related diseases, [symbol] excellent targets for drug candidates or disease treatment. The same proteins along with secreted [symbol] ins encoded by the genes amplified in immune related disease states find additional use in the diagnosis and prognosis of these diseases. For example, antibodies directed against the protein products of genes amplified in multiple sclerosis, rheumatoid arthritis, or another immune related disease, can be used as diagnostics or prognostics.

[2755] For example, antibodies, including antibody fragments, can be used to qualitatively or quantitatively detect the expression of proteins encoded by amplified or overexpressed genes (“marker gene products”). The antibody preferably is equipped with a detectable, e.g., fluorescent label, and binding can be monitored by light microscopy, flow cytometry, fluorimetry, or other techniques known in the art. These techniques are particularly suitable, if the overexpressed gene encodes a cell surface protein. Such binding assays are performed essentially as described above.

[2756] In situ detection of antibody binding to the marker gene products can be performed, for example, by immunofluorescence or immunoelectron microscopy. For this purpose, a histological specimen is removed from the patient, and a labeled antibody is applied to it, preferably by overlaying the antibody on a biological sample. This procedure also allows for determining the distribution of the marker gene product in the tissue examined. It will be apparent for those skilled in the art that a wide variety of histological methods are readily available for in situ detection.

[2757] The following examples are offered for illustrative purposes only, and are not intended to limit the scope of the present invention in any way.

[2758] All patent and literature references cited in the present specification are hereby incorporated by reference in their entirety.

### EXAMPLES

[2759] Commercially available reagents referred to in the examples were used according to manufacturer's instructions unless otherwise indicated. The source of those cells identified in the following examples, and throughout the specification, by ATCC accession numbers is the American Type Culture Collection, Manassas, Va.

### Example 1

### Microarray Analysis of Stimulated T-Cells

[2760] Nucleic acid microarrays, often containing thousands of gene sequences, are useful for identifying differentially expressed genes in diseased tissues as compared to their normal counterparts. Using nucleic acid microarrays, test and control mRNA samples from test and control tissue samples are reverse transcribed and labeled to generate cDNA probes. The cDNA probes are then hybridized to an array of nucleic acids immobilized on a solid support. The array is configured such that the sequence and position of each member of the array is known. For example, a selection of genes known to be expressed in certain disease states may be arrayed on a solid support. Hybridization of a labeled probe with a particular array member indicates that the sample from which the probe was derived expresses that gene. If the hybridization signal of a probe from a test (in this instance, activated CD4+ T cells) sample is greater than hybridization signal of a probe from a control (in this instance, non-stimulated CD4+ T cells) sample, the gene or genes overexpressed in the test tissue are identified. The implication of this result is that an overexpressed protein in a test tissue is useful not only as a diagnostic marker for the presence of the disease condition, but also as a therapeutic target for treatment of the disease condition.

[2761] The methodology of hybridization of nucleic acids and microarray technology is well known in the art. In one example, the specific preparation of nucleic acids for hybridization and probes, slides, and hybridization conditions are all detailed in PCT Patent Application Serial No. PCT/US01/10482, filed on Mar. 30, 2001 and which is herein incorporated by reference.

[2762] The specific conditions for this set of experiments began by collecting 100 ml of fresh blood from donors. Peripheral blood mononuclear cells (PBMC) were isolated with LSM (ficol) (ICN Biomedicals) by step gradient separation. Monocytes were depleted by adherence to culture flask. CD45 RA and CD45 RO high cells were sorted by FACS with additional gating on lymphocytes by forward and side scatter. Cells of intermediate expression of either CD45RA or CD45 RO were not collected. Sorting was verified by re-FACS of samples of the sorted population and found to be approximately 99% correctly sorted. Cells were cultured for 16 hours in RPMI 1640, 10% heat inactivated FBS, 100 units/mL of Penicillin, 100 mg/mL of streptomycin, 2 mM L-glutamine and IL-2 (100 U/ml) and in the presence or absence of plate bound anti-CD3 (10 ug/ml) and soluble anti-CD28 (10 ug/ml). The activation status of the cells was monitored by FACS for cell surface expression of CD69 and CD25. Cells were then pelleted and RNA isolated by Qiagen miniprep and analysis run on Affimax™ (Affymetrix Inc. Santa Clara, Calif.) microarray chips. Non-stimulated (resting) cells were harvested immediately after purification, and subjected to the same analysis. Genes were compared whose expression was upregulated at either of the two timepoints in activated vs. resting cells

[2763] Below are the results of these experiments, demonstrating that various PRO polypeptides of the present invention are significantly differentially expressed in isolated CD45RO activated by anti-CD3/anti-CD28 as compared to: isolated resting CD45RO, isolated resting CD45RA and isolated CD45RA activated by anti-CD3/anti-CD28 cells. As described above, these data demonstrate that the PRO polypeptides of the present invention are useful not only as diagnostic markers for the presence of one or more immune disorders, but also serve as therapeutic targets for the treatment of those immune disorders. The FIGS. 1-2442 show the nucleic acids of the invention and their encoded PRO polypeptides. The nucleic acids and encoded proteins of FIG. 533, FIG. 539, FIG. 674, FIG. 877, FIG. 885, FIG. 1135, FIG. 1428, FIG. 1651 and FIG. 1859 are significantly overexpressed in activated CD45RO compared to matched isolated resting CD45RO, isolated resting CD45RA cells and activated CD45RA cells.

### Example 2

### Use of PRO as a Hybridization Probe

[2764] The following method describes use of a nucleotide sequence encoding PRO as a hybridization probe.

[2765] DNA comprising the coding sequence of full-length or mature PRO as disclosed herein is employed as a probe to screen for homologous DNAs (such as those encoding naturally-occurring variants of PRO) in human tissue cDNA libraries or human tissue genomic libraries.

[2766] Hybridization and washing of filters containing either library DNAs is performed under the following high stringency conditions. Hybridization of radiolabeled PRO-derived probe to the filters is performed in a solution of 50% formamide, 5×SSC, 0.1% SDS, 0.1% sodium pyrophosphate, 50 mM sodium phosphate, pH 6.8, 2× Denhardt's solution, and 10% dextran sulfate at 42° C. for 20 hours. Washing of the filters is performed in an aqueous solution of 0.1×SSC and 0.1% SDS at 42° C.

[2767] DNAs having a desired sequence identity with the DNA encoding full-length native sequence PRO can then be identified using standard techniques known in the art.

### Example 3

### Expression of PRO in E. coli

[2768] This example illustrates preparation of an unglycosylated form of PRO by recombinant expression in E. coli.

[2769] The DNA sequence encoding PRO is initially amplified using selected PCR primers. The primers should contain restriction enzyme sites which correspond to the restriction enzyme sites on the selected expression vector. A variety of expression vectors may be employed. An example of a suitable vector is pBR322 (derived from E. coli; see Bolivar et al., Gene, 2:95 (1977)) which contains genes for ampicillin and tetracycline resistance. The vector is digested with restriction enzyme and dephosphorylated. The PCR amplified sequences are then ligated into the vector. The vector will preferably include sequences which encode for an antibiotic resistance gene, a trp promoter, a polyhis leader (including the first six STII codons, polyhis sequence, and enterokinase cleavage site), the PRO coding region, lambda transcriptional terminator, and an argU gene.

[2770] The ligation mixture is then used to transform a selected E. coli strain using the methods described in Sambrook et al., supra. Transformants are identified by their ability to grow on LB plates and antibiotic resistant colonies are then selected. Plasmid DNA can be isolated and confirmed by restriction analysis and DNA sequencing.

[2771] Selected clones can be grown overnight in liquid culture medium such as LB broth supplemented with antibiotics. The overnight culture may subsequently be used to inoculate a larger scale culture. The cells are then grown to a desired optical density, during which the expression promoter is turned on.

[2772] After culturing the cells for several more hours, the cells can be harvested by centrifugation. The cell pellet obtained by the centrifugation can be solubilized using various agents known in the art, and the solubilized PRO protein can then be purified using a metal chelating column under conditions that allow tight binding of the protein.

[2773] PRO may be expressed in E. coli in a poly-His tagged form, using the following procedure. The DNA encoding PRO is initially amplified using selected PCR primers. The primers will contain restriction enzyme sites which correspond to the restriction enzyme sites on the selected expression vector, and other useful sequences providing for efficient and reliable translation initiation, rapid purification on a metal chelation column, and proteolytic removal with enterokinase. The PCR-amplified, poly-His tagged sequences are then ligated into an expression vector, which is used to transform an E. coli host based on strain 52 (W3110 fuhA(tonA) lon galE rpoHts(htpRts) clpP(lacIq). Transformants are first grown in LB containing 50 mg/ml carbenicillin at 30° C. with shaking until an O.D.600 of 3-5 is reached. Cultures are then diluted 50-100 fold into CRAP media (prepared by mixing 3.57 g (NH₄)₂SO₄, 0.71 g sodium citrate.2H2O, 1.07 g KCl, 5.36 g Difco yeast extract, 5.36 g Sheffield hycase SF in 500 mL water, as well as 110 mM MPOS, pH 7.3, 0.55% (w/v) glucose and 7 mM MgSO₄) and grown for approximately 20-30 hours at 30° C. with shaking. Samples are removed to verify expression by SDS-PAGE analysis, and the bulk culture is centrifuged to pellet the cells. Cell pellets are frozen until purification and refolding.

[2774] E. coli paste from 0.5 to 1 L fermentations (6-10 g pellets) is resuspended in 10 volumes (w/v) in 7 M guanidine, 20 mM Tris, pH 8 buffer. Solid sodium sulfite and sodium tetrathionate is added to make final concentrations of 0.1M and 0.02 M, respectively, and the solution is stirred overnight at 4° C. This step results in a denatured protein with all cysteine residues blocked by sulfitolization. The solution is centrifuged at 40,000 rpm in a Beckman Ultracentifuge for 30 min. The supernatant is diluted with 3-5 volumes of metal chelate column buffer (6 M guanidine, 20 mM Tris, pH 7.4) and filtered through 0.22 micron filters to clarify. The clarified extract is loaded onto a 5 ml Qiagen Ni-NTA metal chelate column equilibrated in the metal chelate column buffer. The column is washed with additional buffer containing 50 mM imidazole (Calbiochem, Utrol grade), pH 7.4. The protein is eluted with buffer containing 250 mM imidazole. Fractions containing the desired protein are pooled and stored at 4° C. Protein concentration is estimated by its absorbance at 280 nm using the calculated extinction coefficient based on its amino acid sequence.

[2775] The proteins are refolded by diluting the sample slowly into freshly prepared refolding buffer consisting of: 20 mM Tris, pH 8.6, 0.3 M NaCl, 2.5 M urea, 5 mM cysteine, 20 mM glycine and 1 mM EDTA. Refolding volumes are chosen so that the final protein concentration is between 50 to 100 micrograms/ml. The refolding solution is stirred gently at 4° C. for 12-36 hours. The refolding reaction is quenched by the addition of TFA to a final concentration of 0.4% (pH of approximately 3). Before further purification of the protein, the solution is filtered through a 0.22 micron filter and acetonitrile is added to 2-10% final concentration. The refolded protein is chromatographed on a Poros R1/H reversed phase column using a mobile buffer of 0.1% TFA with elution with a gradient of acetonitrile from 10 to 80%. Aliquots of fractions with A280 absorbance are analyzed on SDS polyacrylamide gels and fractions containing homogeneous refolded protein are pooled. Generally, the properly refolded species of most proteins are eluted at the lowest concentrations of acetonitrile since those species are the most compact with their hydrophobic interiors shielded from interaction with the reversed phase resin. Aggregated species are usually eluted at higher acetonitrile concentrations. In addition to resolving misfolded forms of proteins from the desired form, the reversed phase step also removes endotoxin from the samples.

[2776] Fractions containing the desired folded PRO polypeptide are pooled and the acetonitrile removed using a gentle stream of nitrogen directed at the solution. Proteins are formulated into 20 mM Hepes, pH 6.8 with 0.14 M sodium chloride and 4% mannitol by dialysis or by gel filtration using G25 Superfine (Pharmacia) resins equilibrated in the formulation buffer and sterile filtered.

[2777] Many of the PRO polypeptides disclosed herein were successfully expressed as described above.

### Example 4

### Expression of PRO in Mammalian Cells

[2778] This example illustrates preparation of a potentially glycosylated form of PRO by recombinant expression in mammalian cells.

[2779] The vector, pRK5 (see EP 307,247, published Mar. 15, 1989), is employed as the expression vector. Optionally, the PRO DNA is ligated into pRK5 with selected restriction enzymes to allow insertion of the PRO DNA using ligation methods such as described in Sambrook et al., supra. The resulting vector is called pRK5-PRO.

[2780] In one embodiment, the selected host cells may be 293 cells. Human 293 cells (ATCC CCL 1573) are grown to confluence in tissue culture plates in medium such as DMEM supplemented with fetal calf serum and optionally, nutrient components and/or antibiotics. About 10 μg pRK5-PRO DNA is mixed with about 1 μg DNA encoding the VA RNA gene [Thimmappaya et al., Cell, 31:543 (1982)] and dissolved in 500 μl of 1 mM Tris-HCl, 0.1 mM EDTA, 0.227 M CaCl₂. To this mixture is added, dropwise, 500 μl of 50 mM HEPES (pH 7.35), 280 mM NaCl, 1.5 mM NaPO₄, and a precipitate is allowed to form for 10 minutes at 25° C. The precipitate is suspended and added to the 293 cells and allowed to settle for about four hours at 37° C. The culture medium is aspirated off and 2 ml of 20% glycerol in PBS is added for 30 seconds. The 293 cells are then washed with serum free medium, fresh medium is added and the cells are incubated for about 5 days.

[2781] Approximately 24 hours after the transfections, the culture medium is removed and replaced with culture medium (alone) or culture medium containing 200 μCi/ml ³⁵S-cysteine and 200 μCi/ml ³⁵S-methionine. After a 12 hour incubation, the conditioned medium is collected, concentrated on a spin filter, and loaded onto a 15% SDS gel. The processed gel may be dried and exposed to film for a selected period of time to reveal the presence of PRO polypeptide. The cultures containing transfected cells may undergo further incubation (in serum free medium) and the medium is tested in selected bioassays.

[2782] In an alternative technique, PRO may be introduced into 293 cells transiently using the dextran sulfate method described by Somparyrac et al., Proc. Natl. Acad. Sci., 12:7575 (1981). 293 cells are grown to maximal density in a spinner flask and 700 μg pRK5-PRO DNA is added. The cells are first concentrated from the spinner flask by centrifugation and washed with PBS. The DNA-dextran precipitate is incubated on the cell pellet for four hours. The cells are treated with 20% glycerol for 90 seconds, washed with tissue culture medium, and re-introduced into the spinner flask containing tissue culture medium, 5 μg/ml bovine insulin and 0.1 μg/ml bovine transferrin. After about four days, the conditioned media is centrifuged and filtered to remove cells and debris. The sample containing expressed PRO can then be concentrated and purified by any selected method, such as dialysis and/or column chromatography.

[2783] In another embodiment, PRO can be expressed in CHO cells. The pRK5-PRO can be transfected into CHO cells using known reagents such as CaPO₄ or DEAE-dextran. As described above, the cell cultures can be incubated, and the medium replaced with culture medium (alone) or medium containing a radiolabel such as ³⁵S-methionine. After determining the presence of PRO polypeptide, the culture medium may be replaced with serum free medium. Preferably, the cultures are incubated for about 6 days, and then the conditioned medium is harvested. The medium containing the expressed PRO can then be concentrated and purified by any selected method.

[2784] Epitope-tagged PRO may also be expressed in host CHO cells. The PRO may be subcloned out of the pRK5 vector. The subclone insert can undergo PCR to fuse in frame with a selected epitope tag such as a poly-his tag into a Baculovirus expression vector. The poly-his tagged PRO insert can then be subcloned into a SV40 promoter/enhancer containing vector containing a selection marker such as DHFR for selection of stable clones. Finally, the CHO cells can be transfected (as described above) with the SV40 promoter/enhancer containing vector. Labeling may be performed, as described above, to verify expression. The culture medium containing the expressed poly-His tagged PRO can then be concentrated and purified by any selected method, such as by Ni²⁺-chelate affinity chromatography.

[2785] PRO may also be expressed in CHO and/or COS cells by a transient expression procedure or in CHO cells by another stable expression procedure.

[2786] Stable expression in CHO cells is performed using the following procedure. The proteins are expressed as an IgG construct (immunoadhesin), in which the coding sequences for the soluble forms (e.g. extracellular domains) of the respective proteins are fused to an IgG1 constant region sequence containing the hinge, CH2 and CH2 domains and/or is a poly-His tagged form.

[2787] Following PCR amplification, the respective DNAs are subcloned in a CHO expression vector using standard techniques as described in Ausubel et al., Current Protocols of Molecular Biology, Unit 3.16, John Wiley and Sons (1997). CHO expression vectors are constructed to have compatible restriction sites 5′ and 3′ of the DNA of interest to allow the convenient shuttling of cDNA's. The vector used expression in CHO cells is as described in Lucas et al., Nucl. Acids Res. 24:9 (1774-1779 (1996), and uses the SV40 early promoter/enhancer to drive expression of the cDNA of interest and dihydrofolate reductase (DHFR). DHFR expression permits selection for stable maintenance of the plasmid following transfection.

[2788] Twelve micrograms of the desired plasmid DNA is introduced into approximately 10 million CHO cells using commercially available transfection reagents Superfect® (Quiagen), Dosper® or Fugene® (Boehringer Mannheim). The cells are grown as described in Lucas et al., supra. Approximately 3×10⁻⁷ cells are frozen in an ampule for further growth and production as described below.

[2789] The ampules containing the plasmid DNA are thawed by placement into water bath and mixed by vortexing. The contents are pipetted into a centrifuge tube containing 10 mL of media and centrifuged at 1000 rpm for 5 minutes. The supernatant is aspirated and the cells are resuspended in 10 mL of selective media (0.2 μm filtered PS20 with 5% 0.2 μm diafiltered fetal bovine serum). The cells are then aliquoted into a 100 mL spinner containing 90 mL of selective media. After 1-2 days, the cells are transferred into a 250 mL spinner filled with 150 mL selective growth medium and incubated at 37° C. After another 2-3 days, 250 mL, 500 mL and 2000 mL spinners are seeded with 3×10⁵ cells/mL. The cell media is exchanged with fresh media by centrifugation and resuspension in production medium. Although any suitable CHO media may be employed, a production medium described in U.S. Pat. No. 5,122,469, issued Jun. 16, 1992 may actually be used. A 3 L production spinner is seeded at 1.2×10⁶ cells/mL. On day 0, pH is determined. On day 1, the spinner is sampled and sparging with filtered air is commenced. On day 2, the spinner is sampled, the temperature shifted to 33° C., and 30 mL of 500 g/L glucose and 0.6 mL of 10% antifoam (e.g., 35% polydimethylsiloxane emulsion, Dow Corning 365 Medical Grade Emulsion) taken. Throughout the production, the pH is adjusted as necessary to keep it at around 7.2. After 10 days, or until the viability dropped below 70%, the cell culture is harvested by centrifugation and filtering through a 0.22 μm filter. The filtrate was either stored at 4° C. or immediately loaded onto columns for purification.

[2790] For the poly-His tagged constructs, the proteins are purified using a Ni-NTA column (Qiagen). Before purification, imidazole is added to the conditioned media to a concentration of 5 mM. The [symbol] tioned media is pumped onto a 6 ml Ni-NTA column equilibrated in 20 mM Hepes, pH 7.4, buffer [symbol] ning 0.3 M NaCl and 5 mM imidazole at a flow rate of 4-5 ml/min. at 4° C. After loading, the column [symbol] washed with additional equilibration buffer and the protein eluted with equilibration buffer containing [symbol] M imidazole. The highly purified protein is subsequently desalted into a storage buffer containing 10 [symbol] Hepes, 0.14 M NaCl and 4% mannitol, pH 6.8, with a 25 ml G25 Superfine (Pharmacia) column and [symbol] at −80° C.

[2791] Immunoadhesin (Fc-containing) constructs are purified from the conditioned media as follows. The [symbol] conditioned medium is pumped onto a 5 ml Protein A column (Pharmacia) which had been equilibrated in 20 mM Na phosphate buffer, pH 6.8. After loading, the column is washed extensively with equilibration buffer before elution with 100 mM citric acid, pH 3.5. The eluted protein is immediately neutralized by collecting 1 ml fractions into tubes containing 275 μl of 1 M Tris buffer, pH 9. The highly purified protein is subsequently desalted into storage buffer as described above for the poly-His tagged proteins. The homogeneity is assessed by SDS polyacrylamide gels and by N-terminal amino acid sequencing by Edman degradation.

[2792] Many of the PRO polypeptides disclosed herein were successfully expressed as described above.

### Example 5

### Expression of PRO in Yeast

[2793] The following method describes recombinant expression of PRO in yeast.

[2794] First, yeast expression vectors are constructed for intracellular production or secretion of PRO from the ADH2/GAPDH promoter. DNA encoding PRO and the promoter is inserted into suitable restriction enzyme sites in the selected plasmid to direct intracellular expression of PRO. For secretion, DNA encoding PRO can be cloned into the selected plasmid, together with DNA encoding the ADH2/GAPDH promoter, a native PRO signal peptide or other mammalian signal peptide, or, for example, a yeast alpha-factor or invertase secretory signal/leader sequence, and linker sequences (if needed) for expression of PRO.

[2795] Yeast cells, such as yeast strain AB110, can then be transformed with the expression plasmids described above and cultured in selected fermentation media. The transformed yeast supernatants can be analyzed by precipitation with 10% trichloroacetic acid and separation by SDS-PAGE, followed by staining of the gels with Coomassie Blue stain.

[2796] Recombinant PRO can subsequently be isolated and purified by removing the yeast cells from the fermentation medium by centrifugation and then concentrating the medium using selected cartridge filters. The concentrate containing PRO may further be purified using selected column chromatography resins.

[2797] Many of the PRO polypeptides disclosed herein were successfully expressed as described above.

### Example 6

### Expression of PRO in Baculovirus-Infected Insect Cells

[2798] The following method describes recombinant expression of PRO in Baculovirus-infected insect cells.

[2799] The sequence coding for PRO is fused upstream of an epitope tag contained within a baculovirus expression vector. Such epitope tags include poly-his tags and immunoglobulin tags (like Fc regions of IgG). A variety of plasmids may be employed, including plasmids derived from commercially available plasmids such as pVL1393 (Novagen). Briefly, the sequence encoding PRO or the desired portion of the coding sequence of PRO such as the sequence encoding the extracellular domain of a transmembrane protein or the sequence encoding the mature protein if the protein is extracellular is amplified by PCR with primers complementary to the 5′ and 3′ regions. The 5′ primer may incorporate flanking (selected) restriction enzyme sites. The product is then digested with those selected restriction enzymes and subcloned into the expression vector.

[2800] Recombinant baculovirus is generated by co-transfecting the above plasmid and BaculoGold™ virus DNA (Pharmingen) into Spodoptera frugiperda (“Sf9”) cells (ATCC CRL 1711) using lipofectin (commercially available from GIBCO-BRL). After 4-5 days of incubation at 28° C., the released viruses are harvested and used for further amplifications. Viral infection and protein expression are performed as described by O'Reilley et al., Baculovirus expression vectors: A Laboratory Manual, Oxford: Oxford University Press (1994).

[2801] Expressed poly-his tagged PRO can then be purified, for example, by Ni²⁺-chelate affinity chromatography as follows. Extracts are prepared from recombinant virus-infected Sf9 cells as described by Rupert et al., Nature, 362:175-179 (1993). Briefly, Sf9 cells are washed, resuspended in sonication buffer (25 mL Hepes, pH 7.9; 12.5 mM MgCl₂; 0.1 mM EDTA; 10% glycerol; 0.1% NP-40; 0.4 M KCl), and sonicated twice for 20 seconds on ice. The sonicates are cleared by centrifugation, and the supernatant is diluted 50-fold in loading buffer (50 mM phosphate, 300 mM NaCl, 10% glycerol, pH 7.8) and filtered through a 0.45 μm filter. A Ni²⁺-NTA agarose column (commercially available from Qiagen) is prepared with a bed volume of 5 mL, washed with 25 mL of water and equilibrated with 25 mL of loading buffer. The filtered cell extract is loaded onto the column at 0.5 mL per minute. The column is washed to baseline A₂₈₀ with loading buffer, at which point fraction collection is started. Next, the column is washed with a secondary wash buffer (50 mM phosphate; 300 mM NaCl, 10% glycerol, pH 6.0), which elutes nonspecifically bound protein. After reaching A₂₈₀ baseline again, the column is developed with a 0 to 500 mM Imidazole gradient in the secondary wash buffer. One mL fractions are collected and analyzed by SDS-PAGE and silver staining or Western blot with Ni²⁺-NTA-conjugated to alkaline phosphatase (Qiagen). Fractions containing the eluted His₁₀-tagged PRO are pooled and dialyzed against loading buffer.

[2802] Alternatively, purification of the IgG tagged (or Fc tagged) PRO can be performed using known chromatography techniques, including for instance, Protein A or protein G column chromatography.

[2803] Many of the PRO polypeptides disclosed herein were successfully expressed as described above.

### Example 7

### Preparation of Antibodies that Bind PRO

[2804] This example illustrates preparation of monoclonal antibodies which can specifically bind PRO.

[2805] Techniques for producing the monoclonal antibodies are known in the art and are described, for instance, in Goding, supra. Immunogens that may be employed include purified PRO, fusion proteins containing PRO, and cells expressing recombinant PRO on the cell surface. Selection of the immunogen can be made by the skilled artisan without undue experimentation.

[2806] Mice, such as Balb/c, are immunized with the PRO immunogen emulsified in complete Freund's adjuvant and injected subcutaneously or intraperitoneally in an amount from 1-100 micrograms. Alternatively, the immunogen is emulsified in MPL-TDM adjuvant (Ribi Immunochemical Research, Hamilton, Mont.) and injected into the animal's hind foot pads. The immunized mice are then boosted 10 to 12 days later with additional immunogen emulsified in the selected adjuvant. Thereafter, for several weeks, the mice may also be boosted with additional immunization injections. Serum samples may be periodically obtained from the mice by retro-orbital bleeding for testing in ELISA assays to detect anti-PRO antibodies.

[2807] After a suitable antibody titer has been detected, the animals “positive” for antibodies can be injected with a final intravenous injection of PRO. Three to four days later, the mice are sacrificed and the spleen cells are harvested. The spleen cells are then fused (using 35% polyethylene glycol) to a selected murine myeloma cell line such as P3X63AgU.1, available from ATCC, No. CRL 1597. The fusions generate hybridoma cells which can then be plated in 96 well tissue culture plates containing HAT (hypoxanthine, aminopterin, and thymidine) medium to inhibit proliferation of non-fused cells, myeloma hybrids, and spleen cell hybrids.

[2808] The hybridoma cells will be screened in an ELISA for reactivity against PRO. Determination of “positive” hybridoma cells secreting the desired monoclonal antibodies against PRO is within the skill in the art.

[2809] The positive hybridoma cells can be injected intraperitoneally into syngeneic Balb/c mice to produce ascites containing the anti-PRO monoclonal antibodies. Alternatively, the hybridoma cells can be grown in tissue culture flasks or roller bottles. Purification of the monoclonal antibodies produced in the ascites can be accomplished using ammonium sulfate precipitation, followed by gel exclusion chromatography. Alternatively, affinity chromatography based upon binding of antibody to protein A or protein G can be employed.

### Example 8

### Purification of PRO Polypeptides Using Specific Antibodies

[2810] Native or recombinant PRO polypeptides may be purified by a variety of standard techniques in the art of protein purification. For example, pro-PRO polypeptide, mature PRO polypeptide, or pre-PRO polypeptide is purified by immunoaffinity chromatography using antibodies specific for the PRO polypeptide of interest. In general, an immunoaffinity column is constructed by covalently coupling the anti-PRO polypeptide antibody to an activated chromatographic resin.

[2811] Polyclonal immunoglobulins are prepared from immune sera either by precipitation with ammonium sulfate or by purification on immobilized Protein A (Pharmacia LKB Biotechnology, Piscataway, N.J.). Likewise, monoclonal antibodies are prepared from mouse ascites fluid by ammonium sulfate precipitation or chromatography on immobilized Protein A. Partially purified immunoglobulin is covalently attached to a chromatographic resin such as CnBr-activated SEPHAROSE™ (Pharmacia LKB Biotechnology). The antibody is coupled to the resin, the resin is blocked, and the derivative resin is washed according to the manufacturer's instructions.

[2812] Such an immunoaffinity column is utilized in the purification of PRO polypeptide by preparing a fraction from cells containing PRO polypeptide in a soluble form. This preparation is derived by solubilization of the whole cell or of a subcellular fraction obtained via differential centrifugation by the addition of detergent or by other methods well known in the art. Alternatively, soluble PRO polypeptide containing a signal sequence may be secreted in useful quantity into the medium in which the cells are grown.

[2813] A soluble PRO polypeptide-containing preparation is passed over the immunoaffinity column, and the column is washed under conditions that allow the preferential absorbance of PRO polypeptide (e.g., high ionic strength buffers in the presence of detergent). Then, the column is eluted under conditions that disrupt antibody/PRO polypeptide binding (e.g., a low pH buffer such as approximately pH 2-3, or a high concentration of a chaotrope such as urea or thiocyanate ion), and PRO polypeptide is collected.

### Example 9

### Drug Screening

[2814] This invention is particularly useful for screening compounds by using PRO polypeptides or binding fragment thereof in any of a variety of drug screening techniques. The PRO polypeptide or fragment employed in such a test may either be free in solution, affixed to a solid support, borne on a cell surface, or located intracellularly. One method of drug screening utilizes eukaryotic or prokaryotic host cells which are stably transformed with recombinant nucleic acids expressing the PRO polypeptide or fragment. Drugs are screened against such transformed cells in competitive binding assays. Such cells, either in viable or fixed form, can be used for standard binding assays. One may measure, for example, the formation of complexes between PRO polypeptide or a fragment and the agent being tested. Alternatively, one can examine the diminution in complex formation between the PRO polypeptide and its target cell or target receptors caused by the agent being tested.

[2815] Thus, the present invention provides methods of screening for drugs or any other agents which can affect a PRO polypeptide-associated disease or disorder. These methods comprise contacting such an agent with an PRO polypeptide or fragment thereof and assaying (I) for the presence of a complex between the agent and the PRO polypeptide or fragment, or (ii) for the presence of a complex between the PRO polypeptide or fragment and the cell, by methods well known in the art. In such competitive binding assays, the PRO polypeptide or fragment is typically labeled. After suitable incubation, free PRO polypeptide or fragment is separated from that present in bound form, and the amount of free or uncomplexed label is a measure of the ability of the particular agent to bind to PRO polypeptide or to interfere with the PRO polypeptide/cell complex.

[2816] Another technique for drug screening provides high throughput screening for compounds having suitable binding affinity to a polypeptide and is described in detail in WO 84/03564, published on Sep. 13, 1984. Briefly stated, large numbers of different small peptide test compounds are synthesized on a solid substrate, such as plastic pins or some other surface. As applied to a PRO polypeptide, the peptide test compounds are reacted with PRO polypeptide and washed. Bound PRO polypeptide is detected by methods well known in the art. Purified PRO polypeptide can also be coated directly onto plates for use in the aforementioned drug screening techniques. In addition, non-neutralizing antibodies can be used to capture the peptide and immobilize it on the solid support.

[2817] This invention also contemplates the use of competitive drug screening assays in which neutralizing antibodies capable of binding PRO polypeptide specifically compete with a test compound for binding to PRO polypeptide or fragments thereof. In this manner, the antibodies can be used to detect the presence of any peptide which shares one or more antigenic determinants with PRO polypeptide.

### Example 10

### Rational Drug Design

[2818] The goal of rational drug design is to produce structural analogs of biologically active polypeptide of interest (i.e., a PRO polypeptide) or of small molecules with which they interact, e.g., agonists, antagonists, or inhibitors. Any of these examples can be used to fashion drugs which are more active or stable forms of the PRO polypeptide or which enhance or interfere with the function of the PRO polypeptide in vivo (c.f., Hodgson, Bio/Technology, 2: 19-21 (1991)).

[2819] In one approach, the three-dimensional structure of the PRO polypeptide, or of a PRO polypeptide-inhibitor complex, is determined by x-ray crystallography, by computer modeling or, most typically, by a combination of the two approaches. Both the shape and charges of the PRO polypeptide must be ascertained to elucidate the structure and to determine active site(s) of the molecule. Less often, useful information regarding the structure of the PRO polypeptide may be gained by modeling based on the structure of homologous proteins. In both cases, relevant structural information is used to design analogous PRO polypeptide-like molecules or to identify efficient inhibitors. Useful examples of rational drug design may include molecules which have improved activity or stability as shown by Braxton and Wells, Biochemistry, 31:7796-7801 (1992) or which act as inhibitors, agonists, or antagonists of native peptides as shown by Athauda et al., J. Biochem., 113:742-746 (1993).

[2820] It is also possible to isolate a target-specific antibody, selected by functional assay, as described above, and then to solve its crystal structure. This approach, in principle, yields a pharmacore upon which subsequent drug design can be based. It is possible to bypass protein crystallography altogether by generating anti-idiotypic antibodies (anti-ids) to a functional, pharmacologically active antibody. As a mirror image of a mirror image, the binding site of the anti-ids would be expected to be an analog of the original receptor. The anti-id could then be used to identify and isolate peptides from banks of chemically or biologically produced peptides. The isolated peptides would then act as the pharmacore.

[2821] By virtue of the present invention, sufficient amounts of the PRO polypeptide may be made available to perform such analytical studies as X-ray crystallography. In addition, knowledge of the PRO polypeptide amino acid sequence provided herein will provide guidance to those employing computer modeling techniques in place of or in addition to x-ray crystallography.

[2822] The foregoing written specification is considered to be sufficient to enable one skilled in the art to practice the invention. The present invention is not to be limited in scope by the construct deposited, since the deposited embodiment is intended as a single illustration of certain aspects of the invention and any constructs that are functionally equivalent are within the scope of this invention. The deposit of material herein does not constitute an admission that the written description herein contained is inadequate to enable the practice of any aspect of the invention, including the best mode thereof, nor is it to be construed as limiting the scope of the claims to the specific illustrations that it represents. Indeed, various modifications of the invention in addition to those shown and described herein will become apparent to those skilled in the art from the foregoing description and fall within the scope of the appended claims.

The application's sequence listing, which the Patent Office published only in electronic form, follows.

SEQUENCE LISTING (2442 sequences)

SEQ ID NO: 1 - DNA, 7218 bp, Homo sapien
gcggcctcttgtgtgagggcctgtgggattctccggatatggccggagtgtttccttatcgagggccgggtaacccggtgcctggccctctagccccgctaccggactacatgtcggaggagaagctgcaggagaaagctcgaaaatggcagcaattgcaggccaagcgctatgcagaaaagcggaagtttgggtttgtggatgcccagaaggaagacatgcccccagaacatgtcagggagatcattcgagaccatggagacatgaccaacaggaagttccgccatgacaaaagggtttacttgggtgccctaaagtacatgccccacgcagtcctcaaactcctggagaacatgcctatgccttgggagcagattcgggatgtgcccgtgctgtaccacatcactggagccatttccttcgtcaatgagattccctgggtcattgaacctgtctacatctcccagtgggggtcaatgtggattatgatgcgccgagaaaaaagagataggaggcatttcaagagaatgcgttttcccccttttgatgatgaggagccgcccttggactatgctgacaacatcctaaatgttgagccactggaggccattcagctagagctggaccctgaggaggacgcccctgtgttggactggttctatgaccaccagccgttgagggacagcaggaagtatgtaaatggctccacttaccagcgctggcagttcacactacctatgatgtcaactctctaccgcctggctaatcagctcctgacagacttggtggatgacaactacttctacctgtttgatttgaaggccttctttacgtccaaggcactcaatatggccattcctggaggccccaaatttgaacctcttgttcgagacatcaacctacaggatgaagactggaatgaattcaatgatattaacaagattatcatccggcagcctatccggactgagtacaagattgcttttccttacttgtacaacaatcttccacaccatgtccacctcacctggtaccatactcccaatgttgtattcatcaaaactgaagatcctgacttgccagctttctactttgaccctttgatcaacccaatctcccataggcactcagtcaagagccaggaaccattgccggatgatgatgaggaatttgagctcccggagtttgtggagcccttcctgaaggacacacccctctatacagacaatacagccaatggcattgccctgctctgggccccgcggcccttcaacctacgctctggtcgcacccgtcgggccctggacataccccttgtcaagaactggtatcgggagcattgtcctgccgggcagcctgtgaaagtgagggtctcctaccagaagctgcttaagtactatgtgctgaatgccctgaagcatcggccccctaaggctcaaaagaagaggtatttgttccgctccttcaaagccaccaaattctttcagtccacaaagctggactgggtggagggttggctccaggtttgccgccagggctacaacatgctcaaccttctcattcaccgcaaaaacctcaactacctgcacctggactacaacttcaacctcaagcctgtgaaaacgctcaccaccaaggaaagaaagaaatctcgttttgggaatgctttccacctgtgtcgggaagttctgcgtttgactaagctggtggtggatagtcacgtgcagtatcggctgggcaatgtggatgccttccagctggcagatggattgcagtatatatttgcccatgttgggcagttgacgggcatgtatcgatacaaatacaagctgatgcgacagattcgcgtgtgcaaggacctgaagcatctcatctattatcgtttcaacacaggccctgtagggaagggtcctggctgtggcttctgggctgccggttggcgagtctggctctttttcatgcgtggcattacccctttattagagcgatggcttggcaacctcctggcccggcagtttgaaggtcgacactcaaagggggtggcaaagacagtaacaaagcagcgagtggagtcacattttgaccttgagctgcgggcagctgtgatgcatgatattctggacatgatgcctgaggggatcaagcagaacaaggcccggacaatcctgcagcacctcagtgaagcctggcgctgctggaaagccaacattccctggaaggtccctgggctgccgacgcccatagagaatatgatccttcgatacgtgaaggccaaggctgactggtggaccaacactgcccactacaaccgagaacggatccgccgaggggccactgtggacaagactgtttgtaaaaagaatctgggccgcctcacccggctctatctgaaggcagaacaggagcggcagcacaactacctgaaggacgggccttacatcacagcggaggaaacagtggcagtatataccaccacagtgcattggttggaaagccgcaggttttcacccatcccattccccccactctcctataagcatgacaccaagttgctcatcttggcattggagcggctcaaggaagcttatagtgtgaagtctcggttgaaccagtctcagagggaggagctaggtctgatcgagcaggcctacgataacctccacgaggcgctgtcccgcataaagcgtcacctcctcacacagagagccttcaaagaggtgggcattgagttcatggatctgtatagccacctcgttccagtatatgatgttgagcccctggagaagataactgatgcttacctggaccagtacctgtggtatgaagccgacaagcgccgcctgttcccaccctggattaagcctgcagacacagaaccacctccactgcttgtttacaagtggtgtcaaggcatcaataacctgcaggacgtgtgggagacgagtgaaggcgagtgcaatgtcatgctggaatcccgctttgagaagatgtatgagaagatcgacttgactctgctcaacaggctcgtgcgcctcatcgtggaccacaacatagccgactacatgacagccaagaacaacgtcgtcatcaactataaggacatgaaccatacgaattcatatgggatcatcagaggcctgcagtttgcctcattcatagtgcagtattatggcctggtgatggatttgcttgtattgggattgcaccgggccagtgagatggctgggccccctcagatgccaaatgactttctcagtttccaggacatagccactgaggctgcccaccccatccgtctcttctgcagatacattgatcgcatccatatttttttcaggttcacagcagatgaggctcgggacctgattcaacgttacctgacagagcaccctgaccccaataatgaaaacatcgttggctataataacaagaagtgctggccccgagatgcccgcatgcgcctcatgaaacatgatgttaacttaggccgggcggtattctgggacatcaagaaccgcttgccacggtcagtgactacagttcagtgggagaacagcttcgtgtctgtgtacagtaaggacaaccccaacctgctgttcaacatgtgtggcttcgagtgccgcatcctgcctaagtgccgcaccagctatgaggagttcacccacaaggacggggtctggaacctgcagaatgaggttactaaggagcgcacagctcagtgtttcctgcgtgtggacgatgagtcaatgcagcgcttccacaaccgcgtgcgtcagattctcatggcctctgggtccaccaccttcaccaagattgtgaataagtggaatacagctctcattggccttatgacatactttcgggaggctgtggtgaacacccaagagctcttggacttactggtgaagtgtgagaacaaaatccagacacgtatcaagattggactcaactccaagatgccaagtcggttccccccggttgtgttctacacccctaaggagttgggtggactcggcatgctctcaatgggccatgtgctcatcccccaatccgacctcaggtggtccaaacagacagatgtaggtatcacacactttcgttcaggaatgagccatgaagaagaccagctcattcccaacttgtaccgctacatacagccatgggagagcgagttcattgattctcagcgggtctgggctgagtacgcactcaagaggcaagaggccattgctcagaacagacgcctgactttagaagacctagaagattcatgggatcgtggcattcctcgaatcaataccctcttccagaaggaccggcacacactggcttatgataagggctggcgtgtcagaactgactttaagcagtatcaggttttgaagcagaatccgttctggtggacacaccagcggcatgatgggaagctctggaacctgaacaactaccgtacagacatgatccaggccctgggcggtgtggaaggcattctggaacacacactctttaagggcacttacttccctacctgggaggggcttttctgggagaaggccagtggctttgaggaatctatgaagtggaagaagctaactaatgctcagcgatcaggactgaaccagattcccaatcgtagattcaccctctggtggtccccgaccattaatcgagccaatgtatatgtaggctttcaggtgcagctagacctgacgggtatcttcatgcacggcaagatccccacgctgaagatctctctcatccagatcttccgagctcacttgtggcagaagatccatgagagcattgttatggacttatgtcaggtgtttgaccaggaacttgatgcactggaaattgagacagtacaaaaggagacaatccatccccgaaagtcatataagatgaactcttcctgtgcagatatcctgctctttgcctcctataagtggaatgtctcccggccctcattgctggctgactccaaggatgtgatggacagcaccaccacccagaaatactggattgacatccagttgcgctggggggactatgattcccacgacattgagcgctacgcccgggccaagttcctggactacaccaccgacaacatgagtatctacccttcgcccacaggtgtactcatcgccattgacctggcctataacttgcacagtgcctatggaaactggttcccaggcagcaagcctctcatacaacaggccatggccaagatcatgaaggcaaaccctgccctgtatgtgttacgtgaacggatccgcaaggggctacagctctattcatctgaacccactgagccttatttgtcttctcagaactatggtgagctcttctccaaccagattatctggtttgtggatgacaccaacgtctacagagtgactattcacaagacctttgaagggaacttgacaaccaagcccatcaacggagccatcttcatcttcaacccacgcacagggcagctgttcctcaagataatccacacgtccgtgtgggcgggacagaagcgtttggggcagttggctaagtggaagacagctgaggaggtggccgccctgatccgatctctgcctgtggaggagcagcccaagcagatcattgtcaccaggaagggcatgctggacccactggaggtgcacttactggacttccccaatattgtcatcaaaggatcggagctccaactccctttccaggcgtgtctcaaggtggaaaaattcggggatctcatccttaaagccactgagccccagatggttctcttcaacctctatgacgactggctcaagactatttcatcttacacggccttctcccgtctcatcctgattctgcgtgccctacatgtgaacaacgatcgggcaaaagtgatcctgaagccagacaagactactattacagaaccacaccacatctggcccactctgactgacgaagaatggatcaaggtcgaggtgcagctcaaggatctgatcttggctgactacggcaagaaaaacaatgtgaacgtggcatcactgacacaatcagaaattcgagacatcatcctgggtatggagatctcggcaccgtcacagcagcggcagcagatcgctgagatcgagaagcagaccaaggaacaatcgcagctgacggcaacacagactcgcactgtcaacaagcatggcgatgagatcatcacctccaccaccagcaactatgagacccagactttctcatccaagactgagtggagggtcagggccatctctgctgccaacctgcacctaaggaccaatcacatctatgtttcatctgacgacatcaaggagactggctacacctacatccttcccaagaatgtgcttaagaagttcatctgcatatctgaccttcgggcccaaattgcaggatacctatatggggtgagcccaccagataacccccaggtgaaggagatccgctgcattgtgatggtgccgcagtggggcactcaccagaccgtgcacctgcctggccagctgccccagcatgagtacctcaaggagatggaacccttaggttggatccacactcagcccaatgagtccccgcagttatcaccccaggatgtcaccacccatgccaagatcatggctgacaacccatcttgggatggcgagaagaccattatcatcacatgcagcttcacgccaggctcctgtacactgacggcctacaagctgacccccagtggctacgaatggggccgccagaacacagacaagggcaacaaccccaagggctacctgccttcacactatgagagggtgcagatgctgctgtcggaccgtttccttggcttcttcatggtccctgcccagtcctcgtggaactacaacttcatgggtgttcggcatgaccccaacatgaaatatgagctacagctggcgaaccccaaagagttctaccacgaggtgcacaggccctctcacttcctcaactttgctctcctgcaggagggggaggtttactctgcggatcgggaggacctgtatgcctgaccgtttccctgcctcctgcttcagcctcccgaggccgaagcctcagcccctccagacaggccgctgacattcagcagtttggcctctttccctctgtctgtgcttgtgttgttgacctcctgatggcttgtcatcctgaataaaatataataataaattttgtataaatagg

SEQ ID NO: 2 - protein, 2000 aa, Homo sapien
MAGVFPYRGPGNPVPGPLAPLPDYMSEEKLQEKARKWQQLQAKRYAEKRKFGFVDAQKEDMPPEHVREIIRDHGDMTNRKFRHDKRVYLGALKYMPHAVLKLLENMPMPWEQIRDVPVLYHITGAISFVNEIPWVIEPVYISQWGSMWIMMRREKRDRRHFKRMRFPPFDDEEPPLDYADNILNVEPLEAIQLELDPEEDAPVLDWFYDHQPLRDSRKYVNGSTYQRWQFTLPMMSTLYRLANQLLTDLVDDNYFYLFDLKAFFTSKALNMAIPGGPKFEPLVRDINLQDEDWNEFNDINKIIIRQPIRTEYKIAFPYLYNNLPHHVHLTWYHTPNVVFIKTEDPDLPAFYFDPLINPISHRHSVKSQEPLPDDDEEFELPEFVEPFLKDTPLYTDNTANGIALLWAPRPFNLRSGRTRRALDIPLVKNWYREHCPAGQPVKVRVSYQKLLKYYVLNALKHRPPKAQKKRYLFRSFKATKFFQSTKLDWVEGWLQVCRQGYNMLNLLIHRKNLNYLHLDYNFNLKPVKTLTTKERKKSRFGNAFHLCREVLRLTKLVVDSHVQYRLGNVDAFQLADGLQYIFAHVGQLTGMYRYKYKLMRQIRVCKDLKHLIYYRFNTGPVGKGPGCGFWAAGWRVWLFFMRGITPLLERWLGNLLARQFEGRHSKGVAKTVTKQRVESHFDLELRAAVMHDILDMMPEGIKQNKARTILQHLSEAWRCWKANIPWKVPGLPTPIENMILRYVKAKADWWTNTAHYNRERIRRGATVDKTVCKKNLGRLTRLYLKAEQERQHNYLKDGPYITAEETVAVYTTTVHWLESRRFSPIPFPPLSYKHDTKLLILALERLKEAYSVKSRLNQSQREELGLIEQAYDNLHEALSRIKRHLLTQRAFKEVGIEFMDLYSHLVPVYDVEPLEKITDAYLDQYLWYEADKRRLFPPWIKPADTEPPPLLVYKWCQGINNLQDVWETSEGECNVMLESRFEKMYEKIDLTLLNRLVRLIVDHNIADYMTAKNNVVINYKDMNHTNSYGIIRGLQFASFIVQYYGLVMDLLVLGLHRASEMAGPPQMPNDFLSFQDIATEAAHPIRLFCRYIDRIHIFFRFTADEARDLIQRYLTEHPDPNNENIVGYNNKKCWPRDARMRLMKHDVNLGRAVFWDIKNRLPRSVTTVQWENSFVSVYSKDNPNLLFNMCGFECRILPKCRTSYEEFTHKDGVWNLQNEVTKERTAQCFLRVDDESMQRFHNRVRQILMASGSTTFTKIVNKWNTALIGLMTYFREAVVNTQELLDLLVKCENKIQTRIKIGLNSKMPSRFPPVVFYTPKELGGLGMLSMGHVLIPQSDLRWSKQTDVGITHFRSGMSHEEDQLIPNLYRYIQPWESEFIDSQRVWAEYALKRQEAIAQNRRLTLEDLEDSWDRGIPRINTLFQKDRHTLAYDKGWRVRTDFKQYQVLKQNPFWWTHQRHDGKLWNLNNYRTDMIQALGGVEGILEHTLFKGTYFPTWEGLFWEKASGFEESMKWKKLTNAQRSGLNQIPNRRFTLWWSPTINRANVYVGFQVQLDLTGIFMHGKIPTLKISLIQIFRAHLWQKIHESIVMDLCQVFDQELDALEIETVQKETIHPRKSYKMNSSCADILLFASYKWNVSRPSLLADSKDVMDSTTTQKYWIDIQLRWGDYDSHDIERYARAKFLDYTTDNMSIYPSPTGVLIAIDLAYNLHSAYGNWFPGSKPLIQQAMAKIMKANPALYVLRERIRKGLQLYSSEPTEPYLSSQNYGELFSNQIIWFVDDTNVYRVTIHKTFEGNLTTKPINGAIFIFNPRTGQLFLKIIHTSVWAGQKRLGQLAKWKTAEEVAALIRSLPVEEQPKQIIVTRKGMLDPLEVHLLDFPNIVIKGSELQLPFQACLKVEKFGDLILKATEPQMVLFNLYDDWLKTISSYTAFSRLILILRALHVNNDRAKVILKPDKTTITEPHHIWPTLTDEEWIKVEVQLKDLILADYGKKNNVNVA

SEQ ID NO: 3 - DNA, 842 bp, Homo sapien
gaattcggcacgagataaaaatggcttccaaaagagctctggtcatcctggctaaaggagcagaggaaatggagacggtcatccctgtagatgtcatgaggcgagctgggattaaggtcaccgttgcaggcctggctggaaaagacccagtacagtgtagccgtgatgtggtcatttgtcctgatgccagccttgaagatgcaaaaaaagagggaccatatgatgtggtggttctaccaggaggtaatctgggcgcacagaatttatctgagtctgctgctgtgaaggagatactgaaggagcaggaaaaccggaagggcctgatagccgccatctgtgcaggtcctactgctctgttggctcatgaaataggttgtggaagtaaagttacaacacaccctcttgctaaagacaaaatgatgaatggaggtcattacacctactctgagaatcgtgtggaaaaagacggcctgattcttacaagccgggggcctgggaccagcttcgagtttgcgcttgcaattgttgaagccctgaatggcaaggaggtggcggctcaagtgaaggctccacttgttcttaaagactagagcagcgaactgcgacgatcacttagagaaacaggccgttaggaatccattctcactgtgttcgctctaaacaaaacagtggtaggttaatgtgttcagaagtcgctgtccttactacttttgcggaagtatggaagtcacaactacacagagatttctcagcctacaaattgtgtctatacatttctaagccttgtttgcagaataaacagggcatttagcaaactaaaaaaaaaaaaaaaaaaactcgag

SEQ ID NO: 4 - protein, 189 aa, Homo sapien
MASKRALVILAKGAEEMETVIPVDVMRRAGIKVTVAGLAGKDPVQCSRDVVICPDASLEDAKKEGPYDVVVLPGGNLGAQNLSESAAVKEILKEQENRKGLIAAICAGPTALLAHEIGCGSKVTTHPLAKDKMMNGGHYTYSENRVEKDGLILTSRGPGTSFEFALAIVEALNGKEVAAQVKAPLVLKD

SEQ ID NO: 5 - DNA, 1774 bp, Homo sapien
ttttgtgaagagacgaagactgagcggttgtggccgcgttgccgacctccagcagcagtcggcattctctaacgcagaaacccgggagtaggagactcagaatcgaatctcttctccctccccttcttgtgagatttttttgatcttcagctacattttcggctttgtgagaaaccttaccatcaaacacgatggccagcaacgttaccaacaagacagatcctcgctccatgaactcccgtgtattcattgggaatctcaacactcttgtggtcaagaaatctgatgtggaggcaatcttttcgaagtatggcaaaattgtgggctgctctgttcataagggctttgccttcgttcagtatgttaatgagagaaatgcccgggctgctgtagcaggagaggatggcagaatgattgctggccaggttttagatattaacctggctgcagagccaaaagtgaaccgaggaaaagcaggtgtgaaacgatctgcagcggagatgtacgggtcagtaacagaacacccttctccgtcccctctactcagctcctcttttgacttggactatgactttcaacgggactattatgataggatgtacagttacccagcacgtgtacctcctcctcctcctattgctcgggctgtagtgccctcgaaacgtcagcgtgtatcaggaaacacttcacgaaggggcaaaagtggcttcaattctaagagtggacagcggggatcttccaagtctggaaagttgaaaggagatgaccttcaggccattaagaaggagctgacccagataaaacaaaaagtggattctctcctggaaaacctggaaaaaatggaaaaggaacagagcaaacaagcagtagagatgaagaatgataagtcagaagaggagcagagcagcagctccgtgaagaaagatgagactaatgtgaagatggagtctgaggggggtgcagatgactctgctgaggagggggacctactggatgatgatgataatgaagatcggggggatgaccagctggagttgatcaaggatgatgaaaaagaggctgaggaaggagaggatgacagagacagcgccaatggaggatgactcttaagcacatagtggggtttagaaatcttatcccattatttctttacctaggcgcttgtctaagatcaaatttttcaccagatcctctcccctagtatcttcagcacatgctcactgttctccccatccttgtccttcccatgttcattaattcatattgccccgcgcctagtcccattttcacttcctttgacgctcctagtagttttgttaagtcttaccctgtaatttttgcttttaattttgatacctctttatgacttaacaataaaaaggatgtatggtttttatcaactgtctccaaaataatctcttgttatgcagggagtacagttcttttcattcatacataagttcagtagttgcttccctaactgcaaaggcaatctcatttagttgagtagctcttgaaagcagctttgagttagaagtatgtgtgttacaccctcacattagtgtgctgtgtggggcagttcaacacaaatgtaacaattatttttgtgaatgagagttggcatgtcaaatgcatcctctagaaaaataattagtgttatagtcttaagatttgttttctaaagttgatactgtgggatttttgtgaacagcctgatgtttgggaccttttttcctcaaaataaacaagtccttattaaaccaggaatttggag

SEQ ID NO: 6 - protein, 303 aa, Homo sapien
MASNVTNKTDPRSMNSRVFIGNLNTLVVKKSDVEAIFSKYGKIVGCSVHKGFAFVQYVNERNARAAVAGEDGRMIAGQVLDINLAAEPKVNRGKAGVKRSAAEMYGSVTEHPSPSPLLSSSFDLDYDFQRDYYDRMYSYPARVPPPPPIARAVVPSKRQRVSGNTSRRGKSGFNSKSGQRGSSKSGKLKGDDLQAIKKELTQIKQKVDSLLENLEKMEKEQSKQAVEMKNDKSEEEQSSSSVKKDETNVKMESEGGADDSAEEGDLLDDDDNEDRGDDQLELIKDDEKEAEEGEDDRDSANGG

SEQ ID NO: 7 - DNA, 2714 bp, Homo sapien
ccgacatgttgagtcataagacgcgtcggtgttgcagtctgtgtccttggaggtgaccagggccactgcaggcatggtgctagcagagctgtacgtctctgaccgagagggaagcgatgccacgggagatggaaccaaggagaaaccatttaaaacaggtctaaaggctttgatgacagtagggaaagaaccatttcctaccatttacgtagattcacaaaaagaaaatgagaggtggaatgttatttctaaatcacagttgaagaacattaaaaagatgtggcatagggaacaaatgaagagtgaatcccgggaaaagaaagaggcagaagatagtttacgaagagaaaagaacctggaagaagcaaagaagattaccattaaaaatgatccaagtctcccagagccaaaatgtgtgaagattggtgcgttagaaggatatagaggccaaagagtaaaggtgtttggctgggtccacaggctgcgcaggcaaggaaagaatttaatgtttctggtgttgcgagatggtacaggttatcttcagtgtgtcttggcggatgagttgtgtcagtgctacaatggagttctcttgtccacggagagcagtgttgcagtgtatggaatgctaaatcttaccccaaagggcaagcaggctccaggtggccatgagctgagttgtgacttctgggaactaattgggttggcccctgctggaggagctgacaacctgatcaatgaggagtctgacgttgatgtccagctcaacaacagacacatgatgatccgaggagaaaacatgtccaaaatcctaaaagcacgatccatggtcaccaggtgctttagagatcacttctttgatagggggtactatgaagttactcctccaacattagtgcaaacacaagtagaaggtggtgccacactcttcaagcttgactattttggggaagaggcatttttgactcaatcctctcagttgtacttggagacctgcctcccagccctgggagatgttttttgtattgctcagtcataccgggcagagcagtccagaacacgaaggcacctggctgagtacactcacgtggaagctgagtgtcctttcctgacttttgacgacctcctgaaccggttggaggacttggtttgtgatgtggtagatcgaatattgaagtcacctgcagggagcatagtgcatgagctcaacccgaactttcagccccccaaacggcctttcaaacggatgaactattcagatgctatcgtttggctaaaagaacatgatgtaaagaaagaagatggaactttctatgaatttggagaagatatcccagaagctcctgagagactgatgacagacaccattaatgaaccaatcttgctgtgtcgatttcctgtggagatcaagtccttctacatgcagcgatgtcctgaggattcccgtcttactgaatctgtcgacgtgttgatgcccaatgttggtgagattgtgggaggctcaatgcgtatctttgatagtgaagaaatactggcaggttataaaagggaagggattgaccccactccctattactggtatacggatcagagaaaatacggtacatgtccccatggaggatatggcttgggcttggaacgattcttaacgtggattctgaataggtatcacatccgagacgtgtgcttataccctcgatttgtccagcgttgcacgccataaccattttctccagaagcgtggaggaaagattatgaaaggaacaggctctttaaaaaagaaaacaaaaagccagaatcttccttttttttgtttcattggggtttctctttctgtttttctttctactaccataaaaactatctcaaatcacctgaacatcaagtgatattaaggttgtcatcttaagaaaaaatatccatttttttcttaagttcgggaaacaaagttcggggaaaatacctggcatgaaactgtagttagggatacatttcagcattttactcactttatccaagttattcattttattcaagttatatgtatgtataattcaacaattttagattatggtgtaagatactccagtaacttatctttctgtccttttaagtgtacctggaattctttgatttattttattgcatcaatgaattaaaacaaaaatcttgggggaagaaattggcaatatcgtataaaaatctgctcatattagaacacagtataattcagcagtaaacactagaatcaaatgaatagccttttgtatcagttattaatcttttctaactctgcttagctgctaataatcctgaggcatagaaattgaagaatttgtaaaaatagaattgccttaaaggatttgaagtaagaacataattttggggagagttttttagtgattcacagtatccctcttagcattaatttaaggtaaagaggcagattgattttccctctttcctggtaattcctaagtaattaagaataaataagttccaaaagaaattgtagctggaatcttaataacaattgtgagtggctgtttgagttgcccccaccatgtccttagatctaatctgtgctaccttattaactcacagcaggcttactgaatggcttcatttcagatttagttgatttctccaccaaatgcatgtcatgtattctcaataggctgtattcccagcagtcaataaatgaacacccgtaaaaa

SEQ ID NO: 8 - protein, 548 aa, Homo sapien
MVLAELYVSDREGSDATGDGTKEKPFKTGLKALMTVGKEPFPTIYVDSQKENERWNVISKSQLKNIKKMWHREQMKSESREKKEAEDSLRREKNLEEAKKITIKNDPSLPEPKCVKIGALEGYRGQRVKVFGWVHRLRRQGKNLMFLVLRDGTGYLQCVLADELCQCYNGVLLSTESSVAVYGMLNLTPKGKQAPGGHELSCDFWELIGLAPAGGADNLINEESDVDVQLNNRHMMIRGENMSKILKARSMVTRCFRDHFFDRGYYEVTPPTLVQTQVEGGATLFKLDYFGEEAFLTQSSQLYLETCLPALGDVFCIAQSYRAEQSRTRRHLAEYTHVEAECPFLTFDDLLNRLEDLVCDVVDRILKSPAGSIVHELNPNFQPPKRPFKRMNYSDAIVWLKEHDVKKEDGTFYEFGEDIPEAPERLMTDTINEPILLCRFPVEIKSFYMQRCPEDSRLTESVDVLMPNVGEIVGGSMRIFDSEEILAGYKREGIDPTPYYWYTDQRKYGTCPHGGYGLGLERFLTWILNRYHIRDVCLYPRFVQRCTP

SEQ ID NO: 9 - DNA, 3385 bp, Homo sapien
ggcagtcgcggaaggcgcgggagcttgcgtgctgctgggcctgagctgtctgtctcgtttctgtccgcgcgccctgcatcccggccccgggcgcccgctggaggtcgccgaggagccacagggctgactggtctgctgcccgggcccaggagtgcctggtgtagcagtcgcggagccatcccggcgtctgctgccatgaccgactctcccctcagaggagactcttcctcagcggtggctgcagagacagatgagcggcggctcctggccgcgggaccgtgagacgggttcgtggccggccatttagggggacgctgcgaccaccgcctgcgcccctccggactggttccttgggccccggaagctcgcggcgggccctgcgggaggcggcatgctcccgcggaggctgctggccgcctggctggcggggacgcggggcgggggcctgctggcgcttctggccaatcagtgccgcttcgtcacgggcctgcgcgtgcggcgcgcgcagcagatcgcgcagctctacggccgcctctactccgagagctcacgccgcgttctcctcggccgcctctggcgccggctgcacggccgtcctggccatgcctctgccttgatggcggcgttagccggcgtcttcgtttgggacgaggagaggatccaggaggaggagttgcagagatctattaatgagatgaagcggttggaagaaatgtcaaatatgtttcagagctctggagtccagcaccaccctccagaaccaaaagcccaaacagaagggaatgaagattcagagggcaaagagcaacgttgggaaatggtgatggataagaaacactttaagctgtggcggcgcccaattacaggcacccacctttaccagtaccgagtttttggaacctacacagatgtgacacctcggcagttcttcaatgttcagctggacacagagtatagaaaaaaatgggatgccctggtaatcaagctggaggtgattgagagggatgtggttagtggttccgaggttcttcactgggtaacccattttccttatccaatgtactcacgggattatgtttatgttcggcggtatagtgtggatcaggaaaacaacatgatggtgttggtgtcgcgtgctgtggagcatccgagtgtgccagagtctccagaattcgtcagggtcagatcatatgaatcccaaatggttatccgtccccacaagtcatttgatgagaatggctttgactacttactaacatacagtgacaatccccaaacggtgtttcctcgctactgtgttagttggatggtttccagtggcatgccagatttcctggagaagctgcacatggccactctgaaagccaagaatatggagattaaagtaaaggactacatctcagctaagcctctggaaatgagtagtgaagccaaggccaccagccagtcctctgagcgaaagaacgagggcagctgtggccctgctcggattgagtatgcttgacaggctttgggataagaagggacaaggtgcttctagccctgtctcagtccgttatcactctgctgtagaagggggacatgccacatgtattagaaggcatctgctgtaacttccagtgcaagataattcaataactgatgtcccatttcattcagagcccttattgctcttatcaaaacagaagaaggctacatttgtgggagtgttgtcatattctcaggccaactgttttgaaattcggtatctcactgagctaatctggaacaaacctctcacctcaggccagaaggggatgacctccatttgcttctctgagtagtttcctctgctgacattccaaatcccaccatcgattgtgcagcgctttggatttccttcagttctccaggtccacctggaaagtatagttggccagttgagtctctcaaatgaggggctactgggagtgctcttggtaacaatcatgatgtgaatgggtgtgaacgatacttggctatgttaagtgccttgtccgcaccttgcttttatctctagagacatgaagttattattaattttttttttttttaagtagagatggagtttcactctgtttcccaggctggtcttgaactcctgggccatgcctggccagggacatgaatttgtacaaagaaatttccctccctgcctgcacaatatcacccattgactcaccttatccaaagcaagtttcctgtgaatcggccagttcttctatattcattggatcattgcctccttcctaaccttccccatttaccaagaacactgggagactaatccttttagatagtagctttttgatgctcaaaacatcacatttaaatttagtttaaaaattttttaacttttgtgtcaaataggagttgaggaattgagcaggattctaccctagtccgattgtatagaaaacaccattttgattcaggtattatttttcatatttcaggtttgacttgttcttttcagaaggctaaagtcagaggaatgggggctgggccactcccttggagctctcagatctacagacaagctgtgtgaatgcatagatgtaatcttgtctcaaatactaatacagtggagatttggtttatgttaccattaagttcctctaaaaagtttttcttcctctcttcagagccaaaataaaagtgaactacactgttcagataaggtcacaatctgatgctgtcagtttgaccgagctggttttgcttatggtcatgctgcaatttgttagaataatagggatcaagttttaaatcctcctccttcccttttttctggagtcttgagggccagagtttttgtttttgtttttgtttttgttttcctgcttgctactgttttgtggtgttgaaaagtggtttaaacctgagactaacttaaacacttccttgaccttcttgttgcctgttcatttttgtgccaaggaagtagctgccccagtgtatgtcttgccttctccgcgtcattgttggaagaggagagatgcatcgagcagtcccagctgcttttcatttattacttcttctttccaggacctgacagaagtcagggaagagtccctgggttatgtccaaacttagcacctgcaattgttgggatgtggatggatgtgtgcataagagagagagagaatatgtgtgtgtgtgtgtgcgtctgcgagcgcacacacatgcacaagtgcgaaggagttgcggttgctccatgttctgacttagggcaatttgattctgcacttggggtctgtctgtacagttactcatgtcattgtaatgatttcactcctaactgtgacatttttatcaaatgtgtgaataaatacataaagattggtacaaaaaaaaaaaaaaaaaa

SEQ ID NO: 10 - protein, 295 aa, Homo sapien
MAALAGVFVWDEERIQEEELQRSINEMKRLEEMSNMFQSSGVQHHPPEPKAQTEGNEDSEGKEQRWEMVMDKKHFKLWRRPITGTHLYQYRVFGTYTDVTPRQFFNVQLDTEYRKKWDALVIKLEVIERDVVSGSEVLHWVTHFPYPMYSRDYVYVRRYSVDQENNMMVLVSRAVEHPSVPESPEFVRVRSYESQMVIRPHKSFDENGFDYLLTYSDNPQTVFPRYCVSWMVSSGMPDFLEKLHMATLKAKNMEIKVKDYISAKPLEMSSEAKATSQSSERKNEGSCGPARIEYA

SEQ ID NO: 11 - DNA, 1323 bp, Homo sapien
gcaacctttccaagggagtggttgtgtgatcgccatcttagggaaaagatgttctcgtccgtggcgcacctggcgcgggcgaaccccttcaacacgccacatctgcagctggtgcacgatggtctcggggacctccgcagcagctccccagggcccacgggccagccccgccgccctcgcaacctggcagccgccgccgtggaagagcagtatagctgtgactatggatctggcagattctttatcctttgtggacttggaggaattattagctgtggcacaacacatacagcattggttcctctagatctggttaaatgcagaatgcaggtggacccccaaaagtacaagggcatatttaacggattctcagttacacttaaagaggatggtgttcgtggtttggctaaaggatgggctccgactttccttggctactccatgcagggactctgcaagtttggcttttatgaagtctttaaagtcttgtatagcaatatgcttggagaggagaatacttatctctggcgcacatcactatatttggctgcctctgccagtgctgaattctttgctgacattgccctggctcctatggaagctgctaaggttcgaattcaaacccagccaggttatgccaacactttgagggatgcagctcccaaaatgtataaggaagaaggcctaaaagcattctacaagggggttgctcctctctggatgagacagataccatacaccatgatgaagttcgcctgctttgaacgtactgttgaagcactgtacaagtttgtggttcctaagccccgcagtgaatgttcaaagccagagcagctggttgtaacatttgtagcaggttacatagctggagtcttttgtgcaattgtttctcaccctgctgattctgtggtatctgtgttgaataaagaaaaaggtagcagtgcttctctggtcctcaagagacttggatttaaaggtgtatggaagggactgtttgcccgtatcatcatgattggtaccctgactgcactacagtggtttatctatgactccgtgaaggtctacttcagacttcctcgccctcccccacctgagatgccagagtctctgaagaaaaagcttgggttaactcagtagttagatcaaagcaaatgtggactgaatctgcttgttgatcagtgtttgaagaaagtgcaaaaggaacttttatatatttgacagtgtaggaaattgtctattcctgatataattactgtagtactcttgcttaaggcaagagtttcagatttactgttgaaataaacccaactgttcatgaaaaaa

SEQ ID NO: 12 - protein, 362 aa, Homo sapien
MFSSVAHLARANPFNTPHLQLVHDGLGDLRSSSPGPTGQPRRPRNLAAAAVEEQYSCDYGSGRFFILCGLGGIISCGTTHTALVPLDLVKCRMQVDPQKYKGIFNGFSVTLKEDGVRGLAKGWAPTFLGYSMQGLCKFGFYEVFKVLYSNMLGEENTYLWRTSLYLAASASAEFFADIALAPMEAAKVRIQTQPGYANTLRDAAPKMYKEEGLKAFYKGVAPLWMRQIPYTMMKFACFERTVEALYKFVVPKPRSECSKPEQLVVTFVAGYIAGVFCAIVSHPADSVVSVLNKEKGSSASLVLKRLGFKGVWKGLFARIIMIGTLTALQWFIYDSVKVYFRLPRPPPPEMPESLKKKLGLTQ

SEQ ID NO: 13 - DNA, 2044 bp, Homo sapien
ctggaagcgggcgagtctcgtgctgtgtcggacctgcagcccctggccttccgccaccatggagtacctcatcggtatccaaggccccgactatgttcttgtcgcctccgaccgggtggccgccagcaatattgtccagatgaaggacgatcatgacaagatgtttaagatgagtgaaaagatattactcctgtgtgttggagaggctggagacactgtacagtttgcagaatatattcagaaaaacgtgcaactttataagatgcgaaatggatatgaattgtctcccacggcagcagctaacttcacacgccgaaacctggctgactgtcttcggagtcggaccccatatcatgtgaacctcctcctggctggctatgatgagcatgaagggccagcgctgtattacatggactacctggcagccttggccaaggccccttttgcagcccacggctatggtgccttcctgactctcagtatcctcgaccgatactacacaccgactatctcacgtgagagggcagtggaactccttaggaaatgtctggaggagctccagaaacgcttcatcctgaatctgccaaccttcagtgttcgaatcattgacaaaaatggcatccatgacctggataacatttccttccccaaacagggctcctaacatcatgtcctccctcccacttgccagggaacttttttttgatgggctcctttatttttttctactcttttcaggcgcactcttgataaatggttaattcagaataaaggtgactatggatataattgagccctctggtccaggtctcagtttacctaatattacctcagaaaggatatggagggaagatgatctttttgccaggtctgacttttcttcctgctccgccctccattaacgctcagtaccctttagcagctgacggccccacgttctactccatgcttggcttcctttccaactagctctttcatatattttacttgctagtatctccattctctctaaagtagtggttctttttgcccttaaacttaaatttttaaattaattaacctgaattaataatacatgcacttaatgtaacatgcaaacagtacaaaaacatgtagtgaaaaatatttcttccagagctgggtgtggtggctcatgcctgtaatcccagcactttgggaggccgaggcgggcggatcacgaggtcaagagagcgagaccatcctgaccaacatggtgaaaccccgtctctgctaaaaatacaaaaattagctgggcgtggtggcacgcacccctagtcccagctactggggaggctgagacgggagaatcggtcgaacccgggaggcggaggttgcagtgagcctagatcgcgccactgtactccagcctggcaacagagtgagactccgtctcaaaaaaaagaaggaaaaatgtttcttccatccctataatccagtcatctgcttcctgcttcccttcctggaggaaacttcagctactaatttcttatgttttttaagagatattctgttactgtgtaaagtatacatacatacagacacatgccccctttaaattttttagatttatttatttatttagagacagggtctcactctagcccaggctggagtgctgtggcgtaatcttggctcactgcaacctccgcctcccgggcccaagtgatcctcccgtctcagcctcctgagtagctgggattacaggcgcacaccaccaatgcccagctagtttttgtgtttttcatagagacagggtctcaccatgtcattcaagaccagcctggccaacatggtgaaaccccatctctactaaaaaaatatataacaattagccaggcgtggtggcacacgcctgtaaacccaactacttgggaggctgaggcaggagaattgcttgagcccgggagagggaggttgcagtgagccgagatcatgccactgcactccagcctggctgacagagcaagactctgtctcaaaaaaaaaaaaaaaaaaaaaaaaaaaaaaaaaaaaaaaaaaaaaa

SEQ ID NO: 14 - protein, 201 aa, Homo sapien
MEYLIGIQGPDYVLVASDRVAASNIVQMKDDHDKMFKMSEKILLLCVGEAGDTVQFAEYIQKNVQLYKMRNGYELSPTAAANFTRRNLADCLRSRTPYHVNLLLAGYDEHEGPALYYMDYLAALAKAPFAAHGYGAFLTLSILDRYYTPTISRERAVELLRKCLEELQKRFILNLPTFSVRIIDKNGIHDLDNISFPKQGS

SEQ ID NO: 15 - DNA, 1724 bp, Homo sapien
acaggcattttccaaaggcaagcctggagcgcacggatctgtataaccgcggaaggccctgtttccggtcccttgcgcctgcgctcttgcagccaagaaggcgggaggctggagtagagggaagcctgcaaccggaagtgaaggcagatttccctccttcgtcgctgttgctgccgccatacgcgctctccctgtttagttatggcagagaacgatgtggacaatgagctcttggactatgaagatgatgaggtggagacagcagctgggggagatggggctgaggcccctgccaagaaggatgtcaagggctcctatgtctccatccacagctctggctttcgtgacttcctgctcaagccagagttgctccgggccattgtcgactgtggctttgagcatccgtcagaagtccagcatgagtgcatccctcaggccattctgggaatggatgtcctgtgccaggccaagtcgggcatgggaaagacagcagtgtttgtcttggccacactgcaacagctggagccagttactgggcaggtgtctgtgctggtgatgtgtcacactcgggagttggcttttcagatcagcaaggaatatgagcgcttctctaaatacatgcccaatgtcaaggttgctgttttttttggtggtctgtctatcaagaaggatgaagaggtgctgaagaagaactgcccgcatatcgtcgtggggactccaggccgtatcctagccctggctcgaaataagagcctcaacctcaaacacattaaacactttattttggatgaatgtgataagatgcttgaacagctcgacatgcgtcgggatgtccaggaaatttttcgcatgaccccccacgagaagcaggtcatgatgttcagtgctaccttgagcaaagagatccgtccagtctgccgcaagttcatgcaagatccaatggagatcttcgtggatgatgagacgaagttgacgctgcatgggttgcagcagtactacgtgaaactgaaggacaacgagaagaaccggaagctctttgaccttctggatgtccttgagttcaaccaggtggtgatctttgtgaagtctgtgcagcggtgcattgccttggcccagctactagtggagcagaacttcccagccattgccatccaccgtgggatgccccaggaggagaggctttctcggtatcagcagtttaaagattttcaacgacgaattcttgtggctaccaacctatttggccgaggcatggacatcgagcgggtgaacattgcttttaattatgacatgcctgaggattctgacacctacctgcatcgggtggccagagcaggccggtttggcaccaagggcttggctatcacatttgtgtccgatgagaatgatgccaagatcctcaatgatgtgcaggatcgctttgaggtcaatattagtgagctgcctgatgagatagacatctcctcctacattgaacagacacggtagaagactcgcccattttggaatgtgaccgtctgtccttcaggagaggacaccagggtgggggtgaaggagacactactgcccccacccctgacagcccccaccccatggcttccatcttttgcatcaccaccactcctgaacccccatttctgatttgtcagaatttttttttaacaaaactaaaaatgaaacacatgtgtctgtggtatctaaaaaaaaaaaaaaaaaaaaaaaaa

SEQ ID NO: 16 - protein, 428 aa, Homo sapien
MAENDVDNELLDYEDDEVETAAGGDGAEAPAKKDVKGSYVSIHSSGFRDFLLKPELLRAIVDCGFEHPSEVQHECIPQAILGMDVLCQAKSGMGKTAVFVLATLQQLEPVTGQVSVLVMCHTRELAFQISKEYERFSKYMPNVKVAVFFGGLSIKKDEEVLKKNCPHIVVGTPGRILALARNKSLNLKHIKHFILDECDKMLEQLDMRRDVQEIFRMTPHEKQVMMFSATLSKEIRPVCRKFMQDPMEIFVDDETKLTLHGLQQYYVKLKDNEKNRKLFDLLDVLEFNQVVIFVKSVQRCIALAQLLVEQNFPAIAIHRGMPQEERLSRYQQFKDFQRRILVATNLFGRGMDIERVNIAFNYDMPEDSDTYLHRVARAGRFGTKGLAITFVSDENDAKILNDVQDRFEVNISELPDEIDISSYIEQTR

SEQ ID NO: 17 - DNA, 815 bp, Mus musculus
gcggcgttgtagttaagctcgtgtaacggcggcggtgtcggcagctgctgtagcgaagagagtttggcgcgatgtctcacaccattttgctggtacagcctaccaagaggccagaaggcagaacttatgctgactacgaatctgtgaatgaatgcatggaaggtgtttgtaaaatgtatgaagaacatctgaaaagaatgaatcccaacagtccctctatcacatatgacatcagtcagttgtttgatttcatcgatgatctggcagacctcagctgcctggtttaccgagctgatacccagacataccagccttataacaaagactggattaaagagaagatctacgtgctccttcgtcggcaggcccaacaggctgggaaataattgtgttggaagcactgggggggttggggtgggcttggaacacaggtgtgtacagcgtgctgtagtggaagttttgtatcatagtaatcctgtttccactttgttatactctagccaagattgactgtattagatgaaatgtgaggatcttgttcaatcggaaacccccgttacctcctctttttctttctctttcttttttttttttttacttaaacatttttatgatgatttagatggaagttgttcttcgtcacttaatgttggttccagtccttcaactgttcatatctactttataacattcacatactaacccttcttcaagatggggtggggggtggaaatgcagtttagccatgtcctcaagataaagtcttggtaaaaataaataaatgtcctttagttataaaaaaaaaaaaaaaaaaa

SEQ ID NO: 18 - protein, 104 aa, Mus musculus
MSHTILLVQPTKRPEGRTYADYESVNECMEGVCKMYEEHLKRMNPNSPSITYDISQLFDFIDDLADLSCLVYRADTQTYQPYNKDWIKEKIYVLLRRQAQQAGK

SEQ ID NO: 19 - DNA, 1552 bp, Homo sapien
cggttggtgcggcctccattgttcgtgttttaaggcgccatgaggggtgacagaggccgtggtcgtggtgggcgctttggttccagaggaggcccaggaggagggttcaggccctttgtaccacatatcccatttgacttctatttgtgtgaaatggcctttccccgggtcaagccagcacctgatgaaacttccttcagtgaggccttgctgaagaggaatcaggacctggctcccaattctgctgaacaggcatctatcctttctctggtgacaaaaataaacaatgtgattgataatctgattgtggctccagggacatttgaagtgcaaattgaagaagttcgacaggtgggatcctataaaaaggggacaatgactacaggacacaatgtggctgacctggtggtgatactcaagattctgccaacgttggaagctgttgctgccctggggaacaaagtcgtggaaagcctaagagcacaggatccttctgaagttttaaccatgctgaccaacgaaactggctttgaaatcagttcttctgatgctacagtgaagattctcattacaacagtgccacccaatcttcgaaaactggatccagaactccatttggatatcaaagtattgcagagtgccttagcagccatccgacatgcccgctggttcgaggaaaatgcttctcagtccacagttaaagttctcatcagactactgaaggacttgaggattcgttttcctggctttgagcccctcacaccctggatccttgacctactaggccattatgctgtgatgaacaaccccaccagacagcctttggccctaaacgttgcatacaggcgctgcttgcagattctggctgcaggactgttcctgccaggttcagtgggtatcactgacccctgtgagagtggcaactttagagtacacacagtcatgaccctagaacagcaggacatggtctgctatacagctcagactctcgtccgaatcctctcacatggtggctttaggaagatccttggccaggagggtgatgccagctatcttgcttctgaaatatctacctgggatggagtgatagtaacaccttcagaaaaggcttatgagaagccaccagagaagaaggaaggagaggaagaagaggagaatacagaaagaaccacctcaaggagaggaagaagaaagcatggaaactcaggagtgacattcccttcactccttttcctacccaagggaaagactggagcctaagctgcctgctactggctttacatggtgacagacattccgtggataggaagatagcaggagaaagtaactccatagagtgtcattccactggttgatattggcttagctgccagtctcccatttgtgacctatgccatccatctataatggaggataccaacatttcttcctaatattctataatctccaactcctgaaaacccctctctcaactaatactttgctgttgaaatgttgtgaaatgttaagtgtctggaaatttttttttctaagaaaaactattaaagtactt

SEQ ID NO: 20 - protein, 406 aa, Homo sapien
MRGDRGRGRGGRFGSRGGPGGGFRPFVPHIPFDFYLCEMAFPRVKPAPDETSFSEALLKRNQDLAPNSAEQASILSLVTKINNVIDNLIVAPGTFEVQIEEVRQVGSYKKGTMTTGHNVADLVVILKILPTLEAVAALGNKVVESLRAQDPSEVLTMLTNETGFEISSSDATVKILITTVPPNLRKLDPELHLDIKVLQSALAAIRHARWFEENASQSTVKVLIRLLKDLRIRFPGFEPLTPWILDLLGHYAVMNNPTRQPLALNVAYRRCLQILAAGLFLPGSVGITDPCESGNFRVHTVMTLEQQDMVCYTAQTLVRILSHGGFRKILGQEGDASYLASEISTWDGVIVTPSEKAYEKPPEKKEGEEEEENTERTTSRRGRRKHGNSGVTFPSLLFLPKGKTGA

SEQ ID NO: 21 - DNA, 2567 bp, Homo sapien
ctccggcgcagtgttgggactgtctgggtatcggaaagcaagcctacgttgctcactattacgtataatccttttcttttcaagatgcctgaggaagtgcaccatggagaggaggaggtggagacttttgcctttcaggcagaaattgcccaactcatgtccctcatcatcaataccttctattccaacaaggagattttccttcgggagttgatctctaatgcttctgatgccttggacaagattcgctatgagagcctgacagacccttcgaagttggacagtggtaaagagctgaaaattgacatcatccccaaccctcaggaacgtaccctgactttggtagacacaggcattggcatgaccaaagctgatctcataaataatttgggaaccattgccaagtctggtactaaagcattcatggaggctcttcaggctggtgcagacatctccatgattgggcagtttggtgttggcttttattctgcctacttggtggcagagaaagtggttgtgatcacaaagcacaacgatgatgaacagtatgcttgggagtcttctgctggaggttccttcactgtgcgtgctgaccatggtgagcccattggcaggggtaccaaagtgatcctccatcttaaagaagatcagacagagtacctagaagagaggcgggtcaaagaagtagtgaagaagcattctcagttcataggctatcccatcaccctttatttggagaaggaacgagagaaggaaattagtgatgatgaggcagaggaagagaaaggtgagaaagaagaggaagataaagatgatgaagaaaaacccaagatcgaagatgtgggttcagatgaggaggatgacagcggtaaggataagaagaagaaaactaagaagatcaaagagaaatacattgatcaggaagaactaaacaagaccaagcctatttggaccagaaaccctgatgacatcacccaagaggagtatggagaattctacaagagcctcactaatgactgggaagaccacttggcagtcaagcacttttctgtagaaggtcagttggaattcagggcattgctatttattcctcgtcgggctccctttgacctttttgagaacaagaagaaaaagaacaacatcaaactctatgtccgccgtgtgttcatcatggacagctgtgatgagttgataccagagtatctcaattttatccgtggtgtggttgactctgaggatctgcccctgaacatctcccgagaaatgctccagcagagcaaaatcttgaaagtcattcgcaaaaacattgttaagaagtgccttgagctcttctctgagctggcagaagacaaggagaattacaagaaattctatgaggcattctctaaaaatctcaagcttggaatccacgaagactccactaaccgccgccgcctgtctgagctgctgcgctatcatacctcccagtctggagatgagatgacatctctgtcagagtatgtttctcgcatgaaggagacacagaagtccatctattacatcactggtgagagcaaagagcaggtggccaactcagcttttgtggagcgagtgcggaaacggggcttcgaggtggtatatatgaccgagcccattgacgagtactgtgtgcagcagctcaaggaatttgatgggaagagcctggtctcagttaccaaggagggtctggagctgcctgaggatgaggaggagaagaagaagatggaagagagcaaggcaaagtttgagaacctctgcaagctcatgaaagaaatcttagataagaaggttgagaaggtgacaatctccaatagacttgtgtcttcaccttgctgcattgtgaccagcacctacggctggacagccaatatggagcggatcatgaaagcccaggcacttcgggacaactccaccatgggctatatgatggccaaaaagcacctggagatcaaccctgaccaccccattgtggagacgctgcggcagaaggctgaggccgacaagaatgataaggcagttaaggacctggtggtgctgctgtttgaaaccgccctgctatcttctggcttttcccttgaggatccccagacccactccaaccgcatctatcgcatgatcaagctaggtctaggtattgatgaagatgaagtggcagcagaggaacccaatgctgcagttcctgatgagatcccccctctcgagggcgatgaggatgcgtctcgcatggaagaagtcgattaggttaggagttcatagttggaaaacttgtgcccttgtatagtgtccccatgggctcccactgcagcctcgagtgcccctgtcccacctggctccccctgctggtgtctagtgtttttttccctctcctgtccttgtgttgaaggcagtaaactaagggtgtcaagccccattccctctctactcttgacagcaggattggatgttgtgtattgtggtttattttattttcttcattttgttctgaaattaaagtatgcaaaataaagaatatgccgttttaaaaaaaaaaaaaaaaaaaaaaaaaaaaa

SEQ ID NO: 22 - protein, 724 aa, Homo sapien
MPEEVHHGEEEVETFAFQAEIAQLMSLIINTFYSNKEIFLRELISNASDALDKIRYESLTDPSKLDSGKELKIDIIPNPQERTLTLVDTGIGMTKADLINNLGTIAKSGTKAFMEALQAGADISMIGQFGVGFYSAYLVAEKVVVITKHNDDEQYAWESSAGGSFTVRADHGEPIGRGTKVILHLKEDQTEYLEERRVKEVVKKHSQFIGYPITLYLEKEREKEISDDEAEEEKGEKEEEDKDDEEKPKIEDVGSDEEDDSGKDKKKKTKKIKEKYIDQEELNKTKPIWTRNPDDITQEEYGEFYKSLTNDWEDHLAVKHFSVEGQLEFRALLFIPRRAPFDLFENKKKKNNIKLYVRRVFIMDSCDELIPEYLNFIRGVVDSEDLPLNISREMLQQSKILKVIRKNIVKKCLELFSELAEDKENYKKFYEAFSKNLKLGIHEDSTNRRRLSELLRYHTSQSGDEMTSLSEYVSRMKETQKSIYYITGESKEQVANSAFVERVRKRGFEVVYMTEPIDEYCVQQLKEFDGKSLVSVTKEGLELPEDEEEKKKMEESKAKFENLCKLMKEILDKKVEKVTISNRLVSSPCCIVTSTYGWTANMERIMKAQALRDNSTMGYMMAKKHLEINPDHPIVETLRQKAEADKNDKAVKDLVVLLFETALLSSGFSLEDPQTHSNRIYRMIKLGLGIDEDEVAAEEPNAAVPDEIPPLEGDEDASRMEEVD

SEQ ID NO: 23 - DNA, 1814 bp, Homo sapien
gcaaaaccaacgcctggctcggagcagcagcctctgaggtgtccctggccagtgtccttccacctgtccacaagcatggggaacatcttcgccaacctcttcaagggcctttttggcaaaaaagaaatgcgcatcctcatggtgggcctggatgctgcagggaagaccacgatcctctacaagcttaagctgggtgagatcgtgaccaccattcccaccataggcttcaacgtggaaaccgtggagtacaagaacatcagcttcactgtgtgggacgtgggtggccaggacaagatccggcccctgtggcgccactacttccagaacacacaaggcctgatcttcgtggtggacagcaatgacagagagcgtgtgaacgaggcccgtgaggagctcatgaggatgctggccgaggacgagctccgggatgctgtcctcctggtgttcgccaacaagcaggacctccccaacgccatgaatgcggccgagatcacagacaagctggggctgcactcactacgccacaggaactggtacattcaggccacctgcgccaccagcggcgacgggctctatgaaggactggactggctgtccaatcagctccggaaccagaagtgaacgcgacccccctccctctcactcctcttgccctctgctttactctcatgtggcaaacgtgcggctcgtggtgtgagtgccagaagctgcctccgtggtttggtcaccgtgtgcatcgcaccgtgctgtaaatgtggcagacgcagcctgcggccaggctttttatttaatgtaaatagtttttgtttccaatgaggcagtttctggtactcctatgcaatattactcagctttttttattgtaaaaagaaaaatcaactcactgttcagtgctgagaggggatgtaggcccatgggcacctggcctccaggagtcgctgtgttgggagagccggccacgcccttggcttagagctgtgttgaaatccattttggtggttggttttaacccaaactcagtgcattttttaaaatagttaagaatccaagtcgagaacacttgaacacacagaagggagaccccgcctagcatagatttgcagttacggcctggatgccagtcgccagcccagctgttcccctcgggaacatgaggtggtggtggcgcagcagactgcgatcaattctgcatggtcacagtagagatccccgcaactcgcttgtccttgggtcaccctgcattccatagccatgtgcttgtccctgtgctcccacggttcccaggggccaggctgggagcccacagccaccccactatgccgcaggccgccctacccaccttcaggcagcctatgggacgcaggccccatctgtccctcggtccgcgtgtggccagagtggtccgtcgtccccaacactcgtgctcgctcagacactttggcaggatgtctggggcctcaccagcaggagcgcgtgcaagccgggcaggcggtccacctagacccacagcccctcgggagcaccccacctctgtgtgtgatgtagctttctctccctcagcctgcaagggtccgatttgccatcgaaaaagacaacctctacttttttcttttgtattttgataaacactgaagctggagctgttaaatttatcttggggaaacctcagaactggtctatttggtgtcgtaggaacctcttactgctttcaatacacgattagtaatcaactgttttgtatacttgttttcagttttcatttcgacaaacaagcactgtaattatagctattagaataaaatctcttaactatt

SEQ ID NO: 24 - protein, 181 aa, Homo sapien
MGNIFANLFKGLFGKKEMRILMVGLDAAGKTTILYKLKLGEIVTTIPTIGFNVETVEYKNISFTVWDVGGQDKIRPLWRHYFQNTQGLIFVVDSNDRERVNEAREELMRMLAEDELRDAVLLVFANKQDLPNAMNAAEITDKLGLHSLRHRNWYIQATCATSGDGLYEGLDWLSNQLRNQK

SEQ ID NO: 25 - DNA, 2703 bp, Homo sapien
cgcgccgggaacagccagtcggtgcctaacgcgagtgtatctcgagagagaagcgatcaacagctgccggtctgcgcctgcgcggcgacggggcgtggccgcgggcgagtggggccaaggaggcagccgggagcgggggcgcaggtgttactggttgcgtcgggtcacgtgggcgcgcagcagaccgcggtgcagcccgttcgctcacacaaagcccagacgcggagaaaatggcggcaggggtcgaagcggcggcggaggtggcggcgacggagatcaaaatggaggaagagagcggcgcgcccggcgtgccgagcggcaacggggctccgggccctaagggtgaaggagaacgacctgctcagaatgagaagaggaaggagaaaaacataaaaagaggaggcaatcgctttgagccatatgccaatccaactaaaagatacagagccttcattacaaacataccttttgatgtgaaatggcagtcacttaaagacctggttaaagaaaaagttggtgaggtaacatacgtggagctcttaatggacgctgaaggaaagtcaaggggatgtgctgttgttgaattcaagatggaagagagcatgaaaaaagctgcggaagtcctaaacaagcatagtctgagcggaagaccactgaaagtcaaagaagatcctgatggtgaacatgccaggagagcaatgcaaaaggtgatggctacgactggtgggatgggtatgggaccaggtggcccaggaatgattactatcccacccagtatcctaaataatcccaacatcccaaatgagattatccatgcattacaggctggaagacttggaagcacagtatttgtagcaaatctggattataaagttggctggaagaaactgaaggaagtatttagtatggctggtgtggtggtccgagcagacattcttgaagataaagatggaaaaagtcgtggaataggcactgttacttttgaacagtccattgaagctgtgcaagctatatctatgttcaatggccagctgctatttgatagaccaatgcacgtcaagatggatgagagggccttaccaaaaggagatttcttccctcctgagcgtccacaacaacttccccatggccttggtggtattggcatggggttaggaccaggagggcaacccattgatgccaatcacctgaataaaggcatcggaatgggaaacataggtcccgcaggaatgggaatggaaggcataggatttggaataaataaaatgggaggaatggaggggccctttggtggtggtatggaaaacatgggtcgatttggatctgggatgaacatgggcaggataaatgaaatcctaagtaatgcactgaagagaggagagatcattgcaaagcagggaggaggtggaggtggaggaagcgtccctgggatcgagaggatgggtcctggcattgaccgcctcgggggtgccggcatggagcgcatgggcgcgggcctgggccacggcatggatcgcgtgggctccgagatcgagcgcatgggcctggtcatggaccgcatgggctccgtggagcgcatgggctccggcattgagcgcatgggcccgctgggcctcgaccacatggcctccagcattgagcgcatgggccagaccatggagcgcattggctctggcgtggagcgcatgggtgccggcatgggcttcggccttgagcgcatggccgctcccatcgaccgtgtgggccagaccattgagcgcatgggctctggcgtggagcgcatgggccctgccatcgagcgcatgggcctgagcatggagcgcatggtgcccgcaggtatgggagctggcctggagcgcatgggccccgtgatggatcgcatggccaccggcctggagcgcatgggcgccaacaatctggagcggatgggcctggagcgcatgggcgccaacagcctcgagcgcatgggcctggagcgcatgggtgccaacagcctcgagcgcatgggccccgccatgggcccggccctgggcgctggcattgagcgcatgggcctggccatgggtggcggtggcggtgccagctttgaccgtgccatcgagatggagcgtggcaacttcggaggaagcttcgcaggttcctttggtggagctggaggccatgctcctggggtggccaggaaggcctgccagatatttgtgagaaatctgccattcgatttcacatggaagatgctaaaggacaaattcaacgagtgcggccacgtgctgtacgccgacatcaagatggagaatgggaagtccaaggggtgtggtgtggttaagttcgagtcgccagaggtggccgagagagcctgccggatgatgaatggcatgaagctgagtggccgagagattgacgttcgaattgatagaaacgcttaagcagttgccttttttaaacatcgatacgagacctctgaatttgtattttttcttgttaaccattttaatttgttggctggatgtataaagatgtttaaaaaattcagttgctttttggggtaatttgaattacttttttaatgactggggttccatttgactgtttgcattgagattgcaatgtgcgcaattttttttgtagttgtggcatcttgttgacatcgaatatgactttgataataaataccggttcctgaaaaaaaaaaaaaaaaaaaaaaaa

SEQ ID NO: 26 - protein, 730 aa, Homo sapien
MAAGVEAAAEVAATEIKMEEESGAPGVPSGNGAPGPKGEGERPAQNEKRKEKNIKRGGNRFEPYANPTKRYRAFITNIPFDVKWQSLKDLVKEKVGEVTYVELLMDAEGKSRGCAVVEFKMEESMKKAAEVLNKHSLSGRPLKVKEDPDGEHARRAMQKVMATTGGMGMGPGGPGMITIPPSILNNPNIPNEIIHALQAGRLGSTVFVANLDYKVGWKKLKEVFSMAGVVVRADILEDKDGKSRGIGTVTFEQSIEAVQAISMFNGQLLFDRPMHVKMDERALPKGDFFPPERPQQLPHGLGGIGMGLGPGGQPIDANHLNKGIGMGNIGPAGMGMEGIGFGINKMGGMEGPFGGGMENMGRFGSGMNMGRINEILSNALKRGEIIAKQGGGGGGGSVPGIERMGPGIDRLGGAGMERMGAGLGHGMDRVGSEIERMGLVMDRMGSVERMGSGIERMGPLGLDHMASSIERMGQTMERIGSGVERMGAGMGFGLERMAAPIDRVGQTIERMGSGVERMGPAIERMGLSMERMVPAGMGAGLERMGPVMDRMATGLERMGANNLERMGLERMGANSLERMGLERMGANSLERMGPAMGPALGAGIERMGLAMGGGGGASFDRAIEMERGNFGGSFAGSFGGAGGHAPGVARKACQIFVRNLPFDFTWKMLKDKFNECGHVLYADIKMENGKSKGCGVVKFESPEVAERACRMMNGMKLSGREIDVRIDRNA

SEQ ID NO: 27 - DNA, 2197 bp, Homo sapien
cggcgccattaaagcgaggaggaggcgagagcggccgccgctggtgcttattcttttttagtgcagcgggagagagcgggagtgtgcgccgcgcgagagtgggaggcgaagggggcaggccagggagaggcgcaggagcctttgcagccacgcgcgcgccttccctgtcttgtgtgcttcgcgaggtagagcgggcgcgcggcagcgcggggattactttgctgctagtttcggttcgcggcaggcgggtgtagtctcggcggcagcggcggagacactagcactatgtcggaggagcagttcggcggggacggggcggcggcagcggcaacggcggcggtaggcggctcggcgggcgagcaggagggagccatggtggcggcgacacagggggcagcggcggcggcgggaagcggagccgggaccgggggcggaaccgcgtctggaggcaccgaagggggcagcgccgagtcggagggggcgaagattgacgccagtaagaacgaggaggatgaaggccattcaaactcctccccacgacactctgaagcagcgacggcacagcgggaagaatggaaaatgtttataggaggccttagctgggacactacaaagaaagatctgaaggactacttttccaaatttggtgaagttgtagactgcactctgaagttagatcctatcacagggcgatcaaggggttttggctttgtgctatttaaagaatcggagagtgtagataaggtcatggatcaaaaagaacataaattgaatgggaaggtgattgatcctaaaagggccaaagccatgaaaacaaaagagccggttaaaaaaatttttgttggtggcctttctccagatacacctgaagagaaaataagggagtactttggtggttttggtgaggtggaatccatagagctccccatggacaacaagaccaataagaggcgtgggttctgctttattacctttaaggaagaagaaccagtgaagaagataatggaaaagaaataccacaatgttggtcttagtaaatgtgaaataaaagtagccatgtcgaaggaacaatatcagcaacagcaacagtggggatctagaggaggatttgcaggaagagctcgtggaagaggtggtggccccagtcaaaactggaaccagggatatagtaactattggaatcaaggctatggcaactatggatataacagccaaggttacggtggttatggaggatatgactacactggttacaacaactactatggatatggtgattatagcaaccagcagagtggttatgggaaggtatccaggcgaggtggtcatcaaaatagctacaaaccatactaaattattccatttgcaacttatccccaacaggtggtgaagcagtattttccaatttgaagattcatttgaaggtggctcctgccacctgctaatagcagttcaaactaaattttttgtatcaagtccctgaatggaagtatgacgttgggtccctctgaagtttaattctgagttctcattaaaagaaatttgctttcattgttttatttcttaattgctatgcttcagaatcaatttgtgtgttatgccctttcccccagtattgtagagcaagtcttgtgttaaaagcccagtgtgacagtgtcatgatgtagtagtgtcttactggttttttaataaatccttttgtataaaaatgtattggctcttttatcatcagaataggaaaaattgtcatggattcaagttattaaaagcataagtttggaagacaggcttgccgaaattgaggacatgattaaaattgcagtgaagtttgaaatgtttttagcaaaatctaatttttgccataatgtgtcctccctgtccaaattgggaatgacttaatgtcaatttgtttgttggttgttttaataatacttccttatgtagccattaagatttatatgaatattttcccaaatgcccagtttttgcttaatatgtattgtgctttttagaacaaatctggataaatgtgcaaaagtacccctttgcacagatagttaatgttttatgcttccattaaataaaaaggacttaaaatctgttaattataatagaaatgcggctagttcagagagatttttagagctgtggtggacttcatagatgaattcaagtgttgagggaggattaaagaaat

SEQ ID NO: 28 - protein, 355 aa, Homo sapien
MSEEQFGGDGAAAAATAAVGGSAGEQEGAMVAATQGAAAAAGSGAGTGGGTASGGTEGGSAESEGAKIDASKNEEDEGHSNSSPRHSEAATAQREEWKMFIGGLSWDTTKKDLKDYFSKFGEVVDCTLKLDPITGRSRGFGFVLFKESESVDKVMDQKEHKLNGKVIDPKRAKAMKTKEPVKKIFVGGLSPDTPEEKIREYFGGFGEVESIELPMDNKTNKRRGFCFITFKEEEPVKKIMEKKYHNVGLSKCEIKVAMSKEQYQQQQQWGSRGGFAGRARGRGGGPSQNWNQGYSNYWNQGYGNYGYNSQGYGGYGGYDYTGYNNYYGYGDYSNQQSGYGKVSRRGGHQNSYKPY

SEQ ID NO: 29 - DNA, 1997 bp, Homo sapien
gtactatcctccttacttttgggtcgggccctccgggaagatggcggccgtgcaggcggccgaggtgaaagtggatggcagcgagccgaaactgagcaagaatgagctgaagagacgcctgaaagctgagaagaaagtagcagagaaggaggccaaacagaaagagctcagtgagaaacagctaagccaagccactgctgctgccaccaaccacaccactgataatggtgtgggtcctgaggaagagagcgtggacccaaatcaatactacaaaatccgcagtcaagcaattcatcagctgaaggtcaatggggaagacccatacccacacaagttccatgtagacatctcactcactgacttcatccaaaaatatagtcacctgcagcctggggatcacctgactgacatcaccttaaaggtggcaggtaggatccatgccaaaagagcttctgggggaaagctcatcttctatgatcttcgaggagagggggtgaagttgcaagtcatggccaattccagaaattataaatcagaagaagaatttattcatattaataacaaactgcgtcggggagacataattggagttcaggggaatcctggtaaaaccaagaagggtgagctgagcatcattccgtatgagatcacactgctgtctccctgtttgcatatgttacctcatcttcactttgggctcaaagacaaggaaacaaggtatcgccagagatacttggacttgatcctgaatgactttgtgaggcagaaatttatcatccgctctaagatcatcacatatataagaagtttcttagatgagctgggattcctagagattgaaactcccatgatgaacatcatcccagggggagccgtggccaagcctttcatcacttatcacaacgagctggacatgaacttatatatgagaattgctccagaactctatcataagatgcttgtggttggtggcatcgaccgggtttatgaaattggacgccagttccggaatgaggggattgatttgacgcacaatcctgagttcaccacctgtgagttctacatggcctatgcagactatcacgatctcatggaaatcacggagaagatggtttcagggatggtgaagcatattacaggcagttacaaggtcacctaccacccagatggcccagagggccaagcctacgatgttgacttcaccccacccttccggcgaatcaacatggtagaagagcttgagaaagccctggggatgaagctgccagaaacgaacctctttgaaactgaagaaactcgcaaaattcttgatgatatctgtgtggcaaaagctgttgaatgccctccacctcggaccacagccaggctccttgacaagcttgttggggagttcctggaagtgacttgcatcaatcctacattcatctgtgatcacccacagataatgagccctttggctaaatggcaccgctctaaagagggtctgactgagcgctttgagctgtttgtcatgaagaaagagatatgcaatgcgtatactgagctgaatgatcccatgcggcagcggcagctttttgaagaacaggccaaggccaaggctgcaggtgatgatgaggccatgttcatagatgaaaacttctgtactgccctggaatatgggctgccccccacagctggctggggcatgggcattgatcgagtcgccatgtttctcacggactccaacaacatcaaggaagtacttctgtttcctgccatgaaacccgaagacaagaaggagaatgtagcaaccactgatacactggaaagcacaacagttggcacttctgtctagaaaataataattgcaagttgtataactcaggcgtctttgcatttctgcgaaagatcaaggtctgcaagggaattcttgtgtgctgctttccatttgacaccgcagttctgttcagccatcagaagagagacaaggaattaaaaatttctttttaatcctgtta

SEQ ID NO: 30 - protein, 597 aa, Homo sapien
MAAVQAAEVKVDGSEPKLSKNELKRRLKAEKKVAEKEAKQKELSEKQLSQATAAATNHTTDNGVGPEEESVDPNQYYKIRSQAIHQLKVNGEDPYPHKFHVDISLTDFIQKYSHLQPGDHLTDITLKVAGRIHAKRASGGKLIFYDLRGEGVKLQVMANSRNYKSEEEFIHINNKLRRGDIIGVQGNPGKTKKGELSIIPYEITLLSPCLHMLPHLHFGLKDKETRYRQRYLDLILNDFVRQKFIIRSKIITYIRSFLDELGFLEIETPMMNIIPGGAVAKPFITYHNELDMNLYMRIAPELYHKMLVVGGIDRVYEIGRQFRNEGIDLTHNPEFTTCEFYMAYADYHDLMEITEKMVSGMVKHITGSYKVTYHPDGPEGQAYDVDFTPPFRRINMVEELEKALGMKLPETNLFETEETRKILDDICVAKAVECPPPRTTARLLDKLVGEFLEVTCINPTFICDHPQIMSPLAKWHRSKEGLTERFELFVMKKEICNAYTELNDPMRQRQLFEEQAKAKAAGDDEAMFIDENFCTALEYGLPPTAGWGMGIDRVAMFLTDSNNIKEVLLFPAMKPEDKKENVATTDTLESTTVGTSV

SEQ ID NO: 31 - DNA, 1504 bp, Homo sapien
ggggagagaaggcccggaggggctctgcgttctgtagtggcgctgcttgggcccgtggcggattgtaagctgctggttttgcggctgggaagagcggcgagagggttcggcatttttcgtcgggatccccgcaaggatgagtgctgccagagagtctcacccgcatggggtgaagcgttcagcctccccagacgacgatctgggatctagcaattgggaggcagcagacttgggtaatgaagagagaaaacaaaagttcttgagacttatgggtgcaggaaagaaagaacatactggtcgtcttgttataggagatcacaaatcaacatctcacttccgaaccggggaagaagacaagaaaattaatgaagaactggagtctcaatatcagcaaagtatggacagtaaattatcaggaagatatcggcgacattgtggacttggcttcagtgaggtagaagaccatgatggagaaggtgatgtggctggagatgatgatgatgacgatgatgattcacctgatcctgaaagtccagatgattctgaaagcgattcagagtcagagaaagaagaatctgctgaagaactccaagctgctgagcaccctgatgaagtggaggatcccaaaaacaaaaaagatgcaaaaagcaattataaaatgatgtttgttaaatccagtggttcataactcccaaacgcttagtctttgtattaaaagtaagccttattgttacaatgcacagtggaggactgcttatagagcacagacctttgtattataatttttaaaaaggcccttttaaataattacaaagagtgtttgctttcaaatgccatgggttacacttttatgggcatgactataaccatttttgtaaagagtaagagttgtataaaataagaaataaatacagtactcaacttcctttcatattagcatcatcaaccctctaattcaccttatgggggaaatgcttctttttgtttgtgatagctattttatcatttccttcatatttttctcttataaaaatgtatttgatactgtgatatgttcacgaaaagtattctttaattattctttgttatagtagagctgttcattatggatatttctgctgccagtcacaatctaaattaattttggcaaaagattgggtacttagttgcctgttactgagttagctctactcttttggaccaaagcaacatgagagcaagtacttttcacacttgttaagatggagttataactgtcatacatttggaatattatgatcccaagtagtctttttataatttggattgtatcgtatgttagatttttgataaaatttggccaatttttacagaagaaattctctgatcatttagttctatctatttagaaatatgtaaaactggatttttttttaagtaatatgtgaccaaagttaattttgtcccaaaggtctaaataaagagcagtttcccacaaaaaaaaaaaaaaaaaaaaaaaaaaaaa

SEQ ID NO: 32 - protein, 183 aa, Homo sapien
MSAARESHPHGVKRSASPDDDLGSSNWEAADLGNEERKQKFLRLMGAGKKEHTGRLVIGDHKSTSHFRTGEEDKKINEELESQYQQSMDSKLSGRYRRHCGLGFSEVEDHDGEGDVAGDDDDDDDDSPDPESPDDSESDSESEKEESAEELQAAEHPDEVEDPKNKKDAKSNYKMMFVKSSGS

SEQ ID NO: 33 - DNA, 849 bp, Homo sapien
gcggtcagctattgacacttcctggtgggatccgagtgaggcgacggggtaggggttggcgctcaggcggcgaccatggcgtatcacggcctcactgtgcctctcattgtgatgagcgtgttctggggcttcgtcggcttcttggtgccttggttcatccctaagggtcctaaccggggagttatcattaccatgttggtgacctgttcagtttgctgctatctcttttggctgattgcaattctggcccaactcaaccctctctttggaccgcaattgaaaaatgaaaccatctggtatctgaagtatcattggccttgaggaagaagacatgctctacagtgctcagtctttgaggtcacgagaagagaatgccttctagatgcaaaatcacctccaaaccagaccacttttcttgacttgcctgttttggccattagctgccttaaacgttaacagcacatttgaatgccttattctacaatgcagcgtgttttcctttgccttttttgcactttggtgaattacgtgcctccataacctgaactgtgccgactccacaaaacgattatgtactcttctgagatagaagatgctgttcttctgagagatacgttactctctccttggaatctgtggatttgaagatggctcctgccttctcacgtgggaatcagtgaagtgtttagaaactgctgcaagacaaacaagactccagtggggtggtcagtaggagagcacgttcagagggaagagccatctcaacagaatcgcaccaaactatactttcaggatgaatttcttctttctgccatcttttggaataaatattttcctcctttctatgga

SEQ ID NO: 34 - protein, 81 aa, Homo sapien [sequence omitted]

SEQ ID NO: 35 - DNA, 3301 bp, Homo sapien
aggagccaggaagagagctgtgaccagcagcgtcccttattcgcttggccttggttcctgtttgcactggctacagcagggcactggcccctactgtcaccgccacctacacaaagaccctatctctgagcgctgcagcctactgttcagccccaggtttgaggatggatgccctggacgcttcgaagctactggatgaggagctgtattcaagacagctgtatgtgctgggctcacctgccatgcagaggattcagggagccagggtcctggtgtcaggcctgcagggcctgggggccgaggtggccaagaacttggttctgatgggtgtgggcagcctcactctgcatgatccccaccccacctgctggtccgacctggctgcccagtttctcctctcagagcaggacttggaaaggagcagagccgaggcctctcaagagctcttggctcagctcaacagagctgtccaggtcgtcgtgcacacgggtgacatcactgaggacctgctgttggacttccaggtggtggtgctgactgctgcaaagctggaggagcagctgaaggtgggcaccttgtgtcataagcatggagtttgctttctggcggctgacacccggggcctcgtggggcagttgttctgtgactttggtgaggacttcactgtgcaggaccccacagaggcagaacccctgacagctgccatccagcacatctcccagggctcccctggcattctcactctgaggaaaggggccaatacccactacttccgtgatggagacttggtgactttctcgggaattgagggaatggttgagctcaacgactgtgatccccggtctatccacgtgcgggaggatgggtccctggagattggagacacaacaactttctctcggtacttgcgtggtggggctatcactgaagtcaagagacccaagactgtgagacataagtccctggacacagccctgctccagccccatgtggtggcccagagctcccaggaagttcaccatgcccactgcctgcatcaggccttctgtgcactgcacaagttccagcacctccatggccggccaccccagccctgggatcctgttgatgcagagactgtggtgggcctggcccgggacctggaaccactgaagcggacagaggaagagccactggaagagccactggatgaggccctagtgcggacagtcgccctaagcagtgcaaggtgtcttgagcctatggtggcatgctgggtcagtagctgcccaggaagtgctgaaggcaatctccagaagttcatgcctctggaccagtggctttactttgatgccctcgattgtcttccggaagatggggagctccttcccagtcctgaggactgtgccctgagaggcagccgctatgatgggcaaattgcagtgtttggggctggttttcaggagaaactgagacgccagcactacctcctggtgggcgctggtgccattggttgtgagctgctcaaagtctttgccctagtgggactgggggccgggaacagcgggggcttgactgttgttgacatggaccacatagagcgctccaatctcagccgtcagttcctcttcaggtcccaggacgttggtagacccaaggcagaggtggctgcagcagctgcccggggcctgaacccagacttacaggtgatcccgctcacctacccactggatcccaccacagagcacatctatggggataactttttctcccgtgtggatggtgtggctgctgccctggacagtttccaggcccggcgctatgtggctgctcgttgcacccactatctgaagccactgctggaggcaggcacatcgggcacctggggcagtgctacagtattcatgccacatgtgactgaggcctacagagcccctgcctcagctgcagcttctgaggatgccccctaccctgtctgtaccgtgcggtacttccctagcacagccgagcacaccctgcagtgggcccggcatgagtttgaagaactcttccgactgtctgcagagaccatcaaccaccaccaacaggcacacacctccctggcagacatggatgagccacagacactcaccttactgaagccagtgcttggggtcctgagagtgcgtccacagaactggcaagactgtgtggcgtgggctcttggccactggaaactctgctttcattatggcatcaaacagctgctgaggcacttcccacctaataaagtgcttgaggatggaactcccttctggtcaggtcccaaacagtgtccccagcccttggagtttgacaccaaccaagacacacacctcctctacgtactggcagctgccaacctgtatgcccagatgcatgggctgcctggctcacaggactggactgcactcagggagctgctgaagctgctgccacagcctgacccccaacagatggcccccatctttgctagtaatctagagctggcttcggcttctgctgagtttggccctgagcagcagaaggaactgaacaaagccctggaagtctggagtgtgggccctcccctgaagcctctgatgtttgagaaggatgatgacagcaacttccatgtggactttgtggtagcggcagctagcctgagatgtcagaactacgggattccaccggtcaaccgtgcccagagcaagcgaattgtgggccagattatcccagccattgccaccactacagcagctgtggcaggcctgttgggcctggagctgtataaggtggtgagtgggccacggcctcgtagtgcctttcgccacagctacctacatctggctgaaaactacctcatccgctatatgccttttgccccagccatccagacgttccatcacctgaagtggacctcttgggaccgtctgaaggtaccagctgggcagcctgagaggaccctggagtcgctgctggctcatcttcaggagcagcacgggttgagggtgaggatcctgctgcacggctcagccctgctctatgcggccggatggtcacctgaaaagcaggcccagcacctgcccctcagggtgacagaactggttcagcagctgacaggccaggcacctgctcctgggcagcgggtgttggtgctagagctgagctgtgagggtgacgacgaggacactgccttcccacctctgcactatgagctgtgacaaggcagccaccctgtcacctagctcaatggagccccggatcccaagccctgcattgtaagcccacagtaggcactcaataattgcttgttaaaggaagg

SEQ ID NO: 36 - protein, 1011 aa, Homo sapien
MDALDASKLLDEELYSRQLYVLGSPAMQRIQGARVLVSGLQGLGAEVAKNLVLMGVGSLTLHDPHPTCWSDLAAQFLLSEQDLERSRAEASQELLAQLNRAVQVVVHTGDITEDLLLDFQVVVLTAAKLEEQLKVGTLCHKHGVCFLAADTRGLVGQLFCDFGEDFTVQDPTEAEPLTAAIQHISQGSPGILTLRKGANTHYFRDGDLVTFSGIEGMVELNDCDPRSIHVREDGSLEIGDTTTFSRYLRGGAITEVKRPKTVRHKSLDTALLQPHVVAQSSQEVHHAHCLHQAFCALHKFQHLHGRPPQPWDPVDAETVVGLARDLEPLKRTEEEPLEEPLDEALVRTVALSSARCLEPMVACWVSSCPGSAEGNLQKFMPLDQWLYFDALDCLPEDGELLPSPEDCALRGSRYDGQIAVFGAGFQEKLRRQHYLLVGAGAIGCELLKVFALVGLGAGNSGGLTVVDMDHIERSNLSRQFLFRSQDVGRPKAEVAAAAARGLNPDLQVIPLTYPLDPTTEHIYGDNFFSRVDGVAAALDSFQARRYVAARCTHYLKPLLEAGTSGTWGSATVFMPHVTEAYRAPASAAASEDAPYPVCTVRYFPSTAEHTLQWARHEFEELFRLSAETINHHQQAHTSLADMDEPQTLTLLKPVLGVLRVRPQNWQDCVAWALGHWKLCFHYGIKQLLRHFPPNKVLEDGTPFWSGPKQCPQPLEFDTNQDTHLLYVLAAANLYAQMHGLPGSQDWTALRELLKLLPQPDPQQMAPIFASNLELASASAEFGPEQQKELNKALEVWSVGPPLKPLMFEKDDDSNFHVDFVVAAASLRCQNYGIPPVNRAQSKRIVGQIIPAIATTTAAVAGLLGLELYKVVSGPRPRSAFRHSYLHLAENYLIRYMPFAPAIQTFHHLKWTSWDRLKVPAGQPERTLESLLAHLQEQHGLRVRILLHGSALLYAAGWSPEKQAQHLPLRVTELVQQLTGQAPAPGQRVLVLELSCEGDDEDTAFPPLHYEL

SEQ ID NO: 37 - DNA, 430 bp, Homo sapien
gacagccacgaagatcctaccaaaatgaagcgcttcctcttcctcctactcaccatcagcctcctggttatggtacagatacaaactggactctcaggacaaaacgacaccagccaaaccagcagcccctcagcatccagcagcatgagcggaggcattttccttttcttcgtggccaatgccataatccacctcttctgcttcagttgaggtgacacgtctcagccttagccctgtgccccctgaaacagctgccaccatcactcgcaagagaatcccctccatctttgggaggggttgatgccagacatcaccaggttgtagaagttgacaggcagtgccatgggggcaacagccaaaataggggggtaatgatgtaggggccaagcagtgcccagctgggggagaataaagttacccttgtactgca

SEQ ID NO: 38 - protein, 61 aa, Homo sapien
MKRFLFLLLTISLLVMVQIQTGLSGQNDTSQTSSPSASSSMSGGIFLFFVANAIIHLFCFS

SEQ ID NO: 39 - DNA, 2417 bp, Homo sapien
tatattggcagttattgagggtaaagcaatatattgtaacagaatgtataaatatttttgataaaacagtctatattttattaaaaaatgaattataacccattttcagttttgcctgcatcataagagtgagcactccattgctttctttcctggccacactgctacaatccagcactaactatccatgtccagggtaaggatcgagatcgagaagcccacactgccagtgaaaaagctacgtctttactgcataaattagaggaagcaatttcggaacaacggaaccttcaaactataaatactgaattatcgaacacttgccaggcacttcagcagaagacaaggaaactgaagaagctttttagatgaggaatttcctcactatgattccctgtcctgcgcagatgcaattcaacaacctcttcaagaaaaattgaagcagtgttgccacaaactatatggtggtcaagaagcaagaatacatcagacacccctgaccttgaaacatacgtgctggtacacacctctgctggatgccttatctctggatagttttacagcagttccaaccctggaatcaacacctttctcaggtgtagccaaccaaatccacactctgtgtgaaaggcccacatatggagaagtaaaggatggtgctttggatgtaaaaagacaacacaagtgcccaggccccacaagtggccccagcccaggaacgaatctctcaggctgcatcaggatgaatgatgacccaagtatggaagagaatggtgttgaacgcgtgtgtcctgagagcctgctgcagtccaggggatattcctcactaccattacccagacacacttcatcgacagacggtactataacttcaagtgatcctggattagaaattctgaatatggcttcttgtgaccttgacagaaactcgctctgtaagaaagaggaggatacaagatcagcttctcccacgatagaggcccaaggcacaagtccagctcatgataatattgcattccaagactctacgagtaaggataaaaccatattaaatctggaagccaaagaggaaccagaaacaatagaagaacataaaaaagaacatgcttcaggagactctgtggtttcccctcttcctgtaaccactgtgaaatcggttaacgttagacaaagtgagaacacttctgctaatgagaaggaggtggaggcagaatttctcagattatctttgggatttaagtgtgactggtttaccttggagaagagagtgaagcttgaagagaggtcccgtgactgggcagaagaaaatttgaagaaagaaatcactaactctttaaaactattagagtctttaacacctctgtgtgaagatgacaaccaggcacaggaaatcattaagaagctggagaagagtataaagtttcttagccagtgtgcagcacgagtggccagtagggctgagatgttgggagccatcaatcaggaaagccgggttagtaaagcagttgaagtgatgattcagcacgtagaaaacttgaagaggatgtatgccaaagagcacgctgaattagaagaactgaaacaggttcttctgcagaatgaaaggtctttcaatcctcttgaagatgatgatgactgccaaattaaaaaacgttcagcttctctaaactccaagccatcttctctacgaagagtgactattgcctctttacccagaaatattggaaatgcaggaatggtggctgggatggaaaataatgatcgattcagtagaaggtcaagcagttggcgtattttggggtcaaagcagagtgaacaccgtccctcattacctcgatttattagcacctattcctgggcagatgctgaagaagaaaaatgtgaactaaaaactaaagatgactcagagccatctggagaagaaacagtagaaaggacaaggaagccaagtctttctgaaaagaaaaataatccatcaaagtgggatgtctcttcagtttatgacacaatagcttcctgggcaacaaatctcaagtcctccatcagaaaggctaataaggccctctggctctctattgcattcattgtactgtttgcagctttgatgagcttcctcacaggccaattattccagaagtctgtggatgccgctcccacacagcaagaggactcatggacgtctctagaacatatcttgtggccatttaccagactccgacacaatgggccaccaccagtgtgacagcaggacatcctaatatatggatcttgatttttaagtttcagtatctgaacttcgtaaattagtaacttttagctgggaaagtatagcatgaaaccagaggttctcagaatgaccgtaagatagcttacatttcctctttttgcctttatctccccaactaaaatacaatggg

SEQ ID NO: 40 - protein, 555 aa, Homo sapien
MESTPFSGVANQIHTLCERPTYGEVKDGALDVKRQHKCPGPTSGPSPGTNLSGCIRMNDDPSMEENGVERVCPESLLQSRGYSSLPLPRHTSSTDGTITSSDPGLEILNMASCDLDRNSLCKKEEDTRSASPTIEAQGTSPAHDNIAFQDSTSKDKTILNLEAKEEPETIEEHKKEHASGDSVVSPLPVTTVKSVNVRQSENTSANEKEVEAEFLRLSLGFKCDWFTLEKRVKLEERSRDWAEENLKKEITNSLKLLESLTPLCEDDNQAQEIIKKLEKSIKFLSQCAARVASRAEMLGAINQESRVSKAVEVMIQHVENLKRMYAKEHAELEELKQVLLQNERSFNPLEDDDDCQIKKRSASLNSKPSSLRRVTIASLPRNIGNAGMVAGMENNDRFSRRSSSWRILGSKQSEHRPSLPRFISTYSWADAEEEKCELKTKDDSEPSGEETVERTRKPSLSEKKNNPSKWDVSSVYDTIASWATNLKSSIRKANKALWLSIAFIVLFAALMSFLTGQLFQKSVDAAPTQQEDSWTSLEHILWPFTRLRHNGPPPV

SEQ ID NO: 41 - DNA, 2937 bp, Homo sapien
acgcgtccgcttcggaatgagagactcaaccataatagaaagaatggagaactattaaccaccattcttcagtgggctgtgattttcagaggggaatactaagaaatggttttccatactggaacccaaaggtaaagacactcaaggacagacatttttggcagagcatagatgaaaatggcaagttccctggctttccttctgctcaactttcatgtctccctcttcttggtccagctgctcactccttgctcagctcagttttctgtgcttggaccctctgggcccatcctggccatggtgggtgaagacgctgatctgccctgtcacctgttcccgaccatgagtgcagagaccatggagctgaggtgggtgagttccagcctaaggcaggtggtgaacgtgtatgcagatggaaaggaagtggaagacaggcagagtgcaccatatcgagggagaacttcgattctgcgggatggcatcactgcagggaaggctgctctccgaatacacaacgtcacagcctctgacagtggaaagtacttgtgttatttccaagatggtgacttctacgaaaaagccctggtggagctgaaggttgcagcattgggttctgatcttcacattgaagtgaagggttatgaggatggagggatccatctggagtgcaggtccactggctggtacccccaaccccaaataaagtggagcgacaccaagggagagaacatcccggctgtggaagcacctgtggttgcagatggagtgggcctgtatgcagtagcagcatctgtgatcatgagaggcagctctggtgggggtgtatcctgcatcatcagaaattccctcctcggcctggaaaagacagccagcatatccatcgcagaccccttcttcaggagcgcccagccctggatcgcggccctggcagggaccctgcctatctcgttgctgcttctcgcaggagccagttacttcttgtggagacaacagaaggaaaaaattgctctgtccagggagacagaaagagagcgagagatgaaagaaatgggatacgctgcaacagagcaagaaataagcctaagagagaagctccaggaggaactcaagtggaggaaaatccagtacatggctcgtggagagaagtctttggcctatcatgaatggaaaatggccctcttcaaacctgcggatgtgattctggatccagacacggcaaacgccatcctccttgtttctgaggaccagaggagtgtgcagcgtgctgaagagccgcgggatctgccagacaaccctgagagatttgaatggcgttactgtgtccttggctgtgaaaacttcacatcagggagacattactgggaggtggaagtgggggacagaaaagagtggcatattggggtatgtagtaagaacgtggagaggaaaaaaggttgggtcaaaatgacaccggagaacggatactggactatgggcctgactgatgggaataagtatcgggctctcactgagcccagaaccaacctgaaacttcctgagcctcctaggaaagtggggatcttcctggactatgagactggagagatctcgttctataatgccacagatggatctcatatctacacctttccgcacgcctctttctctgagcctctatatcctgttttcagaattttgaccttggagcccactgccctgaccatttgcccaataccaaaagaagtagagagttcccccgatcctgacctagtgcctgatcattccctggagacaccactgaccccgggcttagctaatgaaagtggggagcctcaggctgaagtaacatctctgcttctccctgcccaccctggagctgaggtctccccttctgcaacaaccaatcagaaccataagctacaggcacgcactgaagcactttactgatattcattccattattccatatgacagttgttttgagtttcgtaccaccttattgtccccttatacagataaggaaactggggtgcagaaaggtgaattaactttacaaagtagacatgacaagtgaacagcagagctgggatctaaacagcaataactaacattaacagagaatttaaaatgttcttagtgctgtgttataagctttggtggatgtcactcctttaatcctcacaacaccctgtcgggtagtcatattttgcaagtatggaagctgaggcagggcaacatgaagtaacttacataattcatacagtaatttgtgcagttgggagatgttcagccttagtccctggctaattgcctgttcttttccagcctgattttttttcccacaggaagagcccacatgtagccctgaggtttccttcccaggacagctgcagggtagagatcattttaagtgcttgtggagttgacatccctattgactctttcccagctgatatcagagacttagacccagcactccttggattagctctgcagagtgtcttggttgagagaataacctcatagtaccaacatgacatgtgacttggaaagagactagaggccacacttgataaatcatggggcacagatatgttcccacccaacaaatgtgataagtgattgtgcagccagagccagccttccttcaatcaaggtttccaggcagagcaaataccctagagattctctgtgatataggaaatttggatcaaggaagctaaaagaattacagggatgtttttaatcccactatggactcagtctcctggaaataggtctgtccactcctggtcattggtggatgttaaacccatattcctttcaactgctgcctgctagggaaaactgctcctcattatcatcactattattgctcaccactgtatcccctctacttggcaagtggttgtcaagttctagttgttcaataaatgtgttaataatgaaaaaaaaaaa

SEQ ID NO: 42 - protein, 584 aa, Homo sapien
MKMASSLAFLLLNFHVSLFLVQLLTPCSAQFSVLGPSGPILAMVGEDADLPCHLFPTMSAETMELRWVSSSLRQVVNVYADGKEVEDRQSAPYRGRTSILRDGITAGKAALRIHNVTASDSGKYLCYFQDGDFYEKALVELKVAALGSDLHIEVKGYEDGGIHLECRSTGWYPQPQIKWSDTKGENIPAVEAPVVADGVGLYAVAASVIMRGSSGGGVSCIIRNSLLGLEKTASISIADPFFRSAQPWIAALAGTLPISLLLLAGASYFLWRQQKEKIALSRETEREREMKEMGYAATEQEISLREKLQEELKWRKIQYMARGEKSLAYHEWKMALFKPADVILDPDTANAILLVSEDQRSVQRAEEPRDLPDNPERFEWRYCVLGCENFTSGRHYWEVEVGDRKEWHIGVCSKNVERKKGWVKMTPENGYWTMGLTDGNKYRALTEPRTNLKLPEPPRKVGIFLDYETGEISFYNATDGSHIYTFPHASFSEPLYPVFRILTLEPTALTICPIPKEVESSPDPDLVPDHSLETPLTPGLANESGEPQAEVTSLLLPAHPGAEVSPSATTNQNHKLQARTEALY

SEQ ID NO: 43 - DNA, 6754 bp, Homo sapien
ccgggctgcgcggcgaggctgagccgggcccgggcgccggggccgggggcggctggcgcgggcaggaagcgcctcgcggacccgggcccgccccccgcctcccgccgcctccgggctcccggctcccggccgcgcctcgccccatgcactcgccgcgccgcgcagcccgcgcacgcccggatggctcctcgcgccgcgggcggcgcaccccttagcgcccgggccgccgccgccagccccccgccgttccagacgccgccgcggtgcccggtgccgctgctgttgctgctgctcctgggggcggcgcgggccggcgccctggagatccagcgtcggttcccctcgcccacgcccaccaacaacttcgccctggacggcgcggcggggaccgtgtacctggcggccgtcaaccgcctctatcagctgtcgggcgccaacctgagcctggaggccgaggcggccgtgggcccggtgcccgacagcccgctgtgtcacgctccgcagctgccgcaggcctcgtgcgagcacccgcggcgcctcacggacaactacaacaagatcctgcagctggaccccggccagggcctggtagtcgtgtgcgggtccatctaccagggcttctgccagctgcggcgccggggtaacatctcggccgtggccgtgcgcttcccgcccgccgcgccgcccgccgagcccgtcacggtgttccccagcatgctgaacgtggcggccaaccacccgaacgcgtccaccgtggggctagttctgcctcccgccgcgggcgcggggggcagccgcctgctcgtgggcgccacgtacaccggttacggcagctccttcttcccgcgcaaccgcagcctggaggaccaccgcttcgagaacacgcccgagatcgccatccgctccctggacacgcgcggcgacctggccaagctcttcaccttcgacctcaacccctccgacgacaacatcctcaagatcaagcagggcgccaaggagcagcacaagctgggcttcgtgagcgccttcctgcacccgtccgacccgccgccgggtgcacagtcctacgcgtacctggcgctcaacagcgaggcgcgcgcgggcgacaaggagagccaggcgcggagcctgctggcgcgcatctgcctgccccacggcgccggcggcgacgccaagaagctcaccgagtcctacatccagttgggcttgcagtgcgcgggcggcgcgggccgcggcgacctctacagccgcctggtgtcggtcttcccagcccgggagcggctctttgctgtcttcgagcggccccaggggtcccccgcggcccgcgctgctccggccgcactctgcgccttccgcttcgccgacgtgcgagccgccatccgagctgcgcgcaccgcctgcttcgtggaaccggcgcccgacgtggtggcggtgctcgacagcgtggtgcagggcacgggaccggcctgcgagcgcaagctcaacatccagctccagccagagcagctggactgtggagctgctcacctgcagcacccgctgtccatcctgcagcccctgaaggccacgcccgtgttccgcgccccgggcctcacctccgtggccgtggccagcgtcaacaactacacagcggtcttcctgggcacggtcaacgggaggcttctcaagatcaacctgaacgagagcatgcaggtggtgagcaggcgggtggtgactgtggcctatggggagcccgtgcaccatgtcatgcagtttgacccagcagactccgtttacctttacctgatgacgtcccaccagatggccagggtgaaggtcgccgcctgcaacgtgcactccacctgtggggactgcgtgggtgcggcggacgcctactgcggctggtgtgccctggagacgcggtgcaccttgcagcaggactgcaccaattccagccagcagcatttctggaccagtgccagcgagggccccagccgctgtcctgccatgaccgtcctgccttccgagatcgatgtgcgccaggagtacccaggcatgatcctgcagatctcgggcagcctgcccagcctcagtggcatggagatggcctgtgactatgggaacaacatccgcactgtggctcgggtcccaggccctgcctttggtcaccagattgcctactgcaacctcctgccgagggaccagtttccgcccttcccccccaaccaggaccacgtgactgttgagatgtctgtgagggtcaatgggcggaacatcgtcaaggccaatttcaccatctacgactgcagccgcactgcacaagtgtacccccacacagcctgtaccagctgcctgtcggcacagtggccctgtttctggtgcagccagcagcactcctgtgtttccaaccagtctcggtgcgaggcctcaccaaaccccacgagccctcaggactgcccccggaccctgctctcacccctggcacccgtgcctacgggtggctcccagaacatcctggtgcctctggccaacactgcctttttccagggtgcagccctggagtgtagttttgggctggaggagatcttcgaggctgtgtgggtgaatgagtctgttgtacgctgtgaccaggtggtgctgcacacgacccggaagagccaggtgttcccgctcagcctccaactaaaggggcggccagcccgattcctggacagccctgagcccatgacagtcatggtctataactgtgccatgggcagccccgactgttcccagtgcctgggccgcgaagacctgggtcacctgtgcatgtggagtgatggctgccgcctgcgggggcctctgcagcccatggctggcacctgccccgcccccgagatccgcgcgattgagcccctgagtggcccgttggacggtgggaccctgctgaccatccgaggaaggaacctgggccggcggctcagtgacgtggcccacggcgtgtggattggtggtgtggcctgtgagccactgcctgacagatacacggtgtcggaggagatcgtgtgtgtcacagggccagccccaggaccactctcaggtgtggtgaccgtgaacgcctctaaggagggcaagtcccgggaccgcttctcctacgtgctgcccctggtccactccctggagcctaccatgggccccaaggccgggggcaccaggatcaccatccatgggaatgacctccatgtaggctccgagctccaggtcctggtgaacgacacagacccctgcacggagctgatgcgcacagataccagcatcgcctgcaccatgcctgagggggccctgccggctccggtgcctgtgtgtgtgcgcttcgagcgtcggggctgcgtgcacggcaacctcaccttctggtacatgcagaacccggtcatcacggccatcagtccccgccgcagccctgtcagtggcggcaggaccatcacagtggctggtgagcgtttccacatggtgcagaatgtgtccatggccgtccaccacattggccgggagcccacgctctgcaaggttctcaactccaccctcatcacctgcccgtcccccggggccctgagcaacgcatcagcgccagtggacttcttcatcaatgggcgggcctacgcagacgaggtggctgtggctgaggagctactggaccccgaggaggcacagcggggcagcaggttccgcctggactacctccccaacccacagttctctacggccaagagggagaagtggatcaagcaccaccccggggagcctctcaccctcgttatccacaaggagcaggacagcctggggctccagagtcacgagtaccgggtcaagataggccaagtaagctgcgacatccagattgtctctgacagaatcatccactgctcggtcaacgagtccctgggcgcggccgtggggcagctgcccatcacaatccaggtagggaacttcaaccagaccatcgccacactgcagctggggggtagcgagacggccatcatcgtgtccatcgtcatctgcagcgtcctgctgctgctctccgtggtggccctgttcgtcttctgtaccaagagccgacgtgctgagcgttactggcagaagacgctgctgcagatggaggagatggaatctcagatccgagaggaaatccgcaaaggcttcgctgagctgcagacagacatgacagatctcaccaaggagctgaaccgcagccagggcatccccttcctggagtataagcacttcgtgacccgcaccttcttccccaagtgttcctccctttatgaagagcgttacgtgctgccctcccagaccctcaactcccagggcagctcccaggcacaggaaacccacccactgctgggagagtggaagattcctgagagctgccggcccaacatggaagagggaattagcttgttctcctcactactcaacaacaagcacttcctcatcgtctttgtccacgcgctggagcagcagaaggactttgcggtgcgcgacaggtgcagcctggcctcgctgctgaccatcgcgctgcacggcaagctggagtactacaccagcatcatgaaggagctgctggtggacctcattgacgcctcggccgccaagaaccccaagctcatgctgcggcgcacagagtctgtggtggagaagatgctcaccaactggatgtccatctgcatgtacagctgtctgcgggagacggtgggggagccattcttcctgctgctgtgtgccatcaagcagcaaatcaacaagggctccatcgacgccatcacaggcaaggcccgctacacactcaatgaggagtggctgctgcgggagaacatcgaggccaagccccggaacctgaacgtgtccttccagggctgtggcatggactcgctgagcgtgcgggccatggacaccgacacgctgacacaggtcaaggagaagatcctggaggccttctgcaagaatgtgccctactcccagtggccgcgtgcagaggacgtcgaccttgagtggttcgcctccagcacacagagctacatccttcgggacctggacgacacctcagtggtggaagacggccgcaagaagcttaacacgctggcccattacaagatccctgaaggtgcctccctggccatgagtctcatagacaagaaggacaacacactgggccgagtgaaagacttggacacagagaagtatttccatttggtgctgcctacggacgagctggcggagcccaagaagtctcaccggcagagccatcgcaagaaggtgctcccggaaatctacctgacccgcctgctctccaccaagggcacgttgcagaagtttctggatgacctgttcaaggccattctgagtatccgtgaagacaagcccccactggctgtcaagtactttttcgacttcctggaggagcaggctgagaagaggggaatctccgaccccgacaccctacacatctggaagaccaacagccttcctctccggttctgggtgaacatcctgaagaacccccagtttgtctttgacatcgacaagacagaccacatcgacgcctgcctttcagtcatcgcgcaggccttcatcgacgcctgctccatctctgacctgcagctgggcaaggattcgccaaccaacaagctcctctacgccaaggagattcctgagtaccggaagatcgtgcagcgctactacaagcagatccaggacatgacgccgctcagcgagcaagagatgaatgcccatctggccgaggagtcgaggaaataccagaatgagttcaacaccaatgtggccatggcagagatttataagtacgccaagaggtatcggccgcagatcatggccgcgctggaggccaaccccacggcccggaggacacaactgcagcacaagtttgagcaggtggtggctttgatggaggacaacatctacgagtgctacagtgaggcctgagacacatggagagttggtcaggctgctgctgggagaaatggacgcccactgggcctcaacttgatcttctaccccgtgcctgtgactcagactgggaaatactgagcagagacggctggggcgggggcaggaggaggggctgctctctgagacaggggcgcccccgccttgacccctgggcacctccatcccctcccacctgtccccagatcagtctctgggatggaggccagagagctggtcaggctcccccatctgcccagcacggcctgcactgtgcccacccacttgctccacaacgtccagttggtcctgctgccaagagccccgtgcatccaggcggccaagcacaaactgggggagaggaggccgccagcccggaggctgcagcccagaaactctacctcatccacactggtgcagggagccctccttgaactgacctttgattggtttctgcttcaactaccaaaatgttatctccacttccccctcacccgtagaggatcctggccacagacagtttcaagtagtgtcagatttttgttgcttgggcggctgttggtagagtgggcagtgcccgcgccatggggtgctctgtgggcttctccaggagcagggagggtggaggggagggatggggggcacaggagctgggagccccgtctccaggaaaaggagaggggttaagatgcaccgaggctgtagctgggctacttgatcttgctgaaagtgtttctaaagatagcaccacttttttttttaaagcttttatatattaaaaaacgtatcatgc

SEQ ID NO: 44 - protein, 1985 aa, Homo sapien
PGCAARLSRARAPGPGAAGAGRKRLADPGPPPASRRLRAPGSRPRLAPCTRRAAQPAHARMAPRAAGGAPLSARAAAASPPPFQTPPRCPVPLLLLLLLGAARAGALEIQRRFPSPTPTNNFALDGAAGTVYLAAVNRLYQLSGANLSLEAEAAVGPVPDSPLCHAPQLPQASCEHPRRLTDNYNKILQLDPGQGLVVVCGSIYQGFCQLRRRGNISAVAVRFPPAAPPAEPVTVFPSMLNVAANHPNASTVGLVLPPAAGAGGSRLLVGATYTGYGSSFFPRNRSLEDHRFENTPEIAIRSLDTRGDLAKLFTFDLNPSDDNILKIKQGAKEQHKLGFVSAFLHPSDPPPGAQSYAYLALNSEARAGDKESQARSLLARICLPHGAGGDAKKLTESYIQLGLQCAGGAGRGDLYSRLVSVFPARERLFAVFERPQGSPAARAAPAALCAFRFADVRAAIRAARTACFVEPAPDVVAVLDSVVQGTGPACERKLNIQLQPEQLDCGAAHLQHPLSILQPLKATPVFRAPGLTSVAVASVNNYTAVFLGTVNGRLLKINLNESMQVVSRRVVTVAYGEPVHHVMQFDPADSVYLYLMTSHQMARVKVAACNVHSTCGDCVGAADAYCGWCALETRCTLQQDCTNSSQQHFWTSASEGPSRCPAMTVLPSEIDVRQEYPGMILQISGSLPSLSGMEMACDYGNNIRTVARVPGPAFGHQIAYCNLLPRDQFPPFPPNQDHVTVEMSVRVNGRNIVKANFTIYDCSRTAQVYPHTACTSCLSAQWPCFWCSQQHSCVSNQSRCEASPNPTSPQDCPRTLLSPLAPVPTGGSQNILVPLANTAFFQGAALECSFGLEEIFEAVWVNESVVRCDQVVLHTTRKSQVFPLSLQLKGRPARFLDSPEPMTVMVYNCAMGSPDCSQCLGREDLGHLCMWSDGCRLRGPLQPMAGTCPAPEIRAIEPLSGPLDGGTLLTIRGRNLGRRLSDVAHGVWIGGVACEPLPDRYTVSEEIVCVTGPAPGPLSGVVTVNASKEGKSRDRFSYVLPLVHSLEPTMGPKAGGTRITIHGNDLHVGSELQVLVNDTDPCTELMRTDTSIACTMPEGALPAPVPVCVRFERRGCVHGNLTFWYMQNPVITAISPRRSPVSGGRTITVAGERFHMVQNVSMAVHHIGREPTLCKVLNSTLITCPSPGALSNASAPVDFFINGRAYADEVAVAEELLDPEEAQRGSRFRLDYLPNPQFSTAKREKWIKHHPGEPLTLVIHKEQDSLGLQSHEYRVKIGQVSCDIQIVSDRIIHCSVNESLGAAVGQLPITIQVGNFNQTIATLQLGGSETAIIVSIVICSVLLLLSVVALFVFCTKSRRAERYWQKTLLQMEEMESQIREEIRKGFAELQTDMTDLTKELNRSQGIPFLEYKHFVTRTFFPKCSSLYEERYVLPSQTLNSQGSSQAQETHPLLGEWKIPESCRPNMEEGISLFSSLLNNKHFLIVFVHALEQQKDFAVRDRCSLASLLTIALHGKLEYYTSIMKELLVDLIDASAAKNPKLMLRRTESVVEKMLTNWMSICMYSCLRETVGEPFFLLLCAIKQQINKGSIDAITGKARYTLNEEWLLRENIEAKPRNLNVSFQGCGMDSLSVRAMDTDTLTQVKEKILEAFCKNVPYSQWPRAEDVDLEWFASSTQSYILRDLDDTSVVEDGRKKLNTLAHYKIPEGASLAMSLIDKKDNTLGRVKDLDTEKYFHLVLPTDELAEPKKSHRQSHRKKVLPEIYLTRLLSTKGTLQKFLDDLFKAILSIREDKPPLAVKYFFDFLEEQAEKRGISDPDTLHIWKTNSLPLRFWVNILKNPQFVFDIDKTDHIDACLSVIAQAFIDACSISDLQLGKDSPTNKLLYAKEIPEYRKIVQRYYKQIQDMTPLSEQEMNAHLAEESRKYQNEFNTNVAMAEIYKYAKRYRPQIMAALEANPTARRTQLQHKFEQVVALMEDNIYECYSEA

SEQ ID NO: 45 - DNA, 1810 bp, Homo sapien
cccctgcccgcccgacagcgccgccgcctgccccgccatgggtcgacagaaggagctggtgtcccgctgcggggagatgctccacatccgctaccggctgctccgacaggcgctggccgagtgcctggggaccctcatcctggtgatgtttggctgtggctccgtggcccaggttgtgctcagccggggcacccacggtggtttcctcaccatcaacctggcctttggctttgctgtcactctgggcatcctcatcgctggccaggtctctggggcccacctgaaccctgccgtgacctttgccatgtgcttcctggctcgtgagccctggatcaagctgcccatctacaccctggcacagacgctgggagccttcttgggtgctggaatagtttttgggctgtattatgatgcaatctggcacttcgccgacaaccagctttttgtttcgggccccaatggcacagccggcatctttgctacctacccctctggacacttggatatgatcaatggcttctttgaccagttcataggcacagcctcccttatcgtgtgtgtgctggccattgttgacccctacaacaaccccgtcccccgaggcctggaggccttcaccgtgggcctggtggtcctggtcattggcacctccatgggcttcaactccggctatgccgtcaaccctgcccgggactttggcccccgcctttttacagcccttgcgggctggggctctgcagtcttcacgaccggccagcattggtggtgggtgcccatcgtgtccccactcctgggctccattgcgggtgtcttcgtgtaccagctgatgatcggctgccacctggagcagcccccaccctccaacgaggaagagaatgtgaagctggcccatgtgaagcacaaggagcagatctgagtgggcaggggccatctccccactccgctgccctggccttgagcatccactgactgtccaagggccactcccaagaagcccccttcacgatccaccctttcaggctaaggagctccctatctaccctcaccccacgagacagccccttcaggatttccactggaccttgcccaaatagcaccttaggccactgcccctaagctggggtggaaccggaatttgggtcaatacatccttttgtctcccaagggaagagaatgggcagcaggtatgtgtgtgtgtgcatgtgtgtgcatgtgtgtgcatgtgtgtgcaggggtgtgtgtgtgtggggggggttcccagatattcagggcaagggaccagtcggaagggattctggctattgggggagcccagagacaggggaaggcagcctgtccatctgtgcataaggagaggaaagttccagggtgtgtatgtttcaggggcttcacatggaggagctgcagatagatatgtgtttctgtgtatgtgtatgtctgcctttttttctaagtgggggcttctacaggcttttgggaagtagggtggatgtgggtagggctgggaggagggggccacagcttaggtttggagctctggatgtacatacataagtaggagcagtgggacgtgtttctgtcataatgcaggcatgaagggtggagtgaagtcaggtcataagtttcatgtttgcttttgttttgttttgtttttaatgtatgtagcagatgttacagtcttagggatccgggatgggagaccccactttagaaagggtcgtcactcctttaatcctctactcaacaatgtactcttttacttttatattaaaaaaaataaaataaatatgtgcctaaaaaaaaaaaaaaa

SEQ ID NO: 46 - protein, 292 aa, Homo sapien
MGRQKELVSRCGEMLHIRYRLLRQALAECLGTLILVMFGCGSVAQVVLSRGTHGGFLTINLAFGFAVTLGILIAGQVSGAHLNPAVTFAMCFLAREPWIKLPIYTLAQTLGAFLGAGIVFGLYYDAIWHFADNQLFVSGPNGTAGIFATYPSGHLDMINGFFDQFIGTASLIVCVLAIVDPYNNPVPRGLEAFTVGLVVLVIGTSMGFNSGYAVNPARDFGPRLFTALAGWGSAVFTTGQHWWWVPIVSPLLGSIAGVFVYQLMIGCHLEQPPPSNEEENVKLAHVKHKEQI

SEQ ID NO: 47 - DNA, 1497 bp, Homo sapien
accaacctcttcgaggcacaaggcacaacaggctgctctgggattctcttcagccaatcttcattgctcaagtgtctgaagcagccatggcagaagtacctgagctcgccagtgaaatgatggcttattacagtggcaatgaggatgacttgttctttgaagctgatggccctaaacagatgaagtgctccttccaggacctggacctctgccctctggatggcggcatccagctacgaatctccgaccaccactacagcaagggcttcaggcaggccgcgtcagttgttgtggccatggacaagctgaggaagatgctggttccctgcccacagaccttccaggagaatgacctgagcaccttctttcccttcatctttgaagaagaacctatcttcttcgacacatgggataacgaggcttatgtgcacgatgcacctgtacgatcactgaactgcacgctccgggactcacagcaaaaaagcttggtgatgtctggtccatatgaactgaaagctctccacctccagggacaggatatggagcaacaagtggtgttctccatgtcctttgtacaaggagaagaaagtaatgacaaaatacctgtggccttgggcctcaaggaaaagaatctgtacctgtcctgcgtgttgaaagatgataagcccactctacagctggagagtgtagatcccaaaaattacccaaagaagaagatggaaaagcgatttgtcttcaacaagatagaaatcaataacaagctggaatttgagtctgcccagttccccaactggtacatcagcacctctcaagcagaaaacatgcccgtcttcctgggagggaccaaaggcggccaggatataactgacttcaccatgcaatttgtgtcttcctaaagagagctgtacccagagagtcctgtgctgaatgtggactcaatccctagggctggcagaaagggaacagaaaggtttttgagtacggctatagcctggactttcctgttgtctacaccaatgcccaactgcctgccttagggtagtgctaagaggatctcctgtccatcagccaggacagtcagctctctcctttcagggccaatccccagcccttttgttgagccaggcctctctcacctctcctactcacttaaagcccgcctgacagaaaccacggccacatttggttctaagaaaccctctgtcattcgctcccacattctgatgagcaaccgcttccctatttatttatttatttgtttgtttgttttattcattggtctaatttattcaaagggggcaagaagtagcagtgtctgtaaaagagcctagtttttaatagctatggaatcaattcaatttggactggtgtgctctctttaaatcaagtcctttaattaagactgaaaatatataagctcagattatttaaatgggaatatttataaatgagcaaatatcatactgttcaatggttctgaaataaacttctctgaag

SEQ ID NO: 48 - protein, 269 aa, Homo sapien
MAEVPELASEMMAYYSGNEDDLFFEADGPKQMKCSFQDLDLCPLDGGIQLRISDHHYSKGFRQAASVVVAMDKLRKMLVPCPQTFQENDLSTFFPFIFEEEPIFFDTWDNEAYVHDAPVRSLNCTLRDSQQKSLVMSGPYELKALHLQGQDMEQQVVFSMSFVQGEESNDKIPVALGLKEKNLYLSCVLKDDKPTLQLESVDPKNYPKKKMEKRFVFNKIEINNKLEFESAQFPNWYISTSQAENMPVFLGGTKGGQDITDFTMQFVSS

SEQ ID NO: 49 - DNA, 3929 bp, Homo sapien
ccctttttcctcccgttttgaagagacaatgctacttcagtttggagcacaaacatatgatcagcacatggaaatgtggtaattcggatgcattcgtgattgcaacagattgaagaaattagaccagacaaagagtgtttttagaggagagaggaggaggaggaggctgagagagggagggcgacgggggtgagaaaggggaggccgcctctgagcgggacgccgggactcccgccgctgctaaatatatccgtagaatggagagggaccggatctcagccttgaaaagatcttttgaggtcgaggaggtcgagacacccaactccaccccaccccggagggtccagactcccctactccgagccactgtggccagctccacccagaaattccaggacctgggcgtgaagaactcagaaccctcggcccgccatgtggactccctaagccaacgctcccccaaggcgtccctgcggagggtggagctctcgggccccaaggcggccgagccggtgtcccggcgcactgagctgtccattgacatctcgtccaagcaggtggagaacgccggggccatcggcccgtcccggttcgggctcaagagggccgaggtgttgggccacaagacgccagaaccggcccctcggaggacggagatcaccatcgtcaaaccccaggagtcagcccaccggaggatggagccccctgcctccaaggtccccgaggtgcccactgcccctgccaccgacgcagcccccaagagggtggagatccagatgcccaagcctgctgaggcgcccaccgcccccagcccagcccagaccttggagaattcagagcctgcccctgtgtctcagctgcagagcaggctggagcccaagccccagccccctgtggctgaggctacaccccggagccaggaggccactgaggcggctcccagctgcgttggcgacatggccgacacccccagagatgccgggctcaagcaggcgcctgcatcacggaacgagaaggccccggtggacttcggctacgtggggattgactccatcctggagcagatgcgccggaaggccatgaagcagggcttcgagttcaacatcatggtggtcgggcagagcggcttgggtaaatccaccttaatcaacaccctcttcaaatccaaaatcagccggaagtcggtgcagcccacctcagaggagcgcatccccaagaccatcgagatcaagtccatcacgcacgatattgaggagaaaggcgtccggatgaagctgacagtgattgacacaccagggttcggggaccacatcaacaacgagaactgctggcagcccatcatgaagttcatcaatgaccagtacgagaaatacctgcaggaggaggtcaacatcaaccgcaagaagcgcatcccggacacccgcgtccactgctgcctctacttcatccccgccaccggccactccctcaggcccctggacatcgagtttatgaaacgcctgagcaaggtggtcaacatcgtccctgtcatcgccaaggcggacacactcaccctggaggagagggtccacttcaaacagcggatcaccgcagacctgctgtccaacggcatcgacgtgtacccccagaaggaatttgatgaggactcggaggaccggctggtgaacgagaagttccgggagatgatcccatttgctgtggtgggcagtgaccacgagtaccaggtcaacggcaagaggatccttgggaggaagaccaagtggggtaccatcgaagttgaaaacaccacacactgtgagtttgcctacctgcgggaccttctcatcaggacgcacatgcagaacatcaaggacatcaccagcagcatccacttcgaggcgtaccgtgtgaagcgcctcaacgagggcagcagcgccatggccaacggcgtggaggagaaggagccagaagccccggagatgtagacgccccctgcccacccccgggatcctgcccccaagtcatttccgtcccccccccaggccctcccaccaccccattttattttatatgattttctccatttgtcatcgttccccaccccttcgacatgctgccaggaaacaagggaaggggcctccctccgagtgagtcagtgatgaggccgcggcctccccgaggttgtggggaggctgcactggagccacaggcaggggtgagagcacccactgaattgacatgaccctctgtccccaggcctggctccccgagggctcagaagagcagcttcggtgtgcagatcatccgtcgtgtggggttctcagtgccggagcttggggtgggggccaggcctcgcacttgcagaggagcccagtgggctgcacgctcccctccatccccatcggccctgtcccctggagtgtgtcagagcccaggggagaatgcagcccaccaggagcacctggaccccctgcccgccacatggtgtggccatcactcagcccctacccctgccctgctcctaagggtagaaaactccagggtcccctgccaccgactgcccagccactccaagccccctggcagctgcccctcctggagcagaaagtgcctttatctcagccatccgcagactgctggccagatgcggggacaggctggaatgagggaggcgtcttcatctccctgccatccccctctcacgccacccccgcccccaccgggctgcaggtgctgctgatgcgctgggatctgattgaggataaaaaggaaggagagatgacccctaccccctcatcccccagttttgaaaaggtctaagcaagtgagtctggtggaggagctgagggagggagccatggaaggtgccagaaggaaggttggcgggggcacgtgtgggccgtggcttgggctggtcagagtggcgtgagctgcccggcgcctgccctgcccaagtgaccagggaagtgtgtgtgtgtccatgtgtatgcgtgtccgtctgtctgtctagtgtctgggtttggcccaagactgggctgtagttacattaatgcccagccagccacccctgccactcacccctcctggcccaggccttgctgactctctgagctggggaggtgggaggccaggcgagcctgactctgttgatctacccgtgcctgggcccctcccctcagagcccatggtaacgaacccctagaaaggagagaacgggcgtcaggggtgcacagtccacagctgaagagcaaggtttcgtggcagcacggcccggcccctcaccctctgtccccacgaggggacccatgggggctgtctttgcagggcacagatgaccaaagtcccttcctgcttcctgttacctgtcttgctcctggggagaaagaggggcctgatgagactccactcaggtgcacacatcaccaggtgcatctgcaggcaccgggctggctgcttgcagccaggagaaggtcagcgagaaggagtgtatgagtgtgagtgtgtgtgcatggaagttggggcactgggcgtctgactccctccccacccaagagaggaaggacccctcaccacccccactggcgagacagtttactttgccgacttgccatgtttttgccaaaaccaagattttgaaggaaatgagtggccagcgccagggcccaggccatgtggcctgcccagcctcaatgtcacttggcggcggggtggggtgggggtgggcagcagcatcccagccttgagatgcttcactttccttctctgtaaccagactttgaaaaattgttcgtttcatcaggctctgttcctcaatggccttttgctacgtgcctcccgagaaatttgtctttttgtataaatgacaaagtgttgaaaatgtatttcctgaaataaatgtttcaaatgcagaaacccaaaaaaaaaaaaaaaaaaaaaaaaaaaaaaaaaaa

SEQ ID NO: 50 - protein, 568 aa, Homo sapien
MERDRISALKRSFEVEEVETPNSTPPRRVQTPLLRATVASSTQKFQDLGVKNSEPSARHVDSLSQRSPKASLRRVELSGPKAAEPVSRRTELSIDISSKQVENAGAIGPSRFGLKRAEVLGHKTPEPAPRRTEITIVKPQESAHRRMEPPASKVPEVPTAPATDAAPKRVEIQMPKPAEAPTAPSPAQTLENSEPAPVSQLQSRLEPKPQPPVAEATPRSQEATEAAPSCVGDMADTPRDAGLKQAPASRNEKAPVDFGYVGIDSILEQMRRKAMKQGFEFNIMVVGQSGLGKSTLINTLFKSKISRKSVQPTSEERIPKTIEIKSITHDIEEKGVRMKLTVIDTPGFGDHINNENCWQPIMKFINDQYEKYLQEEVNINRKKRIPDTRVHCCLYFIPATGHSLRPLDIEFMKRLSKVVNIVPVIAKADTLTLEERVHFKQRITADLLSNGIDVYPQKEFDEDSEDRLVNEKFREMIPFAVVGSDHEYQVNGKRILGRKTKWGTIEVENTTHCEFAYLRDLLIRTHMQNIKDITSSIHFEAYRVKRLNEGSSAMANGVEEKEPEAPEM

SEQ ID NO: 51 - DNA, 1960 bp, Homo sapien
ggcacgaggggaagttgccggcggccgcgcggcctcccgggcgggcctacagccatgtcccgggacccggggtcgggcggctgggaggaggccccgcgcgcagctgccgcgctctgcaccctgtaccacgaggccggacagcggctgcgccgcctgcaggaccagctcgctgcccgcgacgccctcatcgctcgcctccgcgcccgcctggccgcgctggagggggacgccgcgccgtccctagtggacgcgctgctggagcaggttgcgcgcttccgggagcagctgcgaaggcaggagggcggcgccgccgaggcccagatgcgccaggaaattgagaggctgactgagcgactagaagaaaaagagagggagatgcagcagctgctgagccagccccaacacgagcgagagaaggaagtcgtcctgctacggaggagcatggcagaaggggagcgcgcccgggccgccagtgacgtcctgtgccgctccttggccaacgagacccatcagctgcggaggacgctgaccgccaccgcccacatgtgtcagcatctggccaagtgtctggatgaacgacagcatgcacaaaggaatgtgggggagagaagtcctgaccagtcggaacacacagatgggcacacctctgtccagagtgttattgagaagttgcaggaagaaaatcgactgttaaaacagaaggtgactcacgttgaagacctcaatgccaagtggcagcgctacaacgccagcagggacgaatacgtgagggggctccatgcgcagctcagggggctgcagatcccccacgagcccgagctgatgaggaaggagatctcccggctcaacagacagttggaagagaaaataaatgactgtgccgaagtgaagcaggagctggcggcctccaggacggcccgggatgctgcgttggagcgggtgcagatgctggaacagcagattctcgcttacaaggatgacttcatgtcagaaagggccgatcgggaacgggctcaaagtaggattcaagaactggaggaaaaggtcgcctctttgctgcaccaggtgtcctggagacaggattctcgagagccagacgccggccggattcacgctgggagcaaaactgccaagtatttggccgccgacgcattagagcttatggtgcctggtggctggaggcctgggactgggtcccagcagccagaaccccctgcagagggcgggcatcctggcgcggtccagagaggccagggggaccttcagtgccctcactgcctgcagtgcttcagtgacgagcaaggggaagagctcctcaggcatgtggccgagtgctgccagtgaccgagactcacccgtgcccttgcggcctcctggcccggtgcagctgccctcagggacagggtgggtgctctcagatgccatgggttgagctctactgagagccaaggcccctagaatagttgcggggcactctgatcgttcactttggtccctttggctatggaacaggctgggtcacagggaactgccagtgaggctggaggctggaggtggagatggggtcaggaacatctggcagagggaggtcccagtctgtgtctccatcaggcttaagccagagctatctggtgctggtgtgccagcccctcccccagcctgcctagaaaggggtggctgcctgagggagtcacttgtatggtccccagggtgggagccccatcctgttctatggaataaagcgtcgcctctctgcctcgaaccagtcaaatggagtattgcggctgcacgtcacactagggtggccacccccgccattgcgagccacatgtctgcactgagaaactgcatttcagtagcatttgtcatccagccggaagttaaagcacacttactttattcacctatttttataataaacgttcttgctgctgtgactgcaaaaaaaaaaaaaaaaaaa

SEQ ID NO: 52 - protein, 322 aa, Homo sapien
MQQLLSQPQHEREKEVVLLRRSMAEGERARAASDVLCRSLANETHQLRRTLTATAHMCQHLAKCLDERQHAQRNVGERSPDQSEHTDGHTSVQSVIEKLQEENRLLKQKVTHVEDLNAKWQRYNASRDEYVRGLHAQLRGLQIPHEPELMRKEISRLNRQLEEKINDCAEVKQELAASRTARDAALERVQMLEQQILAYKDDFMSERADRERAQSRIQELEEKVASLLHQVSWRQDSREPDAGRIHAGSKTAKYLAADALELMVPGGWRPGTGSQQPEPPAEGGHPGAVQRGQGDLQCPHCLQCFSDEQGEELLRHVAECCQ

SEQ ID NO: 53 - DNA, 1695 bp, Homo sapien
gttgccgctgcgcacctggctcaggtgagctgccccgcccccgcccggcgcgagccccaggtcctggcagcagcccctgacctgtccaggtgccctgtccagctgactgcaaggacagagaggagtcctgcccagctcttggatcagtctgctggccgaggagcccggtggagccaggggtgaccctggagcccagcctgccccgaggaggccccggctcagagccatgccaggtgtctgtgatagggcccctgacttcctctccccgtctgaagaccaggtgctgaggcctgccttgggcagctcagtggctctgaactgcacggcttgggtagtctctgggccccactgctccctgccttcagtccagtggctgaaagacgggcttccattgggaattgggggccactacagcctccacgagtactcctgggtcaaggccaacctgtcagaggtgcttgtgtccagtgtcctgggggtcaacgtgaccagcactgaagtctatggggccttcacctgctccatccagaacatcagcttctcctccttcactcttcagagagctggccctacaagccacgtggctgcggtgctggcctccctcctggtcctgctggccctgctgctggccgccctgctctatgtcaagtgccgtctcaacgtgctgctctggtaccaggacgcgtatggggaggtggagataaacgacgggaagctctacgacgcctacgtctcctacagcgactgccccgaggaccgcaagttcgtgaacttcatcctaaagccgcagctggagcggcgtcggggctacaagctcttcctggacgaccgcgacctcctgccgcgcgctgagccctccgccgacctcttggtgaacctgagccgctgccgacgcctcatcgtggtgctttcggacgccttcctgagccgggcctggtgcagccacagcttccgggagggcctgtgccggctgctggagctcacccgcagacccatcttcatcaccttcgagggccagaggcgcgaccccgcgcacccggcgctccgcctgctgcgccagcaccgccacctggtgaccttgctgctctggaggcccggctccgtgactccttcctccgatttttggaaagaagtgcagctggcgctgccgcggaaggtgcggtacaggccggtggaaggagacccccagacgcagctgcaggacgacaaggaccccatgctgattcttcgaggccgagtccctgagggccgggccctggactcagaggtggacccggaccctgagggcgacctgggtgtccgggggcctgtttttggagagccatcagctccaccgcacaccagtggggtctcgctgggagagagccggagcagcgaagtggacgtctcggatctcggctcgcgaaactacagtgcccgcacagacttctactgcctggtgtccaaggatgatatgtagctcccaccccagagtgcaggatcatagggacagcgggggccagggcagcggcgtcgctcctctgctcaacaggaccacaacccctgccagcagccctgggaccctgccagcagccctgggaaaaggctgtggcctcagggcgcctcccagtgccagaaaataaagtccttttggattctgaaaaaaaaaaaaaaaaaaaaaaaaaaaaaaaaaaaaaaaaaaaaaaaaaaaaaaaa

SEQ ID NO: 54 - protein, 410 aa, Homo sapien
MPGVCDRAPDFLSPSEDQVLRPALGSSVALNCTAWVVSGPHCSLPSVQWLKDGLPLGIGGHYSLHEYSWVKANLSEVLVSSVLGVNVTSTEVYGAFTCSIQNISFSSFTLQRAGPTSHVAAVLASLLVLLALLLAALLYVKCRLNVLLWYQDAYGEVEINDGKLYDAYVSYSDCPEDRKFVNFILKPQLERRRGYKLFLDDRDLLPRAEPSADLLVNLSRCRRLIVVLSDAFLSRAWCSHSFREGLCRLLELTRRPIFITFEGQRRDPAHPALRLLRQHRHLVTLLLWRPGSVTPSSDFWKEVQLALPRKVRYRPVEGDPQTQLQDDKDPMLILRGRVPEGRALDSEVDPDPEGDLGVRGPVFGEPSAPPHTSGVSLGESRSSEVDVSDLGSRNYSARTDFYCLVSKDDM

SEQ ID NO: 55 - DNA, 4674 bp, Homo sapien
ggttggctcttgcacttcctggctctctggacttggttatgtgattgagcctccatggcctccgtgtctttgtctgtcaatgggtttgattaaagcgttgacctcataggttcttaggaggattaatgagaacattttatgtaaagctgcttacatggagccttggtatgtgccggaaagctttagccctttattaaaagtgacagcagacccagcacggtggctcatgcctgtaatcccagcactttgggaggctgaggcgggcagatcacttggggtcaggagttcgagaccagctactcgggaggcagaggcaggagaatcgcttgaacctggggtgcagaggttgcagtaagctgagctcgcaccactgcactccagcctgagtgacagagtgaaactcagtctcaaaaaaaaaaaaaaaaaaagagtggcagtagtggtgggggagacccccatcccccttgctggggtttcctaggaaagaaggctggtgagagctgttgctggtggtgggccctgagccgcagggtctgagggcctaccctgtgctaccccagagctgcctgagaactggacagacacgcgggagacgctgctggaggggatgctgttcagcctcaagtacctgggcatgacgctagtggagcagcccaagggtgaggagctgtcggccgccgccatcaagaggatcgtggctacagctaaggccagtgggaagaagctgcagaaggtgactctgaaggtgtcgccacggggaattatcctgacagacaacctcaccaaccagctcattgagaacgtgtccatatacaggatctcctattgcacagcagacaagatgcacgacaaggtgtttgcatacatcgcccagagccagcacaaccagagcctcgagtgccacgccttcctctgcaccaagcggaagatggcacaggctgttaccctcaccgtagcccaggccttcaaagtcgcctttgagttttggcaggtgtccaaggaagagaaagagaagagggacaaagccagccaagagggaggggacgtcctgggggcccgccaagactgcaccccccccttgaagagcttggtcgccactgggaacctgctggacttagaggagacggctaaggccccgctgtccacggtcagcgccaacaccaccaacatggacgaggtgccgcggccacaagccttgagtggcagcagtgttgtctgggtgagtggttgtgtggccagcagatcggtgatcctcagcctgacctctgggtgagcctggggctgctccagggaccaggctctgggacccgtgacttgtgggcctctgggaggaccagacccagcccggtagtgcccaggcgcaggataggggatgaacaatgtcccttttgaacctgaggctgcatccccaacaggcttggctcccagcacagctgtctcctcacaatgcttggcctcttggcctgagcgtccacggctctgcccaccacaagaccagccaaaggcgcccttgttcttggtgtggcagagctcgctcctaccacccctccccctcagccgcctgaatgaggacccagagacttgggcagtcaccagcttggtccctgactccctcagggactcagggcaagccccctgacctctctgtctcagctttttcatctcagtaagggtgatgacctctgccaacggaatctccccgaggaacctgaaatttaattttaatttttcatttggaaataatttcagactgtgttacaaaattagtacagagaattcctgttcacccgtcatccagattccccaattgttaacatcttgcatgaccacattacactggtcagaatcaggaaacaaacacgatactgtgctgttatataatctatagaacttacacatttctccaggtgccccttcagtgtcctgtttctggcccaggatccattgcagaatcacatgttaacttgtcgtctctttaatttttaaaaatctgggtactgggggctcccctggtgtccctcgagcctgttctctgctgtttgggaaccacccttgccacttgcccatcctcaccagaacgccatggagggacctcacctgtcgcttttctgctgaggctgtgggactcctggcatcagttatccctcatgaacttggaattttggcttggcttttggaagtaaatgaaggcaagaaaactcccttccccaccctcttccttttggaatttgaaagccatagaagtcatcaggtccaatgccctcctcttattgaaggaaaagctgagtttcaacgtggagcagtgacttgcccaaggtctcacgggcaggtagcatggaccagggcactgaacccacctgggtctccagacaccctgggacatggcctttctcctctcccacgtctccagctttgggtccttgggctgagatgctggcgatgcacccaggcaggaggcctgcctgaggccgtgcctccaggcgcccaccctgagcttgtgtcctgagtccctgtagcttacccagggctgggacaagccccagctgtgagcatgggctcccccaaacatagttcttatctcctgctttgtttttcccaaggagctggatgatggcctggatgaagcgttttcgaggcttgcccagtctcggacaaaccctcaggtcctggacactggcctgacagcccaggacatgcattacgcccagtgcctctcgcctgtcgactgggacaagcctgacagcagcggcacagagcaggatgacctcttcagcttctgagggcccggggccagccggacacaagcggccctgacacgtgatggaccaaagccacctgctgcgggggagccagttctggggcccgcctgccacctctcccagccctcagcattgtcagcctgaagatcagagctgcagccagtcaggcaggggagagatttttcttttaagccctgctctttctctgagaaccaaaagatgccttgaatatttattcagtgacttctggcttatgctcagaagccagtctgcgtcaggcacgtctcctgctgcgtgacatgtgcagtgctgtaatcggctcccgcttgctctcctggagcaagctctgccctggctgtgggtatcaggactgtgaccaaagcatttctagtcccttctctctttctaaggacccaaatttccctgggggcatcctgcttcctgaaagctgttggatttcagtgatttttccccccaccccccagcacaggagagcacccacagccgcagaaggggaatgtgtcctcctgctctgcttcctcagggcccagcaggcgggggtttgagccctggaccccaggctcttagagactaaggggcagctcctgaccaaagacgatacagcttggcactttaaagcattaacagcaggtgtgaccctgagggctcctccatggtgctgcattgagtccagctttccttctgcccttcctccaggagaaggggcccaaggtccccgtggatggtctccacctgtgcttggaaccagtgtaactggctgctccctgctcccagggactgacacggggatcatctctgtgaccgccctccgtcgggcccctgcctgccttctcccctccacgcaaggctgtgctcttcctctggtttctgtgtgtccgtttgagtgtctgcgccccgcctccccatacttcctgggatgatgtgtgaaacctgacacctagatttatttggaaatattctatgaccactttacagatgaggaaactgaggcctcaagcgtggaggggtagagtgaagagtagaacccaggtctgatgccaaagctgctttcttctctgcctcctcctcacgcaactcacacctccttttcttctagctttgttgtcctcccaggaaccaaaaaaccccagctattttctgaccaaaatgtgtttcataacaaaccatctggtgcctttccacacagaactggcaggagcctcgtgtcctgctagctgtctctcttgttgatttccgtgaaaatgcaagtgtttgaagtctgctcattccgagggtgaaacaaaatccaaccctgtcagaatcatgctgttctctttgctgacactgtgaccctgggtcgggacagaccagcagcaatctgtctttagaatcgctttccttcctccccttttgcccccgtggggctcccggcatcctgaaagccagcaaagcctccagcatcttttccatcctgaggtgcctcccagtggcctggcttgtcggagcaagtttcatcagccctagggaaaacacggccctcctgggaacctccttacctggagtaaccggacaccttagacggaggtgcctgagggtggggtgggatttgcagggtcattatcagaacatgaggataacttccttgcccctgctctgtagccacctccttggcaccggcctctatttgtcataaggcggcgtgggcgaggcctgacacaggccagccttggcacgaggggggccaggggttctgagaagcgctgccctgtgagagccacgctggccttcgtctccatctctggttgacgggctgtccgtttgcctcctgtgtgtctgcagacaagtcttgctgtgctttatttgtgaaactttaatgaggaaaaaacaaataataaatgttctcgttttgaaactc

SEQ ID NO: 56 - protein, 221 aa, Homo sapien
MLFSLKYLGMTLVEQPKGEELSAAAIKRIVATAKASGKKLQKVTLKVSPRGIILTDNLTNQLIENVSIYRISYCTADKMHDKVFAYIAQSQHNQSLECHAFLCTKRKMAQAVTLTVAQAFKVAFEFWQVSKEEKEKRDKASQEGGDVLGARQDCTPPLKSLVATGNLLDLEETAKAPLSTVSANTTNMDEVPRPQALSGSSVVWVSGCVASRSVILSLTSG

SEQ ID NO: 57 - DNA, 1881 bp, Homo sapien
ggcacgagggttagattagtctgaagccgccaccagccccaggcccccgtgcagaagaaaagcgggagggaacggcggaggccgccgctgccctgcaccgccctcctggaggccacttggagagtccggccccgaggaggccatggccacaagtgcccacagctggccccaggttgccagcgtcgctacagcccagaccaaggcagaataatctccggatgagctggtggcaccgctgagcctttggtctcaccagggcttcctgttgctggcaggcggggtggagcggagctgctgggaggctgctggataggagaggggtcacggctgcggaagaggaggttcttcgggacacccgtggatggacacggcaaggaaacaccaggccaaccacagctggggataaaatagcacaaccacaccctgccgtccagcgcctcccagcctgtgccccttcctagtaccaccagcaaccatcaatcccgtctcctcctgcctcctctcctgcaatccaccccgccacgactatcgccatggcagccctgatcgcagagaacttccgcttcctgtcacttttcttcaagagcaaggatgtgatgattttcaacggcctggtggcactgggcacggtgggcagccaggagctgttctctgtggtggccttccactgcccctgctcgccggcccggaactacctgtacgggctggcggccatcggcgtgcccgccctggtgctcttcatcattggcatcatcctcaacaaccacacctggaacctcgtggccgagtgccagcaccggaggaccaagaactgctccgccgcccccaccttcctccttctaagctccatcctgggacgtgcggctgtggcccctgtcacctggtctgtcatctccctgctgcgtggtgaggcttatgtctgtgctctcagtgagttcgtggacccttcctcactcacggccagggaagagcacttcccatcagcccacgccactgaaatcctggccaggttcccctgcaaggagaaccctgacaacctgtcagacttccgggaggaggtcagccgcaggctcaggtatgagtcccagctctttggatggctgctcatcggcgtggtggccatcctggtgttcctgaccaagtgcctcaagcattactgctcaccactcagctaccgccaggaggcctactgggcgcagtaccgcgccaatgaggaccagctgttccagcgcacggccgaggtgcactctcgggtgctcgctgccaacaatgtgcgccgcttctttggctttgtggcgctcaacaaggatgatgaggaactgattgccaacttcccagtggaaggcacgcagccacggccacagtggaatgccatcaccggcgtctacttgtaccgtgagaaccagggcctcccactctacagccgcctgcacaagtgggcccagggtctggcaggcaacggcgcggcccctgacaacgtggagatggccctgctcccctcctaaggaggtgcttcccatgctctttgtaaatggcactacttggtcccaaactgaaccccactgcttgctcacatccatatcagaaggggatttttaaaaaactgttatcttcttggccaggggaaaggaccacaaggcaatctggggtgtggacagacccagtagacaatggaagcccagccagcagggccaggtgacagtgaagctcaccagtgggctcctttatggtactctatgcagttaacatgtatctagctgcatagggacacccagcgcagcagtgcaccactgggaagtggcctccagtgcagcctctggccttattttatatatttaaatttttgataaagtttttcttactaaaaaaaaaaaaaaaaaa

SEQ ID NO: 58 - protein, 323 aa, Homo sapien
MAALIAENFRFLSLFFKSKDVMIFNGLVALGTVGSQELFSVVAFHCPCSPARNYLYGLAAIGVPALVLFIIGIILNNHTWNLVAECQHRRTKNCSAAPTFLLLSSILGRAAVAPVTWSVISLLRGEAYVCALSEFVDPSSLTAREEHFPSAHATEILARFPCKENPDNLSDFREEVSRRLRYESQLFGWLLIGVVAILVFLTKCLKHYCSPLSYRQEAYWAQYRANEDQLFQRTAEVHSRVLAANNVRRFFGFVALNKDDEELIANFPVEGTQPRPQWNAITGVYLYRENQGLPLYSRLHKWAQGLAGNGAAPDNVEMALLPS

SEQ ID NO: 59 - DNA, 3352 bp, Homo sapien
acgagggacgcagccatggcggaggcggctttggaagccgtgcggagcgagttacgagaattcccggccgctgcaagggagctctgcgtgcctcttgctgtgccctacctggacaaacccccaactccgctccacttctaccgggactgggtctgccccaacaggccgtgcattatccgcaacgctctgcagcactggccggccctccagaagtggtccctcccctatttcagagccacagtgggctccacagaggtgagtgtggccgtgaccccagatggttacgcggatgccgtgagaggggatcgcttcatgatgccagctgagcgccgcctgcccctgagcttcgtgctggatgtgctggagggccgggcccagcaccctggagtcctctatgtgcagaagcagtgctccaacctgcccagcgagctgccccagctgctgcctgatctggaatcccatgtgccctgggcctccgaagccctgggaaagatgcccgatgctgtgaacttctggctgggggaggcggctgcagtgacttctttgcacaaggaccactatgagaacctctactgcgtggtctcaggagagaagcatttcctgttccatccgcccagcgaccggcccttcatcccctatgagctgtacacgccggcaacctaccagctaactgaagagggcacctttaaggtggtggatgaagaggccatggagaaggcagaggtgtccaggacctgcctgctcacggttcgtgtcctgcaggcccatcgcctaccctctaaggacctagtgaccccctctgactgctacgtgactctctggctgcccacggcctgcagccacaggctccagacacgcacggtcaagaacagcagtagccctgtctggaaccagagctttcacttcaggatccacaggcagctcaagaatgtcatggaactgaaagtctttgaccaggacctggtgaccggagatgaccctgtgttgtcagtactgtttgatgcggggactctgcgggctggggagttccggcgcgagagcttctcactgagccctcagggtgaggggcgcctggaagttgaatttcgcctgcagagtctggctgaccgtggcgagtggctcgtcagcaatggcgttctggtggcccgggagctctcctgcttgcacgttcaactggaggagacaggagaccagaagtcctcagagcacagagttcagcttgtggttcctgggtcctgtgagggtccgcaggaggcctctgtgggcactggcaccttccgcttccactgcccagcctgctgggagcaggagctgagtattcgcctgcaggatgcccccgaggagcaactaaaggcgccactgagtgccctgccctctggtcaagtggtgaggcttgtcttccccacgtcccaggagcccctgatgagagtggagctgaaaaaagaagcaggactgagggagctggccgtgcgactgggcttcgggccctgtgcagaggagcaggccttcctgagcaggaggaagcaggtggtggccgcggccttgaggcaggccctgcagctggatggagacctgcaggaggatgagatcccagtggtagctattatggccactggtggtgggatccgggcaatgacttccctgtatgggcagctggctggcctgaaggagctgggcctcttggattgcgtctcctacatcaccggggcctcgggctccacctgggccttggccaacctttatgaggacccagagtggtctcagaaggacctggcagggcccactgagttgctgaagacccaggtgaccaagaacaagctgggtgtgctggcccccagccagctgcagcggtaccggcaggagctggccgagcgtgcccgcttgggctacccaagctgcttcaccaacctgtgggccctcatcaacgaggcgctgctgcatgatgagccccatgatcacaagctctcagatcaacgggaggccctgagtcatggccagaaccctctgcccatctactgtgccctcaacaccaaagggcagagcctgaccacttttgaatttggggagtggtgcgagttctctccctacgaggtcggcttccccaagtacggggccttcatcccctctgagctctttggctccgagttctttatggggcagctgatgaagaggcttcctgagtcccgcatctgcttcttagaaggtatctggagcaacctgtatgcagccaacctccaggacagcttatactgggcctcagagcccagccagttctgggaccgctgggtcaggaaccaggccaacctggacaaggagcaggtcccccttctgaagatagaagaaccaccctcaacagccggcagratagctgagtttttcaccgatcttctgacgtggcgtccactggcccaggccacacataatttcctgcgtggcctccatttccacaaagactactttcagcatcctcacttctccacatggaaagctaccactctggatgggctccccaaccagctgacaccctcggagccccacctgtgcctgctggatgttggctacctcatcaataccagctgcctgcccctcctgcagcccactcgggacgtggacctcatcctgtcattggactacaacctccacggagccttccagcagttgcagctcctgggccggttctgccaggagcaggggatcccgttcccacccatctcgcccagccccgaagagcagctccagcctcgggagtgccacaccttctccgaccccacctgccccggagcccctgcggtgctgcactttcctctggtcagcgactccttccgggagtactcggcccctggggtccggcggacacccgaggaggcggcagctggggaggtgaacctgtcttcatcggactctccctaccactacacgaaggtgacctacagccaggaggacgtggacaagctgctgcacctgacacattacaatgtctgcaacaaccaggagcagctgctggaggctctgcgccaggcagtgcagcggaggcggcagcgcaggccccactgatggccggggcccctgccacccctaactctcattcattccctggctgctgagttgcaggtgggaactgtcatcacgcagtgcttcagagcctcgggctcaggtggcackgtcccagggtccaggctgagggctgggagctcccttgcgcctcagcagtttgcagtggggtaaggaggccaagcccatttgtgtaatcacccaaaaccccccggcctgtgcctgttttcccttctgcgctaccttgagtagttggagcacttgatacatcacagactcatacaaaaaaaaaaaaaaaaaa

SEQ ID NO: 60 - protein, 1012 aa, Homo sapien
MAEAALEAVRSELREFPAAARELCVPLAVPYLDKPPTPLHFYRDWVCPNRPCIIRNALQHWPALQKWSLPYFRATVGSTEVSVAVTPDGYADAVRGDRFMMPAERRLPLSFVLDVLEGRAQHPGVLYVQKQCSNLPSELPQLLPDLESHVPWASEALGKMPDAVNFWLGEAAAVTSLHKDHYENLYCVVSGEKHFLFHPPSDRPFIPYELYTPATYQLTEEGTFKVVDEEAMEKAEVSRTCLLTVRVLQAHRLPSKDLVTPSDCYVTLWLPTACSHRLQTRTVKNSSSPVWNQSFHFRIHRQLKNVMELKVFDQDLVTGDDPVLSVLFDAGTLRAGEFRRESFSLSPQGEGRLEVEFRLQSLADRGEWLVSNGVLVARELSCLHVQLEETGDQKSSEHRVQLVVPGSCEGPQEASVGTGTFRFHCPACWEQELSIRLQDAPEEQLKAPLSALPSGQVVRLVFPTSQEPLMRVELKKEAGLRELAVRLGFGPCAEEQAFLSRRKQVVAAALRQALQLDGDLQEDEIPVVAIMATGGGIRAMTSLYGQLAGLKELGLLDCVSYITGASGSTWALANLYEDPEWSQKDLAGPTELLKTQVTKNKLGVLAPSQLQRYRQELAERARLGYPSCFTNLWALINEALLHDEPHDHKLSDQREALSHGQNPLPIYCALNTKGQSLTTFEFGEWCEFSPYEVGFPKYGAFIPSELFGSEFFMGQLMKRLPESRICFLEGIWSNLYAANLQDSLYWASEPSQFWDRWVRNQANLDKEQVPLLKIEEPPSTAGRIAEFFTDLLTWRPLAQATHNFLRGLHFHKDYFQHPHFSTWKATTLDGLPNQLTPSEPHLCLLDVGYLINTSCLPLLQPTRDVDLILSLDYNLHGAFQQLQLLGRFCQEQGIPFPPISPSPEEQLQPRECHTFSDPTCPGAPAVLHFPLVSDSFREYSAPGVRRTPEEAAAGEVNLSSSDSPYHYTKVTYSQEDVDKLLHLTHYNVCNNQEQLLEALRQAVQRRRQRRPH

SEQ ID NO: 61 - DNA, 2518 bp, Homo sapien
cttcgggtgtacgtgctccgggatcttcagcacccgcggccgccatcgccgtcgcttggcttcttctggactcatctgcgccacttgtccgcttcacactccgccgccatcatggtgaagctcgcgaaggcaggtaaaaatcaaggtgaccccaagaaaatggctcctcctccaaaggaggtagaagaagatagtgaagatgaggaaatgtcagaagatgaagaagatgatagcagtggagaagaggtcgtcatacctcagaagaaaggcaagaaggctgctgcaacctcagcaaagaaggtggtcgtttccccaacaaaaaaggttgcagttgccacaccagccaagaaagcagctgtcactccaggcaaaaaggcagcagcaacacctgccaagaagacagttacaccagccaaagcagttaccacacctggcaagaagggagccacaccaggcaaagcattggtagcaactcctggtaagaagggtgctgccatcccagccaagggggcaaagaatggcaagaatgccaagaaggaagacagtgatgaagaggaggatgatgacagtgaggaggatgaggaggatgacgaggacgaggatgaggatgaagatgaaattgaaccagcagcgatgaaagcagcagctgctgcccctgcctcagaggatgaggacgatgaggatgacgaagatgatgaggatgacgatgacgatgaggaagatgactctgaagaagaagctatggagactacaccagccaaaggaaagaaagctgcaaaagttgttcctgtgaaagccaagaacgtggctgaggatgaagatgaagaagaggatgatgaggacgaggatgacgacgacgacgaagatgatgaagatgatgatgatgaagatgatgaggaggaggaagaagaggaggaggaagagcctgtcaaagaagcacctggaaaacgaaagaaggaaatggccaaacagaaagcagctcctgaagccaagaaacagaaagtggaaggcacagaaccgactacggctttcaatctctttgttggaaacctaaactttaacaaatctgctcctgaattaaaaactggtatcagcgatgtttttgctaaaaatgatcttgctgttgtggatgtcagaattggtatgactaggaaatttggttatgtggattttgaatctgctgaagacctggagaaagcgttggaactcactggtttgaaagtctttggcaatgaaattaaactagagaaaccaaaaggaaaagacagtaagaaagagcgagatgcgagaacacttttggctaaaaatctcccttacaaagtcactcaggatgaattgaaagaagtgtttgaagatgctgcggagatcagattagtcagcaaggatgggaaaagtaaagggattgcttatattgaatttaagacagaagctgatgcagagaaaacctttgaagaaaagcagggaacagagatcgatgggcgatctatttccctgtactatactggagagaaaggtcaaaatcaagactatagaggtggaaagaatagcacttggagtggtgaatcaaaaactctggttttaagcaacctctcctacagtgcaacagaagaaactcttcaggaagtatttgagaaagcaacttttatcaaagtaccccagaaccaaaatggcaaatctaaagggtatgcatttatagagtttgcttcattcgaagacgctaaagaagctttaaattcctgtaataaaagggaaattgagggcagagcaatcaggctggagttgcaaggacccaggggatcacctaatgccagaagccagccatccaaaactctgtttgtcaaaggcctgtctgaggataccactgaagagacattaaaggagtcatttgacggctccgttcgggcaaggatagttactgaccgggaaactgggtcctccaaagggtttggttttgtagacttcaacagtgaggaggatgccaaggaggccatggaagacggtgaaattgatggaaataaagttaccttggactgggccaaacctaagggtgaaggtggcttcgggggtcgtggtggaggcagaggcggctttggaggacgaggtggtggtagaggaggccgaggaggatttggtggcagaggccggggaggctttggagggcgaggaggcttccgaggaggcagaggaggaggaggtgaccacaagccacaaggaaagaagacgaagtttgaatagcttctgtccctctgctttcccttttccatttgaaagaaaggactctggggtttttactgttacctgatcaatgacagagccttctgaggacattccaagacagtatacagtcctgtggtctccttggaaatccgtctagttaacatttcaagggcaataccgtgttggttttgactggatattcatataaactttttaaagagttgagtgatagagctaacccttatctgtaagttttgaatttatattgtttcatcccatgtacaaaaccattttttcctac

SEQ ID NO: 62 - protein, 707 aa, Homo sapien
MVKLAKAGKNQGDPKKMAPPPKEVEEDSEDEEMSEDEEDDSSGEEVVIPQKKGKKAAATSAKKVVVSPTKKVAVATPAKKAAVTPGKKAAATPAKKTVTPAKAVTTPGKKGATPGKALVATPGKKGAAIPAKGAKNGKNAKKEDSDEEEDDDSEEDEEDDEDEDEDEDEIEPAAMKAAAAAPASEDEDDEDDEDDEDDDDDEEDDSEEEAMETTPAKGKKAAKVVPVKAKNVAEDEDEEEDDEDEDDDDDEDDEDDDDEDDEEEEEEEEEEPVKEAPGKRKKEMAKQKAAPEAKKQKVEGTEPTTAFNLFVGNLNFNKSAPELKTGISDVFAKNDLAVVDVRIGMTRKFGYVDFESAEDLEKALELTGLKVFGNEIKLEKPKGKDSKKERDARTLLAKNLPYKVTQDELKEVFEDAAEIRLVSKDGKSKGIAYIEFKTEADAEKTFEEKQGTEIDGRSISLYYTGEKGQNQDYRGGKNSTWSGESKTLVLSNLSYSATEETLQEVFEKATFIKVPQNQNGKSKGYAFIEFASFEDAKEALNSCNKREIEGRAIRLELQGPRGSPNARSQPSKTLFVKGLSEDTTEETLKESFDGSVRARIVTDRETGSSKGFGFVDFNSEEDAKEAMEDGEIDGNKVTLDWAKPKGEGGFGGRGGGRGGFGGRGGGRGGRGGFGGRGRGGFGGRGGFRGGRGGGGDHKPQGKKTKFE

SEQ ID NO: 63 - DNA, 2839 bp, Homo sapien
ctcccaaagcagaattgcagctgccgccgccgccacctccaggccactatggcgcctggggctgcccaggagcttcaggccaagttggcagagatcggagctccgatccagggtaatcgcgaggagctggtggagcggctgcagagctacacccgccagactggcatcgtgctgaatcggccggttttgagaggggaagatggggacaaagccgctccacctcccatgtcggcacagctccctggaattcccatgccaccaccacctttgggactcccccctctgcagcctcctccgccacccccaccacctccaccaggccttggccttggctttcctatggcccacccaccaaatttggggcccccgcctcctctccgtgtgggtgagccagtggcactgtcagaggaggagcggctgaagttggctcagcagcaggcggcattgctgatgcagcaggaggagcgtgccaagcagcagggagatcattcgctgaaggaacatgagctcttggagcagcagaagcgggcagctgtgttactggagcaggaacgacagcaggagattgccaagatgggcaccccagtccctcggcccccacaagacatgggccagattggtgtgcgcactcctctgggtcctcgagtagctgctccagtgggcccagtgggccccactcctacagttttgcccatgggagcccctgttccccggcctcgtggtcccccaccgccccctggagatgagaacagagagatggatgacccctctgtgggccccaagatcccccaggctttggagaagatcctgcagctgaaggagagccgccaggaagagatgaattctcagcaggaggaagaggaaatggaaacagatgctcgctcgtccctgggccagtcagcgtcagagactgaggaggacacagtgtccgtatctaaaaaggagaaaaaccggaagcgtaggaaccgaaagaagaagaaaaagccccagcgggtgcgaggggtgtcctctgagagctctggggaccgggagaaagactcaacccggtcccgtggctctgattccccagcagctgatgttgagattgagtatgtgactgaagaacctgaaatttacgagcccaactttatcttctttaagaggatctttgaggcttttaagctcactgatgatgtgaagaaggagaaagagaaagagccagagaaacttgacaaactggagaactctgcagcccccaagaagaagggatttgaagaggagcacaaggacagtgatgatgacagcagtgatgacgagcaggaaaagaagccagaagcccccaagctgtccaagaagaagttgcgccgaatgaaccgcttcactgtggctgaactcaagcagctggtggctcggcccgatgtcgtggagatgcacgatgtgacagcgcaggaccctaagctcttggttcacctcaaggccactcggaactctgtgcctgtgccacgccactggtgttttaagcgcaaatacctgcagggcaaacggggcattgagaagccccccttcgagctgccagacttcatcaaacgcacaggcatccaggagatgcgagaggccctgcaggagaaggaagaacagaagaccatgaagtcaaaaatgcgagagaaagttcggcctaagatgggcaaaattgacatcgactaccagaaactgcatgatgccttcttcaagtggcagaccaagccaaagctgaccatccatggggacctgtactatgaggggaaggagttcgagacacgactgaaggagaagaagccaggagatctgtctgatgagctaaggatttccttggggatgccagtaggaccaaatgcccacaaggtccctcccccatggctgattgccatgcagcgatatggaccacccccatcgtatcccaacctgaaaatccctgggctgaactcgcccatccctgagagctgttcctttgggtaccatgctggtggctggggcaaacctccagtggatgagactgggaaaccgctctatggggacgtgtttggaaccaatgctgctgaatttcagaccaagactgaggaagaagagattgatcggaccccttggggggaactggaaccatctgatgaagaatcctcagaagaagaggaagaggaagaaagtgatgaagacaaaccagatgagacaggctttattacccctgcagacagtggccttatcactcctggaggcttttcatcagtgcctgctggaatggagacccctgaactcattgagctgaggaagaagaagattgaggaggcgatggacggaagtgagacacctcagctcttcactgtgttgccagagaagagaacagccactgttggaggggccatgatgggatcaacccacatttatgacatgtccacggttatgagccggaagggcccggctcctgagctgcaaggtgtggaagtggcgctggcgcctgaagagttggagctggatcctatggccatgacccagaagtatgaggagcatgtgcgggagcagcaggctcaagtagagaaggaggacttcagtgacatggtggctgagcacgctgccaaacagaagcaaaaaaaacggaaagctcagccccaggacagccgtgggggcagcaagaaatataaggagttcaagttttaggtcccctcacactagccctttttttggccctacgtctggatgcctgggcttcacacaagaaccacctctcccgcagttcccaaggacttgtcatttcatgttcttattttagacctgttttgtaaataaagctgtttcccaaggaaagagatgaaaaaaaaaaaaaaaaaaa

SEQ ID NO: 64 - protein, 872 aa, Homo sapien
MAPGAAQELQAKLAEIGAPIQGNREELVERLQSYTRQTGIVLNRPVLRGEDGDKAAPPPMSAQLPGIPMPPPPLGLPPLQPPPPPPPPPPGLGLGFPMAHPPNLGPPPPLRVGEPVALSEEERLKLAQQQAALLMQQEERAKQQGDHSLKEHELLEQQKRAAVLLEQERQQEIAKMGTPVPRPPQDMGQIGVRTPLGPRVAAPVGPVGPTPTVLPMGAPVPRPRGPPPPPGDENREMDDPSVGPKIPQALEKILQLKESRQEEMNSQQEEEEMETDARSSLGQSASETEEDTVSVSKKEKNRKRRNRKKKKKPQRVRGVSSESSGDREKDSTRSRGSDSPAADVEIEYVTEEPEIYEPNFIFFKRIFEAFKLTDDVKKEKEKEPEKLDKLENSAAPKKKGFEEEHKDSDDDSSDDEQEKKPEAPKLSKKKLRRMNRFTVAELKQLVARPDVVEMHDVTAQDPKLLVHLKATRNSVPVPRHWCFKRKYLQGKRGIEKPPFELPDFIKRTGIQEMREALQEKEEQKTMKSKMREKVRPKMGKIDIDYQKLHDAFFKWQTKPKLTIHGDLYYEGKEFETRLKEKKPGDLSDELRISLGMPVGPNAHKVPPPWLIAMQRYGPPPSYPNLKIPGLNSPIPESCSFGYHAGGWGKPPVDETGKPLYGDVFGTNAAEFQTKTEEEEIDRTPWGELEPSDEESSEEEEEEESDEDKPDETGFITPADSGLITPGGFSSVPAGMETPELIELRKKKIEEAMDGSETPQLFTVLPEKRTATVGGAMMGSTHIYDMSTVMSRKGPAPELQGVEVALAPEELELDPMAMTQKYEEHVREQQAQVEKEDFSDMVAEHAAKQKQKKRKAQPQDSRGGSKKYKEFKF

SEQ ID NO: 65 - DNA, 2693 bp, Homo sapien
cgaaaaaagaggggaagagtattaaagaccatttctggctgggcagggcactctcagcagctcaactgcccagcgtgaccagtggccacctctgcagtgtcttccacaacctggtcttgactcgtctgctgaacaaatcctctgacctcaggccggctgtgaacgtagttcctgagagatagcaaacatgcccaacagtgagcccgcatctctgctggagctgttcaacagcatcgccacacaaggggagctcgtaaggtccctcaaagcgggaaatgcgtcaaaggatgaaattgattctgcagtaaagatgttggtgtcattaaaaatgagctacaaagctgccgcgggggaggattacaaggctgactgtcctccagggaacccagcacctaccagtaatcatggcccagatgccacagaagctgaagaggattttgtggacccatggacagtacagacaagcagtgcaaaaggcatagactacgataagctcattgttcggtttggaagtagtaaaattgacaaagagctaataaaccgaatagagagagccaccggccaaagaccacaccacttcctgcgcagaggcatcttcttctcacacagagatatgaatcaggttcttgatgcctatgaaaataagaagccattttatctgtacacgggccggggcccctcttctgaagcaatgcatgtaggtcacctcattccatttattttcacaaagtggctccaggatgtatttaacgtgcccttggtcatccagatgacggatgacgagaagtatctgtggaaggacctgaccctggaccaggcctatggcgatgctgttgagaatgccaaggacatcatcgcctgtggctttgacatcaacaagactttcatattctctgacctggactacatggggatgagctcaggtttctacaaaaatgtggtgaagattcaaaagcatgttaccttcaaccaagtgaaaggcattttcggcttcactgacagcgactgcattgggaagatcagttttcctgccatccaggctgctccctccttcagcaactcattcccacagatcttccgagacaggacggatatccagtgccttatcccatgtgccattgaccaggatccttactttagaatgacaagggacgtcgcccccaggatcggctatcctaaaccagccctgttgcactccaccttcttcccagccctgcagggcgcccagaccaaaatgagtgccagcgacccaaactcctccatcttcctcaccgacacggccaagcagatcaaaaccaaggtcaataagcatgcgttttctggagggagagacaccatcgaggagcacaggcagtttgggggcaactgtgatgtggacgtgtctttcatgtacctgaccttcttcctcgaggacgacgacaagctcgagcagatcaggaaggattacaccagcggagccatgctcaccggtgagctcaagaaggcactcatagaggttctgcagcccttgatcgcagagcaccaggcccggcgcaaggaggtcacggatgagatagtgaaagagttcatgactccccggaagctgtccttcgactttcagtagcactcgttttacatatgcttataaaagaagtgatgtatcagtaatgtatcaataatcccagcccagtcaaagcaccgccacctgtaggcttctgtctcatggtaattactgggcctggcctctgtaagcctgtgtatgttatcaatactgtttcttcctgtgagttccattatttctatctcttatgggcaaagcattgtgggtaattggtgctggctaacattgcatggtcggatagagaagtccagctgtgagtctctccccaaagcagccccacagtggagccttcggctggaagtccatgggccaccctgttcttgtccatggaggacttccgagggttccaagtatactcttaagacccactctgtttaaaaatatatattctatgtatgcgtatatggaattgaaatgtcattattgtaacctagaaagtgctttgaaatattgatgtggggaggtttattgagcacaagatgtatttcagcccatgccccctcccaaaaagaaattgataagtaaaagcttcgttatacatttgactaagaaatcacccagctttaaagctgcttttaacaatgaagattgaacagagttcagcaattttgattaaattaagacttgggggtgaaactttccagtttactgaactccagaccatgcatgtagtccactccagaaatcatgctcgcttcccttggcacaccagtgttctcctgccaaatgaccctagaccctctgtcctgcagagtcagggtggcttttcccctgactgtgtccgatgccaaggagtcctggcctccgcagatgcttcattttgacccttggctgcagtggaagtcagcacagagcagtgccctggctgtgtcctggacgggtggacttagctagggagaaagtcgaggcagcagccctcgaggccctcacagatgtctaggcaggcctcatttcatcacgcagcatgtgcaggcctggaagagcaaagccaaatctcagggaagtccttggttgatgtatctgggtctcctctggagcactctgccctcctgtcacccagtagagtaaataaacttccttggctcctaaaaaa

SEQ ID NO: 66 - protein, 471 aa, Homo sapien
MPNSEPASLLELFNSIATQGELVRSLKAGNASKDEIDSAVKMLVSLKMSYKAAAGEDYKADCPPGNPAPTSNHGPDATEAEEDFVDPWTVQTSSAKGIDYDKLIVRFGSSKIDKELINRIERATGQRPHHFLRRGIFFSHRDMNQVLDAYENKKPFYLYTGRGPSSEAMHVGHLIPFIFTKWLQDVFNVPLVIQMTDDEKYLWKDLTLDQAYGDAVENAKDIIACGFDINKTFIFSDLDYMGMSSGFYKNVVKIQKHVTFNQVKGIFGFTDSDCIGKISFPAIQAAPSFSNSFPQIFRDRTDIQCLIPCAIDQDPYFRMTRDVAPRIGYPKPALLHSTFFPALQGAQTKMSASDPNSSIFLTDTAKQIKTKVNKHAFSGGRDTIEEHRQFGGNCDVDVSFMYLTFFLEDDDKLEQIRKDYTSGAMLTGELKKALIEVLQPLIAEHQARRKEVTDEIVKEFMTPRKLSFDFQ

SEQ ID NO: 67 - DNA, 3137 bp, Homo sapien
gcggagcgtgtgagcagtactgcggcctcctctcctctcctaacctcgctctcgcggcctacctttacccgcccgcctgctcggcgaccagcggggatcctcccccagccgcaagtccacgaagaaagcaacgaatgaaaattatgaagacaacgagaagtcagactcctccgggtcgcgctccagctgcttcggcttcgtcgcctactctgtgaactccggggagagatctcgagtcaagattaagaccttaacccaccaacctgcctgttcggacaccccccgggccggccgctgtctgtccccttctccatcgccctctcccagaaagctccggtgcttggaccagctagagtctgagaaagaggagaggcgcgaacgccactccaaaaagagaagggttaaagagggcaaccctaacgatacgcttgactttctgtggctgggaacaccttccaccatgaccacctcagcaagttcccacttaaataaaggcatcaagcaggtgtacatgtccctgcctcagggtgagaaagtccaggccatgtatatctggatcgatggtactggagaaggactgcgctgcaagacccggaccctggacagtgagcccaagtgtgtggaagagttgcctgagtggaatttcgatggctccagtactttacagtctgagggttccaacagtgacatgtatctcgtgcctgctgccatgtttcgggaccccttccgtaaggaccctaacaagctggtgttatgtgaagttttcaagtacaatcgaaggcctgcagagaccaatttgaggcacacctgtaaacggataatggacatggtgagcaaccagcacccctggtttggcatggagcaggagtataccctcatggggacagatgggcacccctttggttggccttccaacggcttcccagggccccagggtccatattactgtggtgtgggagcagacagagcctatggcagggacatcgtggaggcccattaccgggcctgcttgtatgctggagtcaagattgcggggactaatgccgaggtcatgcctgcccagtgggaatttcagattggaccttgtgaaggaatcagcatgggagatcatctctgggtggcccgtttcatcttgcatcgtgtgtgtgaagactttggagtgatagcaacctttgatcctaagcccattcctgggaactggaatggtgcaggctgccataccaacttcagcaccaaggccatgcgggaggagaatggtctgaagtacatcgaggaggccattgagaaactaagcaagcggcaccagtaccacatccgtgcctatgatcccaagggaggcctggacaatgcccgacgtctaactggattccatgaaacctccaacatcaacgacttttctgctggtgtagccaatcgtagcgccagcatacgcattccccggactgttggccaggagaagaagggttactttgaagatcgtcgcccctctgccaactgcgaccccttttcggtgacagaagccctcatccgcacgtgtcttctcaatgaaaccggcgatgagcccttccagtacaaaaattaagtggactagacctccagctgttgagcccctcctagttcttcatcccactccaactcttccccctctcccagttgtcccgattgtaactcaaagggtggaatatcaaggtcgtttttttcattccatgtgcccagttaatcttgctttctttgtttggctgggatagaggggtcaagttattaatttcttcacacctaccctcctttttttccctatcactgaagctttttagtgcattagtggggaggagggtggggagacataaccactgcttccatttaatggggtgcacctgtccaataggcgtagctatccggacagagcacgtttgcagaagggggactcttcttccaggtagctgaaaggggaagacctgacgtactctggttaggttaggacttgccctcgtggtggaaacttttcttaaaaagttataaccaacttttctattaaaagtgggaattaggagagaaggtaggggttgggaatcagagagaatggctttggtctcttgcttgtgggactagcctggcttgggactaaatgccctgctctgaacacgaagcttagtataaactgatggatatccctaccttgaaagaagaaaaggttcttactgcttggtccttgatttatcacacaaagcagaatagtatttttatatttaaatgtaaagacaaaaaactatatgtatggttttgtggattatgtgtgttttgctaaaggaaaaaaccatccaggtcacggggcaccaaatttgagacaaatagtcggattagaaataaagcatctcattttgagtagagagcaagggaagtggttcttagatggtgatctgggattaggccctcaagacccttttgggtttctgccctgcccaccctctggagaaggtgggcactggattagttaacagacgacacgttactagcagtcacttgatctccgtggctttggtttaaaagacacacttgtccacataggtttagagataagagttggctgttcaacttgagcatgttactgacagagggggtattggggttattttctggtaggaatagcatgtcactaaagcaggccttttgatattaaattttttaaaaagcaaaattatagaagtttagattttaatcaaatttgtagggtttctaggtaatttttacagaattgcttgtttgcttcaactgtctcctacctctgctcttggaggagatggggacagggctggagtcaaaacacttgtaattttgtatcttgatgtctttgttaagactgctgaagaattattttttttcttttataataaggaataaaccccacctttattccttcatttcatctaccattttctggttcttgtgttggctgtggcaggccagctgtggttttcttttgccatgacaacttctaattgccatgtacagtatgttcaaagtcaaataactcctcattgtaaacaaactgtgtaactgcccaaagcagcacttataaatcagcctaacataaaaaaaaaaaaaaaaaaaaaaaaaaaaaaaaaaaaaaaaaaaaaaaa

SEQ ID NO: 68 - protein, 373 aa, Homo sapien
MTTSASSHLNKGIKQVYMSLPQGEKVQAMYIWIDGTGEGLRCKTRTLDSEPKCVEELPEWNFDGSSTLQSEGSNSDMYLVPAAMFRDPFRKDPNKLVLCEVFKYNRRPAETNLRHTCKRIMDMVSNQHPWFGMEQEYTLMGTDGHPFGWPSNGFPGPQGPYYCGVGADRAYGRDIVEAHYRACLYAGVKIAGTNAEVMPAQWEFQIGPCEGISMGDHLWVARFILHRVCEDFGVIATFDPKPIPGNWNGAGCHTNFSTKAMREENGLKYIEEAIEKLSKRHQYHIRAYDPKGGLDNARRLTGFHETSNINDFSAGVANRSASIRIPRTVGQEKKGYFEDRRPSANCDPFSVTEALIRTCLLNETGDEPFQYKN

SEQ ID NO: 69 - DNA, 1661 bp, Homo sapien
tgctgcagccgctgccgccgattccggatctcattgccacgcgcccccgacgaccgcccgacgtgcattcccgattccttttggttccaagtccaatatggcaactctaaaggatcagctgatttataatcttctaaaggaagaacagaccccccagaataagattacagttgttggggttggtgctgttggcatggcctgtgccatcagtatcttaatgaaggacttggcagatgaacttgctcttgttgatgtcatcgaagacaaattgaagggagagatgatggatctccaacatggcagccttttccttagaacaccaaagattgtctctggcaaagactataatgtaactgcaaactccaagctggtcattatcacggctggggcacgtcagcaagagggagaaagccgtcttaatttggtccagcgtaacgtgaacatatttaaattcatcattcctaatgttgtaaaatacagcccgaactgcaagttgcttattgtttcaaatccagtggatatcttgacctacgtggcttggaagataagtggttttcccaaaaaccgtgttattggaagtggttgcaatctggattcagcccgattccgttacctgatgggggaaaggctgggagttcacccattaagctgtcatgggtgggtccttggggaacatggagattccagtgtgcctgtatggagtggaatgaatgttgctggtgtctctctgaagactctgcacccagatttagggactgataaagataaggaacagtggaaagaggttcacaagcaggtggttgagagtgcttatgaggtgatcaaactcaaaggctacacatcctgggctattggactctctgtagcagatttggcagagagtataatgaagaatcttaggcgggtgcacccagtttccaccatgattaagggtctttacggaataaaggatgatgtcttccttagtgttccttgcattttgggacagaatggaatctcagaccttgtgaaggtgactctgacttctgaggaagaggcccgtttgaagaagagtgcagatacactttgggggatccaaaaggagctgcaattttaaagtcttctgatgtcatatcatttcactgtctaggctacaacaggattctaggtggaggttgtgcatgttgtcctttttatctgatctgtgattaaagcagtaatattttaagatggactgggaaaaacatcaactcctgaagttagaaataagaatggtttgtaaaatccacagctatatcctgatgctggatggtattaatcttgtgtagtcttcaactggttagtgtgaaatagttctgccacctctgacgcaccactgccaatgctgtacgtactgcatttgccccttgagccaggtggatgtttaccgtgtgttatataacttcctggctccttcactgaacatgcctagtccaacattttttcccagtgagtcacatcctgggatccagtgtataaatccaatatcatgtcttgtgcataattcttccaaaggatcttattttgtgaactatatcagtagtgtacattaccatataatgtaaaaagatctacatacaaacaatgcaaccaactatccaagtgttataccaactaaaacccccaataaaccttgaacagtg

SEQ ID NO: 70 - protein, 332 aa, Homo sapien
MATLKDQLIYNLLKEEQTPQNKITVVGVGAVGMACAISILMKDLADELALVDVIEDKLKGEMMDLQHGSLFLRTPKIVSGKDYNVTANSKLVIITAGARQQEGESRLNLVQRNVNIFKFIIPNVVKYSPNCKLLIVSNPVDILTYVAWKISGFPKNRVIGSGCNLDSARFRYLMGERLGVHPLSCHGWVLGEHGDSSVPVWSGMNVAGVSLKTLHPDLGTDKDKEQWKEVHKQVVESAYEVIKLKGYTSWAIGLSVADLAESIMKNLRRVHPVSTMIKGLYGIKDDVFLSVPCILGQNGISDLVKVTLTSEEEARLKKSADTLWGIQKELQF

SEQ ID NO: 71 - DNA, 1225 bp, Homo sapien
ccgcagcgccggagtcaaacggttcccggcccagtcccgtcctgcagcagtctgcctcctctttcaacatgacagatgccgctgtgtccttcgccaaggacttcctggcaggtggagtggccgcagccatctccaagacggcggtagcgcccatcgagcgggtcaagctgctgctgcaggtgcagcatgccagcaagcagatcactgcagataagcaatacaaaggcattatagactgcgtggtccgtattcccaaggagcagggagttctgtccttctggcgcggtaacctggccaatgtcatcagatacttccccacccaggctcttaacttcgccttcaaagataaatacaagcagatcttcctgggtggtgtggacaagagaacccagttttggcgctactttgcagggaatctggcatcgggtggtgccgcaggggccacatccctgtgttttgtgtaccctcttgattttgcccgtacccgtctagcagctgatgtgggtaaagctggagctgaaagggaattccgaggcctcggtgactgcctggttaagatctacaaatctgatgggattaagggcctgtaccaaggctttaacgtgtctgtgcagggtattatcatctaccgagccgcctacttcggtatctatgacactgcaaagggaatgcttccggatcccaagaacactcacatcgtcatcagctggatgatcgcacagactgtcactgctgttgccgggttgacttcctatccatttgacaccgttcgccgccgcatgatgatgcagtcagggcgcaaaggaactgacatcatgtacacaggcacgcttgactgctggcggaagattgctcgtgatgaaggaggcaaagcttttttcaagggtgcatggtccaatgttctcagaggcatgggtggtgcttttgtgcttgtcttgtatgatgaaatcaagaagtacacataagttatttcctaggatttttccccctgtgaacaggcatgttgtattctataacacaatcttgagcattcttgacagactcctggctgtcagtttctcagtggcaactactttactggttgaaaatgggaagcaataatattcatctgaccagttttcctctaaagccatttccatgatgatgatgatgggactcaattgtattttttatttcagtcactcctgataaataacaaatttggagaaataaaaatatctaaaat

SEQ ID NO: 72 - protein, 298 aa, Homo sapien
MTDAAVSFAKDFLAGGVAAAISKTAVAPIERVKLLLQVQHASKQITADKQYKGIIDCVVRIPKEQGVLSFWRGNLANVIRYFPTQALNFAFKDKYKQIFLGGVDKRTQFWRYFAGNLASGGAAGATSLCFVYPLDFARTRLAADVGKAGAEREFRGLGDCLVKIYKSDGIKGLYQGFNVSVQGIIIYRAAYFGIYDTAKGMLPDPKNTHIVISWMIAQTVTAVAGLTSYPFDTVRRRMMMQSGRKGTDIMYTGTLDCWRKIARDEGGKAFFKGAWSNVLRGMGGAFVLVLYDEIKKYT

SEQ ID NO: 73 - DNA, 1826 bp, Homo sapien
agtatgtgtggttggggaattcatgtggaggtcagagtggaagcaggtgtgagagggtccagcagaaggaaacatggctgccaaagtgtttgagtccattggcaagtttggcctggccttagctgttgcaggaggcgtggtgaactctgccttatataatgtggatgctgggcacagagctgtcatctttgaccgattccgtggagtgcaggacattgtggtaggggaagggactcattttctcatcccgtgggtacagaaaccaattatctttgactgccgttctcgaccacgtaatgtgccagtcatcactggtagcaaagatttacagaatgtcaacatcacactgcgcatcctcttccggcctgtcgccagccagcttcctcgcatcttcaccagcatcggagaggactatgatgagcgtgtgctgccgtccatcacaactgagatcctcaagtcagtggtggctcgctttgatgctggagaactaatcacccagagagagctggtctccaggcaggtgagcgacgaccttacagagcgagccgccacctttgggctcatcctggatgacgtgtccttgacacatctgaccttcgggaaggagttcacagaagcggtggaagccaaacaggtggctcagcaggaagcagagagggccagatttgtggtggaaaaggctgagcaacagaaaaaggcggccatcatctctgctgagggcgactccaaggcagctgagctgattgccaactcactggccactgcaggggatggcctgatcgagctgcgcaagctggaagctgcagaggacatcgcgtaccagctctcacgctctcggaacatcacctacctgccagcggggcagtccgtgctcctccagctgccccagtgagggcccaccctgcctgcacctccgcgggctgactgggccacagccccgatgattcttaacacagccttccttctgctcccaccccagaaatcactgtgaaatttcatgattggcttaaagtgaaggaaataaaggtaaaatcacttcagatctctaattagtctatcaaatgaaactctttcattcttctcacatccatctacttttttatccacctccctaccaaaaattgccaagtgcctatgcaaaccagctttaggtcccaattcggggcctgctggagttccggcctgggcaccagcatttggcagcacgcaggcggggcagtatgtgatggactggggagcacaggtgtctgcctagatccacgtgtggcctccgtcctgtcactgatggaaggtttgcggatgagggcatgtgcggctgaactgagaaggcaggcctccgtcttcccagcggttcctgtgcagatgctgctgaagagaggtgccggggaggggcagagaggaagtggtctgtctgttaccataagtctgattctctttaactgtgtgaccagcggaaacaggtgtgtgtgaactgggcacagattgaagaatctgcccctgttgaggtgggtgggcctgactgttgccccccagggtcctaaaacttggatggacttgtatagtgagagaggaggcctggaccgagatgtgagtcctgttgaagacttcctctctaccccccaccttggtccctctcagatacccagtggaattccaacttgaaggattgcatcctgctggggctgaacatgcctgccaaagacgtgtccgacctacgttcctggccccctcgttcagagactgcccttctcacgggctctatgcctgcactgggaaggaaacaaatgtgtataaactgctgtcaataaatgacacccagaccttcc

SEQ ID NO: 74 - protein, 272 aa, Homo sapien
MAAKVFESIGKFGLALAVAGGVVNSALYNVDAGHRAVIFDRFRGVQDIVVGEGTHFLIPWVQKPIIFDCRSRPRNVPVITGSKDLQNVNITLRILFRPVASQLPRIFTSIGEDYDERVLPSITTEILKSVVARFDAGELITQRELVSRQVSDDLTERAATFGLILDDVSLTHLTFGKEFTEAVEAKQVAQQEAERARFVVEKAEQQKKAAIISAEGDSKAAELIANSLATAGDGLIELRKLEAAEDIAYQLSRSRNITYLPAGQSVLLQLPQ

SEQ ID NO: 75 - DNA, 2811 bp, Homo sapien
ggcacgaggggagcgcttgtttgctgcctcgtactcctccatttatccgccatgataagtgccagccgagctgcagcagcccgtctcgtgggcgccgcagcctcccggggccctacggccgcccgccaccaggatagctggaatggccttagtcatgaggcttttagacttgtttcaaggcgggattatgcatcagaagcaatcaagggagcagttgttggtattgatttgggtactaccaactcctgcgtggcagttatggaaggtaaacgagcaaaggtgctggagaatgccgaaggtgccagaaccaccccttcagttgtggcctttacagcagatggtgagcgacttgttggaatgccggccaagcgacaggctgtcaccaacccaaacaatacattttatgctaccaagcgtctcattggccggcgatatgatgatcctgaagtacagaaagacattaaaaatgttccctttaaaattgtccgtgcctccaatggtgatgcctgggttgaggctcatgggaaattgtattctccgagtcagattggagcatttgtgttgatgaagatgaaagagactgcagaaaattacttggggcgcacagcaaaaaatgctgtgatcacagtcccagcttatttcaatgactcgcagagacaggccactaaagatgctggccagatatctggactgaatgtgcttcgggtgattaatgagcccacagctgctgctcttgcctatggtctagacaaatcagaagacaaagtcattgctgtatatgatttaggtggtggaacttttgatatttctatcctggaaattcagaaaggagtatttgaggtgaaatccacaaatggggataccttcttaggtggggaagactttgaccaggccttgctacggcacattgtgaaggagttcaagagagagacaggggttgatttgactaaagacaacatggcacttcagagggtacgggaagctgctgaaaaggctaagtgtgaactctcctcatctgtgcagactgacatcaatttgccctatcttacaatggattcttctggacccaagcatttgaatatgaagttgacccgtgctcaatttgaagggattgtcactgatctaatcagaaggactatcgctccatgccaaaaagctatgcaagatgcagaagtcagcaagagtgacataggagaagtgattcttgtgggtggcatgactaggatgcccaaggttcagcagactgtacaggatctttttggcagagccccaagtaaagctgtcaatcctgatgaggctgtggccattggagctgccattcagggaggtgtgttggccggcgatgtcacggatgtgctgctccttgatgtcactcccctgtctctgggtattgaaactctaggaggtgtctttaccaaacttattaataggaataccactattccaaccaagaagagccaggtattctctactgccgctgatggtcaaacgcaagtggaaattaaagtgtgtcagggtgaaagagagatggctggagacaacaaactccttggacagtttactttgattggaattccaccagcccctcgtggagttcctcagattgaagttacatttgacattgatgccaatgggatagtacatgtttctgctaaagataaaggcacaggacgtgagcagcagattgtaatccagtcttctggtggattaagcaaagatgatattgaaaatatggttaaaaatgcagagaaatatgctgaagaagaccggcgaaagaaggaacgagttgaagcagttaatatggctgaaggaatcattcacgacacagaaaccaagatggaagaattcaaggaccaattacctgctgatgagtgcaacaagctgaaagaagagatttccaaaatgagggagctcctggctagaaaagacagcgaaacaggagaaaatattagacaggcagcatcctctcttcagcaggcatcattgaagctgttcgaaatggcatacaaaaagatggcatctgagcgagaaggctctggaagttctggcactggggaacaaaaggaagatcaaaaggaggaaaaacagtaataatagcagaaattttgaagccagaaggacaacatatgaagcttaggagtgaagagacttcctgagcagaaatgggcgaacttcagtctttttactgtgtttttgcagtattctatatataatttccttaatttgtaaatttagtgaccattagctagtgatcatttaatggacagtgattctaacagtataaagttcacaatattctatgtccctagcctgtcatttttcagctgcatgtaaaaggaggtaggatgaattgatcattataaagatttaactattttatgctgaagtgaccatattttcaaggggtgaaaccatctcgcacacagcaatgaaggtagtcatccatagacttgaaatgagaccacatatggggatgagatccttctagttagcctagtactgctgtactggcctgtatgtacatggggtccttcaactgaggccttgcaagtcaagctggctgtgccatgtttgtagatggggcagaggaatctagaacaatgggaaacttagctatttatattaggtacagctattaaaacaaggtaggaatgaggctagacctttaacttccctaaggcatacttttctagctaccttctgccctgtgtctggcacctacatccttgatgattgttctcttacccattctggaattttttttttttttaaataaatacagaaagcatcttgaaaaaaaaaaaaaaaaaa

SEQ ID NO: 76 - protein, 679 aa, Homo sapien
MISASRAAAARLVGAAASRGPTAARHQDSWNGLSHEAFRLVSRRDYASEAIKGAVVGIDLGTTNSCVAVMEGKRAKVLENAEGARTTPSVVAFTADGERLVGMPAKRQAVTNPNNTFYATKRLIGRRYDDPEVQKDIKNVPFKIVRASNGDAWVEAHGKLYSPSQIGAFVLMKMKETAENYLGRTAKNAVITVPAYFNDSQRQATKDAGQISGLNVLRVINEPTAAALAYGLDKSEDKVIAVYDLGGGTFDISILEIQKGVFEVKSTNGDTFLGGEDFDQALLRHIVKEFKRETGVDLTKDNMALQRVREAAEKAKCELSSSVQTDINLPYLTMDSSGPKHLNMKLTRAQFEGIVTDLIRRTIAPCQKAMQDAEVSKSDIGEVILVGGMTRMPKVQQTVQDLFGRAPSKAVNPDEAVAIGAAIQGGVLAGDVTDVLLLDVTPLSLGIETLGGVFTKLINRNTTIPTKKSQVFSTAADGQTQVEIKVCQGEREMAGDNKLLGQFTLIGIPPAPRGVPQIEVTFDIDANGIVHVSAKDKGTGREQQIVIQSSGGLSKDDIENMVKNAEKYAEEDRRKKERVEAVNMAEGIIHDTETKMEEFKDQLPADECNKLKEEISKMRELLARKDSETGENIRQAASSLQQASLKLFEMAYKKMASEREGSGSSGTGEQKEDQKEEKQ

SEQ ID NO: 77 - DNA, 2811 bp, Homo sapien; identical to SEQ ID NO: 75

SEQ ID NO: 78 - protein, 679 aa, Homo sapien; identical to SEQ ID NO: 76

SEQ ID NO: 79 - DNA, 2166 bp, Homo sapien
gtggtgggactcgcgtcgcggccgcggagacgtgaagctctcgaggctcctcccgctgcgggtcggcgctcgccctcgctctcctcgccctccgccccggccccggccccgcgcccgccatggagaagactgagctgatccagaaggccaagctggccgagcaggccgagcgctacgacgacatggccacctgcatgaaggcagtgaccgagcagggcgccgagctgtccaacgaggagcgcaacctgctctccgtggcctacaagaacgtggtcgggggccgcaggtccgcctggagggtcatctctagcatcgagcagaagaccgacacctccgacaagaagttgcagctgattaaggactatcgggagaaagtggagtccgagctgagatccatctgcaccacggtgctggaattgttggataaatatttaatagccaatgcaactaatccagagagtaaggtcttctatctgaaaatgaagggtgattacttccggtaccttgctgaagttgcgtgtggtgatgatcgaaaacaaacgatagataattcccaaggagcttaccaagaggcatttgatataagcaagaaagagatgcaacccacacacccaatccgcctggggcttgctcttaacttttctgtattttactatgagattcttaataacccagagcttgcctgcacgctggctaaaacggcttttgatgaggccattgctgaacttgatacactgaatgaagactcatacaaagacagcaccctcatcatgcagttgcttagagacaacctaacactttggacatcagacagtgcaggagaagaatgtgatgcggcagaaggggctgaaaactaaatccatacagggtgtcatccttctttccttcaagaaacctttttacacatctccattccttattccacttggatttcctatagcaaagaaacccattcatgtgtatggaatcaactgtttatagtcttttcacactgcagctttgggaaaacttcattccttgatttgtgtttgtcttggccttcctggtgtgcagtactgctgtagaaaagtattaatagcttcatttcatataaacataagtaactcccaaacacttatgtagaggactaaaaatgtatctggtatttaagtaatctgaaccagttctgcaagtgactgtgttttgtattactgtgaaaataagaaaatgtagttaattacaatttaaagagtattccacataacttcttaatttctacattccctcccttactcttcgggggtttcctttcagtaagcaacttttccatgctcttaatgtattcctttttagtaggaatccggaagtattagattgaatggaaaagcacttgccatctctgtctaggggtcacaaattgaaatggctcctgtatcacatacggaggtcttgtgtatctgtggcaacagggagtttccttattcactctttatttgctgctgtttaagttgccaacctcccctcccaataaaaattcacttacacctcctgcctttgtagttctggtattcactttactatgtgatagaagtagcatgttgctgccagaatacaagcattgcttttggcaaattaaagtgcatgtcatttcttaatacactagaaaggggaaataaattaaagtacacaagtccaagtctaaaactttagtacttttccatgcagatttgtgcacatgtgagagggtgtccagtttgtctagtgattgttatttagagagttggaccactattgtgtgttgctaatcattgactgtagtcccaaaaaagccttgtgaaaatgttatgccctatgtaacagcagagtaacataaaataaaagtacattttataaaccatttactatggctttgtaacaattgcatacccatattttaagggacaggtgaatttactactttctaaagtttattgatacttcccttttatgtaaaatgtagtagtgatacctatatttccacattgtgcattgtgacacacttgtctagggatgcctggaagtgtataaaattggactgcatttcttagagtgttttactatagatcagtctcatgggccatctcttcctcagatgtaaatgatatctggttaagtgttatatggaataaagtggacattttaaaacta

SEQ ID NO: 80 - protein, 245 aa, Homo sapien
MEKTELIQKAKLAEQAERYDDMATCMKAVTEQGAELSNEERNLLSVAYKNVVGGRRSAWRVISSIEQKTDTSDKKLQLIKDYREKVESELRSICTTVLELLDKYLIANATNPESKVFYLKMKGDYFRYLAEVACGDDRKQTIDNSQGAYQEAFDISKKEMQPTHPIRLGLALNFSVFYYEILNNPELACTLAKTAFDEAIAELDTLNEDSYKDSTLIMQLLRDNLTLWTSDSAGEECDAAEGAEN

SEQ ID NO: 81 - DNA, 2338 bp, Homo sapien
agcgcacgtcggcagtcggctccctcgttgaccgaatcaccgacctctctccccagctgtatttccaaaatgtcgctttctaacaagctgacgctggacaagctggacgttaaagggaagcgggtcgttatgagagtcgacttcaatgttcctatgaagaacaaccagataacaaacaaccagaggattaaggctgctgtcccaagcatcaaattctgcttggacaatggagccaagtcggtagtccttatgagccacctaggccggcctgatggtgtgcccatgcctgacaagtactccttagagccagttgctgtagaactcaaatctctgctgggcaaggatgttctgttcttgaaggactgtgtaggcccagaagtggagaaagcctgtgccaacccagctgctgggtctgtcatcctgctggagaacctccgctttcatgtggaggaagaagggaagggaaaagatgcttctgggaacaaggttaaagccgagccagccaaaatagaagctttccgagcttcactttccaagctaggggatgtctatgtcaatgatgcttttggcactgctcacagagcccacagctccatggtaggagtcaatctgccacagaaggctggtgggtttttgatgaagaaggagctgaactactttgcaaaggccttggagagcccagagcgacccttcctggccatcctgggcggagctaaagttgcagacaagatccagctcatcaataatatgctggacaaagtcaatgagatgattattggtggtggaatggcttttaccttccttaaggtgctcaacaacatggagattggcacttctctgtttgatgaagagggagccaagattgtcaaagacctaatgtccaaagctgagaagaatggtgtgaagattaccttgcctgttgactttgtcactgctgacaagtttgatgagaatgccaagactggccaagccactgtggcttctggcatacctgctggctggatgggcttggactgtggtcctgaaagcagcaagaagtatgctgaggctgtcactcgggctaagcagattgtgtggaatggtcctgtgggggtatttgaatgggaagcttttgcccggggaaccaaagctctcatggatgaggtggtgaaagccacttctaggggctgcatcaccatcataggtggtggagacactgccacttgctgtgccaaatggaacacggaggataaagtcagccatgtgagcactgggggtggtgccagtttggagctcctggaaggtaaagtccttcctggggtggatgctctcagcaatatttagtactttcctgccttttagttcctgtgcacagcccctaagtcaacttagcattttctgcatctccacttggcattagctaaaaccttccatgtcaagattcagctagtggccaagagatgcagtgccaggaacccttaaacagttgcacagcatctcagctcatcttcactgcaccctggatttgcatacattcttcaagatcccatttgaattttttagtgactaaaccattgtgcattctagagtgcatatatttatattttgcctgttaaaaagaaagtgagcagtgttagcttagttctcttttgatgtaggttattatgattagctttgtcactgtttcactactcagcatggaaacaagatgaaattccatttgtaggtagtgagacaaaattgatgatccattaagtaaacaataaaagtgtccattgaaaccgtgatttttttttttttcctgtcatactttgttaggaagggtgagaatagaatcttgaggaacggatcagatgtctatattgctgaatgcaagaagtggggcagcagcagtggagagatgggacaattagataaatgtccattctttatcaagggcctactttatggcagacattgtgctagtgcttttattctaacttttatttttatcagttacacatgatcataatttaaaaagtcaaggcttataacaaaaaagccccagcccattcctcccattcaagattcccactccccagaggtgaccactttcaactcttgagtttttcaggtatatacctccatgtttctaagtaatatgcttatattgttcacttcctttttttttattttttaaagaaatctatttcataccatggaggaaggctctgttccacatatatttccacttcttcattctctcggtatagttttgtcacaattatagattagatcaaaagtctacataactaatacagctgagctatgtagtatgctatgattaaatttacttatgtaaaaaaaaaaaaaaaaaaaa

SEQ ID NO: 82 - protein, 417 aa, Homo sapien
MSLSNKLTLDKLDVKGKRVVMRVDFNVPMKNNQITNNQRIKAAVPSIKFCLDNGAKSVVLMSHLGRPDGVPMPDKYSLEPVAVELKSLLGKDVLFLKDCVGPEVEKACANPAAGSVILLENLRFHVEEEGKGKDASGNKVKAEPAKIEAFRASLSKLGDVYVNDAFGTAHRAHSSMVGVNLPQKAGGFLMKKELNYFAKALESPERPFLAILGGAKVADKIQLINNMLDKVNEMIIGGGMAFTFLKVLNNMEIGTSLFDEEGAKIVKDLMSKAEKNGVKITLPVDFVTADKFDENAKTGQATVASGIPAGWMGLDCGPESSKKYAEAVTRAKQIVWNGPVGVFEWEAFARGTKALMDEVVKATSRGCITIIGGGDTATCCAKWNTEDKVSHVSTGGGASLELLEGKVLPGVDALSNI

SEQ ID NO: 83 - DNA, 1656 bp, Mus musculus
cgcccctgctctcgcgccggcgtcggctgcgtctccggcgtttgaattgcgcttccgccatctttccagcctcagtcggacgggcgcggaggcgcttctggaaggaacgccgcgatggctgcgcagggagagccccaggtccagttcaaacttgtattggttggtgatggtggtactggaaaaacgaccttcgtgaaacgtcatttgactggtgaatttgagaagaagtatgtagccaccttgggtgttgaggttcatcccctagtgttccacaccaacagaggacctattaagttcaatgtatgggacacagccggccaggagaaattcggtggactgagagatggctattatatccaagcccagtgtgccatcataatgtttgatgtaacatcgagagttacttacaagaatgtgcctaactggcatagagatctggtacgagtgtgtgaaaacatccccattgtgttgtgtggcaacaaagtggatattaaggacaggaaagtgaaggcgaaatccattgtcttccaccgaaagaagaatcttcagtactacgacatttctgccaaaagtaactacaactttgaaaagcccttcctctggcttgctaggaagctcattggagaccctaacttggaatttgttgccatgcctgctctcgccccaccagaagttgtcatggacccagctttggcagcacagtatgagcacgacttagaggttgctcagacaactgctctcccggatgaggatgatgacctgtgagaatgaagctggagcccagcgtcagaagtctagttttataggcagctgtcctgtgatgtcagcggtgcagcgtgtgtgccacctcattattatctagctaagcggaacatgtgctttatctgtgggatgctgaaggagatgagtgggcttcggagtgaatgtggcagtttaaaaaataacttcattgtttggacctgcatatttagctgtttggacgcagttgattccttgagtttcatatataagactgctgcagtcacatcacaatattcagtggtgaaatcttgtttgttactgtcattcccattccttttctttagaatcagaataaagttgtatttcaaatatctaagcaagtgaactcatcccttgtttataaatagcatttggaaaccactaaagtagggaagttttatgccatgttaatatttgaattgccttgcttttatcacttaatttgaaatctattgggttaatttctccctatgtttatttttgtacatttgagccatgtcacacaaactgatgatgacaggtcagcagtattctatttggttagaagggttacatggtgtaaatattagtgcagttaagctaaagcagtgtttgctccaccttcatattggctaggtagggtcacctagggaagcacttgctcaaaatctgtgacctgtcagaataaaaatgtggtttgtacatatcaaatagatattttaagggtaatattttcttttatggcaaaagtaatcatgttttaatgtagaacctcaaacaggatggaacatcagtggatggcaggaggttgggaattcttgctgttaaaaataattacaaattttgcactttttgtttgaatgttagatgcttagtgtgaagttgatacgcaagccg

SEQ ID NO: 84 - protein, 216 aa, Mus musculus
MAAQGEPQVQFKLVLVGDGGTGKTTFVKRHLTGEFEKKYVATLGVEVHPLVFHTNRGPIKFNVWDTAGQEKFGGLRDGYYIQAQCAIIMFDVTSRVTYKNVPNWHRDLVRVCENIPIVLCGNKVDIKDRKVKAKSIVFHRKKNLQYYDISAKSNYNFEKPFLWLARKLIGDPNLEFVAMPALAPPEVVMDPALAAQYEHDLEVAQTTALPDEDDDL

SEQ ID NO: 85 - DNA, 1879 bp, Homo sapien
cgctagcctgcggagcccgtccgtgctgttctgcggcaaggcctttcccagtgtccccacgcggaaggcaactgcctgaaaggcgcggcgtcgcaccgcccagagctgaggaagccggcgccagttcgcggggctccgggccgccactcagagctatgagctacggccgcccccctcccgatgtggagggtatgacctccctcaaggtggacaacctgacctaccgcacctcgcccgacacgctgaggcgcgtcttcgagaagtacaggcgcgtcggcgacgtgtacatcccgcgggatcgctacaccaaggagtcccgcggcttcgccttcgttcgctttcacgacaagcgcgacgctgaggacgctatggatgccatggacggggccgtgctggacggccgcgagctgcgggtgcaaatggcgcgctacggccgccccccggactcacaccacagccgccggggaccgccaccccgcaggtacgggggcggtggctacggacgccggagccgcagccctaggcggcgtcgccgcagccgatcccggagtcggagccgttccaggtctcgcagccgatctcgctacagccgctcgaagtctcggtcccgcactcgttctcgatctcggtcgacctccaagtccagatccgcacgaaggtccaagtccaagtcctcgtcggtctccagatctcgttcgcggtccaggtcccggtctcggtccaggagtcctcccccagtgtccaagagggaatccaaatccaggtcgcgatcgaagagtccccccaagtctcctgaagaggaaggagcggtgtcctcttaagaaaatgatgtatcggcaagcagtgtaaacggaggacttggggaaaaaggaccacatagtccatcgaagaagagtccttggaacaagcaactggctattgaaaaggttattttgtaacatttgtctaactttttacttgtttaagctttgcctcagttggcaaacttcattttatgtgccattttgttgctgttattcaaatttcttgtaatttagtgaggtgaacgacttcagatttcattattggatttggatatttgaggtaaaatttcattttgttatatagtgctgactttttttttttgaaattaaacagattggtaacctaatttgtggcctcctgacttttaaggaaaacgtgtgcagccattacacacagcctaaagctgtcaagagattgactcggcattcgttcattccttaaaattaaaaacctacaaaagttggtgtaaatttgtatatgttatttaccttcagatctaaatggtaatctgaacccaaatttgtataaagacttttcaggtgaaaagacttgattttttgaaaggattgtttatcaaacacaattctaatctcttctcttatgtatttttgtgcactaggcgcagttgtgtagcagttgagtaatgctggttagctgttaaggtggcgtgttgcagtgcagagtgcttggctgtttcctgttttctcccgattgctcctgtgtaaagatgccttgtcgtgcagaaacaaatggctgtccagtttattaaaatgcctgacaactgcacttccagacacccgggccttgcatataaataacggagcatacagtgagcacatctagctgatgataaatacacctttttttccctcttccccctaaaaatggtaaatctgatcatatctacatgtatgaacttaacatggaaaatgttaaggaagcaaatggttgtaactttgtaagtacttataacatggtgtatctttttgcttatgaatatctgtattataaccattgtttctgtagtttaattaaaacattttcttggtgttagctttaaaaaaaaaaaaaaaaa

SEQ ID NO: 86 - protein, 221 aa, Homo sapien
MSYGRPPPDVEGMTSLKVDNLTYRTSPDTLRRVFEKYRRVGDVYIPRDRYTKESRGFAFVRFHDKRDAEDAMDAMDGAVLDGRELRVQMARYGRPPDSHHSRRGPPPRRYGGGGYGRRSRSPRRRRRSRSRSRSRSRSRSRSRYSRSKSRSRTRSRSRSTSKSRSARRSKSKSSSVSRSRSRSRSRSRSRSPPPVSKRESKSRSRSKSPPKSPEEEGAVSS

SEQ ID NO: 87 - DNA, 2998 bp, Homo sapien
gagaggagacaccgccgcagttgccggtacatcggggatttctggctctttcctcttcgccttaaattcgggtgtcttttatgaataatcaaaagcagcaaaagccaacgctatcaggccagcgttttaaaactagaaaaagagatgaaaaagagaggtttgaccctactcagtttcaagactgtattattcaaggcttaactgaaaccggtactgatttggaagcagtagctaagtttcttgatgcttctggagcaaaacttgattaccgtcgatatgcagaaacactctttgacattctggtggctggtggaatgctggccccaggtggtacactggcagatgacatgatgcgtacagatgtctgcgtgtttgcagcccaagaagatctagagaccatgcaagcatttgctcaggtttttaacaagttaatcaggcgctacaaatacctggagaaaggttttgaagatgaagtaaaaaagctgctgctgttcttgaagggtttttcagagtcggagaggaacaagctagctatgttgactggtgttcttctggctaatggaacacttaatgcatccattcttaatagcctttataatgaaaatttggttaaagaaggagtttcagcagcttttgctgtgaagctctttaaatcatggataaatgaaaaagatatcaatgcagtagctgcaagtcttcggaaagtcagcatggataacagactgatggaactctttcctgccaataagcaaagtgttgaacacttcacaaaatattttactgaggcaggcttgaaagagctttcagaatatgttcggaatcagcaaaccatcggagctcgtaaggagctccagaaagaacttcaagaacagatgtcccgtggtgatccatttaaggatataattttatatgtcaaggaggagatgaaaaaaaacaacatcccagagccagttgtcatcggaatagtctggtcaagtgtaatgagcactgtggaatggaacaaaaaagaggagcttgtagcagagcaagccatcaagcacttgaagcaatacagccctctacttgctgcctttactactcaaggtcagtctgagctgactctgttactgaagattcaggagtattgctatgacaacattcatttcatgaaagccttccagaaaatagtggtgcttttttataaagctgaagtcctgagcgaggagcccattttgaagtggtataaagatgcacatgttgcaaaggggaagagtgttttccttgagcaaatgaaaaagtttgtagaatggctcaaaaatgctgaagaagaatctgaatctgaagctgaagaaggtgactgaattttgaaactacaccctcagtaaagcaaacaggagttgtagataaaatgtcatgtctcatgtgtcctggttcttacatcttcctacctccctgtatcaagcatgatataagggctttcatggcaaattttattttaactgtttctatggttgctggaaatgttgggtttagtttctaaaaccatgttttaagtagctacaggagctatagatttgaatctaatgttgcattagtcttttcagttatcttctacctcctgtattttctactgtaataatgtaatttaaggccttccacaatgaacagttcactttattccctgggttttctataaacagttttaaggatatgatttggttaaaaaataatttgttataaaaattctgtttgcaaattaaactggaaaagtatccagagtctcaaaaggcaatgatttgtgagataatatggcatgcccggagccctgctcatcaatgaaaaacccatatgtaataatcgaattcatttaacatgaatcttgagtacgtggaccattgcttgcatgttaactttttgttttgttttgttttgttttgttttgcatttttaactccagatatcctaaagctcaattgtttggtctctggttttcatccttagagaagccatggagaacagacttgaaaagtttaggaaatcataatgtggcagaggtggtgggaagaagaaagttgagctttttccccttgagaaacttctgcatttagtttctatctttccaggcaaaacaaatgggtattcttttcatacaaccattttcaaatgaaccttagaaaagtcttaacatttaaggtattttatgcacagaatacacttagattgataggaaagaactcgtaatggagtttgagtaaagaaaatgactgatgtactaaacccagtaaaaattgttgaaaatgttaaaggtcagcatgttctaattgggaatctagatatagcttagatttcctattggcttagagtatttgctataacaaatgaagtgcaatgacaattatatattcctactcggtcatactggactggcttcgttctcttaatatactcagtaatgactcaagcctctggctattaacataccctagttgccgttttttaattgccatgagccaaatacttcttggtatacaattgatccatttattttaatggctgccttttcattttcatcttttcttgctgctacccatctatgtatgtagtcattggggggaaaatgtagccacattttttatgggaagactttgtgttaaaagtgaacattttgaaggtttttaactggtgaaactagcctggaataatgccaccagagactgagtggaaatcgccccttttgaaggtgccattcttatgagccaaaagtttgtcatttaaaagttcattttgagggaataacatgtaatataatttgaaataaaggtatagtaaccttaaaaagaacattataactgattgttgtgaatggggtgaatttgttaaaatgagtaactttgataaagtttttcatgcacaggcaaaatgtattcactagatttctacgtagtgatctgcttttactttgtaatttgtagttctcaaaagacttttttttaaaaaaataaagtccatacttacactt

SEQ ID NO: 88 - protein, 419 aa, Homo sapien
MNNQKQQKPTLSGQRFKTRKRDEKERFDPTQFQDCIIQGLTETGTDLEAVAKFLDASGAKLDYRRYAETLFDILVAGGMLAPGGTLADDMMRTDVCVFAAQEDLETMQAFAQVFNKLIRRYKYLEKGFEDEVKKLLLFLKGFSESERNKLAMLTGVLLANGTLNASILNSLYNENLVKEGVSAAFAVKLFKSWINEKDINAVAASLRKVSMDNRLMELFPANKQSVEHFTKYFTEAGLKELSEYVRNQQTIGARKELQKELQEQMSRGDPFKDIILYVKEEMKKNNIPEPVVIGIVWSSVMSTVEWNKKEELVAEQAIKHLKQYSPLLAAFTTQGQSELTLLLKIQEYCYDNIHFMKAFQKIVVLFYKAEVLSEEPILKWYKDAHVAKGKSVFLEQMKKFVEWLKNAEEESESEAEEGD

SEQ ID NO: 89 - DNA, 2062 bp, Homo sapien
gtcagtccctcctgtagccgccgccgccgccgcccgccgcccctctgccagcagctccggcgccacctcgggccggcgtctccggcgggcgggagccaggcgctgacgggcgcggcgggggcggccgagcgctcctgcggctgcgactcaggctccggcgtctgcgcttccccatggggctggcctgcggcgcctgggcgctctgagattgtcactgctgttccaagggcacacgcagagggatttggaattcctggagagttgcctttgtgagaagctggaaatatttctttcaattccatctcttagttttccataggaacatcaagaaatcatgaacaactttggtaatgaagagtttgactgccacttcctcgatgaaggttttactgccaaggacattctggaccagaaaattaatgaagtttcttcttctgatgataaggatgccttctatgtggcagacctgggagacattctaaagaaacatctgaggtggttaaaagctctccctcgtgtcacccccttttatgcagtcaaatgtaatgatagcaaagccatcgtgaagacccttgctgctaccgggacaggatttgactgtgctagcaagactgaaatacagttggtgcagagtctgggggtgcctccagagaggattatctatgcaaatccttgtaaacaagtatctcaaattaagtatgctgctaataatggagtccagatgatgacttttgatagtgaagttgagttgatgaaagttgccagagcacatcccaaagcaaagttggttttgcggattgccactgatgattccaaagcagtctgtcgtctcagtgtgaaattcggtgccacgctcagaaccagcaggctccttttggaacgggcgaaagagctaaatatcgatgttgttggtgtcagcttccatgtaggaagcggctgtaccgatcctgagaccttcgtgcaggcaatctctgatgcccgctgtgtttttgacatgggggctgaggttggtttcagcatgtatctgcttgatattggcggtggctttcctggatctgaggatgtgaaacttaaatttgaagagatcaccggcgtaatcaacccagcgttggacaaatactttccgtcagactctggagtgagaatcatagctgagcccggcagatactatgttgcatcagctttcacgcttgcagttaatatcattgccaagaaaattgtattaaaggaacagacgggctctgatgacgaagatgagtcgagtgagcagacctttatgtattatgtgaatgatggcgtctatggatcatttaattgcatactctatgaccacgcacatgtaaagccccttctgcaaaagagacctaaaccagatgagaagtattattcatccagcatatggggaccaacatgtgatggcctcgatcggattgttgagcgctgtgacctgcctgaaatgcatgtgggtgattggatgctctttgaaaacatgggcgcttacactgttgctgctgcctctacgttcaatggcttccagaggccgacgatctactatgtgatgtcagggcctgcgtggcaactcatgcagcaattccagaaccccgacttcccacccgaagtagaggaacaggatgccagcaccctgcctgtgtcttgtgcctgggagagtgggatgaaacgccacagagcagcctgtgcttcggctagtattaatgtgtagatagcactctggtagctgttaactgcaagtttagcttgaattaagggatttggggggaccatgtaacttaattactgctagttttgaaatgtctttgtaagagtagggtcgccatgatgcagccatatggaagactaggatatgggtcacacttatctgtgttcctatggaaactatttgaatatttgttttatatggatttttattcactcttcagacacgctactcaagagtgcccctcagctgctgaacaagcatttgtagcttgtacaatggcagaatgggccaaaagcttagtgttgtgacctgtttttaaaataaagtatcttgaaataattaggc

SEQ ID NO: 90 - protein, 461 aa, Homo sapien
MNNFGNEEFDCHFLDEGFTAKDILDQKINEVSSSDDKDAFYVADLGDILKKHLRWLKALPRVTPFYAVKCNDSKAIVKTLAATGTGFDCASKTEIQLVQSLGVPPERIIYANPCKQVSQIKYAANNGVQMMTFDSEVELMKVARAHPKAKLVLRIATDDSKAVCRLSVKFGATLRTSRLLLERAKELNIDVVGVSFHVGSGCTDPETFVQAISDARCVFDMGAEVGFSMYLLDIGGGFPGSEDVKLKFEEITGVINPALDKYFPSDSGVRIIAEPGRYYVASAFTLAVNIIAKKIVLKEQTGSDDEDESSEQTFMYYVNDGVYGSFNCILYDHAHVKPLLQKRPKPDEKYYSSSIWGPTCDGLDRIVERCDLPEMHVGDWMLFENMGAYTVAAASTFNGFQRPTIYYVMSGPAWQLMQQFQNPDFPPEVEEQDASTLPVSCAWESGMKRHRAACASASINV

SEQ ID NO: 91 - DNA, 2202 bp, Homo sapien
cacgcttgccgccgccccgcagaaatgcttcggttacccacagtctttcgccagatgagaccggtgtccagggtactggctcctcatctcactcgggcttatgccaaagatgtaaaatttggtgcagatgcccgagccttaatgcttcaaggtgtagaccttttagccgatgctgtggccgttacaatggggccaaagggaagaacagtgattattgagcagggttggggaagtcccaaagtaacaaaagatggtgtgactgttgcaaagtcaattgacttaaaagataaatacaagaacattggagctaaacttgttcaagatgttgccaataacacaaatgaagaagctggggatggcactaccactgctactgtactggcacgctctatagccaaggaaggcttcgagaagattagcaaaggtgctaatccagtggaaatcaggagaggtgtgatgttagctgttgatgctgtaattgctgaacttaaaaagcagtctaaacctgtgaccacccctgaagaaattgcacaggttgctacgatttctgcaaacggagacaaagaaattggcaatatcatctctgatgcaatgaaaaaagttggaagaaagggtgtcatcacagtaaaggatggaaaaacactgaatgatgaattagaaattattgaaggcatgaagtttgatcgaggctatatttctccatactttattaatacatcaaaaggtcagaaatgtgaattccaggatgcctatgttctgttgagtgaaaagaaaatttctagtatccagtccattgtacctgctcttgaaattgccaatgctcaccgtaagcctttggtcataatcgctgaagatgttgatggagaagctctaagtacactcgtcttgaataggctaaaggttggtcttcaggttgtggcagtcaaggctccagggtttggtgacaatagaaagaaccagcttaaagatatggctattgctactggtggtgcagtgtttggagaagagggattgaccctgaatcttgaagacgttcagcctcatgacttaggaaaagttggagaggtcattgtgaccaaagacgatgccatgctcttaaaaggaaaaggtgacaaggctcaaattgaaaaacgtattcaagaaatcattgagcagttagatgtcacaactagtgaatatgaaaaggaaaaactgaatgaacggcttgcaaaactttcagatggagtggctgtgctgaaggttggtgggacaagtgatgttgaagtgaatgaaaagaaagacagagttacagatgcccttaatgctacaagagctgctgttgaagaaggcattgttttgggagggggttgtgccctccttcgatgcattccagccttggactcattgactccagctaatgaagatcaaaaaattggtatagaaattattaaaagaacactcaaaattccagcaatgaccattgctaagaatgcaggtgttgaaggatctttgatagttgagaaaattatgcaaagttcctcagaagttggttatgatgctatggctggagattttgtgaatatggtggaaaaaggaatcattgacccaacaaaggttgtgagaactgctttattggatgctgctggtgtggcctctctgttaactacagcagaagttgtagtcacagaaattcctaaagaagagaaggaccctggaatgggtgcaatgggtggaatgggaggtggtatgggaggtggcatgttctaactcctagactagtgctttacctttattaatgaactgtgacaggaagcccaaggcagtgttcctcaccaataacttcagagaagtcagttggagaaaatgaagaaaaaggctggctgaaaatcactataaccatcagttactggtttcagttgacaaaatatataatggtttactgctgtcattgtccatgcctacagataatttattttgtatttttgaataaaaaacatttgtacattcctgatactgggtacaagagccatgtaccagtgtactgctttcaacttaaatcactgaggcatttttactactattctgttaaaatcaggattttagtgcttgccaccaccagatgagaagttaagcagcctttctgtggagagtgagaataattgtgtacaaagtagagaagtatccaattatgtgacaacctttgtgtaataaaaatttgtttaa

SEQ ID NO: 92 - protein, 573 aa, Homo sapien
MLRLPTVFRQMRPVSRVLAPHLTRAYAKDVKFGADARALMLQGVDLLADAVAVTMGPKGRTVIIEQGWGSPKVTKDGVTVAKSIDLKDKYKNIGAKLVQDVANNTNEEAGDGTTTATVLARSIAKEGFEKISKGANPVEIRRGVMLAVDAVIAELKKQSKPVTTPEEIAQVATISANGDKEIGNIISDAMKKVGRKGVITVKDGKTLNDELEIIEGMKFDRGYISPYFINTSKGQKCEFQDAYVLLSEKKISSIQSIVPALEIANAHRKPLVIIAEDVDGEALSTLVLNRLKVGLQVVAVKAPGFGDNRKNQLKDMAIATGGAVFGEEGLTLNLEDVQPHDLGKVGEVIVTKDDAMLLKGKGDKAQIEKRIQEIIEQLDVTTSEYEKEKLNERLAKLSDGVAVLKVGGTSDVEVNEKKDRVTDALNATRAAVEEGIVLGGGCALLRCIPALDSLTPANEDQKIGIEIIKRTLKIPAMTIAKNAGVEGSLIVEKIMQSSSEVGYDAMAGDFVNMVEKGIIDPTKVVRTALLDAAGVASLLTTAEVVVTEIPKEEKDPGMGAMGGMGGGMGGGMF

SEQ ID NO: 93 - DNA, 1863 bp, Homo sapien
gttccaaggtttgcggcccggtctcggagaagaggggagagtggagggccgctgaataagcttccaaaatgatgcccacaccagttatcctattgaaagaggggactgatagctcccaaggcatcccccagcttgtgagtaacatcagtgcctgccaggtgattgctgaggctgtaagaactaccctgggtccccgtggcatggacaagcttattgtagatggcagaggcaaagcaacaatttctaatgatggggccacaattctgaaacttcttgatgttgtccatcctgcagcaaagactttggtagacattgccaaatcccaagatgctgaggtgggtgatggcaccacctcagtgaccttgctggctgcagagtttctgaagcaggtgaaaccctatgtggaggaaggtttacacccccagatcatcattcgagctttccgcacagccacccagctggcagttaacaagatcaaagagattgctgtgaccgtgaagaaggcagataaagtggagcagaggaagctgctggaaaagtgtgccatgaccgctctgagctccaagctgatctcccagcagaaagctttctttgctaagatggtggtggatgcagtgatgatgctcgatgatttgctgcagcttaaaatgattggaatcaagaaggtacagggtggagccctcgaggattctcagctggtagctggtgttgcattcaagaagactttctcttacgctgggtttgaaatgcaacccaaaaagtaccacaatcccaagattgcccttttgaatgtcgagctcgagttgaaagctgagaaagacaatgctgagataagagtccacacagttgaggattatcaggcaattgttgatgctgagtggaacattctctatgacaagttagagaagatccatcattctggagccaaagttgtcttgtccaaactccccattggggatgtggccacccagtactttgctgacagggacatgttctgtgctggccgagtacctgaggaggatctgaagaggacaatgatggcctgtggaggctcaatccagaccagtgtgaatgctctgtcagcagatgtgctgggtcgatgccaggtgtttgaagagacccagattggaggcgagaggtacaatttttttactggctgccccaaggccaagacatgcaccttcattctccgtggcggcgccgagcagtttatggaggagacagagcggtccctgcatgatgccatcatgatcgtcaggagggccatcaagaatgattcagtggtggctggtggcggggccattgagatggaactctccaagtacctgcgggattactcaaggactattccaggaaaacagcagctgttgattggggcttatgccaaggccttggagattatcccacgccagctgtgtgacaatgctggctttgatgccacaaacattctcaacaagctgcgggctcggcatgcccaggggggtacatggtatggagtagacatcaacaacgaggacattgctgacaactttgaagctttcgtgtgggagccagctatggtgcggatcaatgcgctgacagcagcctctgaggctgcgtgcctgatcgtgtctgtagatgaaaccatcaagaacccccgctcgactgtggatgctcccacagcagcaggccggggccgtggtcgtggccgcccccactgagaggcaccccacccatcacatggctggctggctgctgggtgcacttaccctccttggcttggttacttcattttacaaggaaggggtagtaattggcccactctcttcttactggaggctatttaaataaaatgtaagacttcaaaaaaaaaaaaaaaaaaaa

SEQ ID NO: 94 - protein, 543 aa, Homo sapien
MMPTPVILLKEGTDSSQGIPQLVSNISACQVIAEAVRTTLGPRGMDKLIVDGRGKATISNDGATILKLLDVVHPAAKTLVDIAKSQDAEVGDGTTSVTLLAAEFLKQVKPYVEEGLHPQIIIRAFRTATQLAVNKIKEIAVTVKKADKVEQRKLLEKCAMTALSSKLISQQKAFFAKMVVDAVMMLDDLLQLKMIGIKKVQGGALEDSQLVAGVAFKKTFSYAGFEMQPKKYHNPKIALLNVELELKAEKDNAEIRVHTVEDYQAIVDAEWNILYDKLEKIHHSGAKVVLSKLPIGDVATQYFADRDMFCAGRVPEEDLKRTMMACGGSIQTSVNALSADVLGRCQVFEETQIGGERYNFFTGCPKAKTCTFILRGGAEQFMEETERSLHDAIMIVRRAIKNDSVVAGGGAIEMELSKYLRDYSRTIPGKQQLLIGAYAKALEIIPRQLCDNAGFDATNILNKLRARHAQGGTWYGVDINNEDIADNFEAFVWEPAMVRINALTAASEAACLIVSVDETIKNPRSTVDAPTAAGRGRGRGRPH

SEQ ID NO: 95 - DNA, 928 bp, Homo sapien
cggggcggcaggcttctcgagctccgggcccgcggcaacctcgggcgctgttctgcaggccgcgaccggcatgtacgagcaactcaagggcgagtggaaccgtaaaagccccaatcttagcaagtgcggggaagagctgggtcgactcaagctagttcttctggagctcaacttcttgccaaccacagggaccaagctgaccaaacagcagctaattctggcccgtgacatactggagatcggggcccaatggagcatcctacgcaaggacatcccctccttcgagcgctacatggcccagctcaaatgctactactttgattacaaggagcagctccccgagtcagcctatatgcaccagctcttgggcctcaacctcctcttcctgctgtcccagaaccgggtggctgagttccacacggagttggagcggctgcctgccaaggacatacagaccaatgtctacatcaagcacccagtgtccctggagcaatacctgatggagggcagctacaacaaagtgttcctggccaagggtaacatccccgccgagagctacaccttcttcattgacatcctgctcgacactatcagggatgagatcgctgggtgcatcgagaaggcctacgagaaaatccttttcactgaggccacccggatcctcttcttcaacacacccaaaaagatgacagactacgccaagaagcgagggtgggtcctgggccccaacaactactacagttttgccagccagcagcagaagccggaagacaccaccattccctccacagaactggccaaacaggtcatcgagtatgcccggcagctggagatgatcgtctgagccccccgggcactgggtggggcagggcacgagttatttaaaacagttacactgcagggtttcgcccaataaaggtggactgac

SEQ ID NO: 96 - protein, 257 aa, Homo sapien
MYEQLKGEWNRKSPNLSKCGEELGRLKLVLLELNFLPTTGTKLTKQQLILARDILEIGAQWSILRKDIPSFERYMAQLKCYYFDYKEQLPESAYMHQLLGLNLLFLLSQNRVAEFHTELERLPAKDIQTNVYIKHPVSLEQYLMEGSYNKVFLAKGNIPAESYTFFIDILLDTIRDEIAGCIEKAYEKILFTEATRILFFNTPKKMTDYAKKRGWVLGPNNYYSFASQQQKPEDTTIPSTELAKQVIEYARQLEMIV

SEQ ID NO: 97 - DNA, 2966 bp, Homo sapien
ggcacgaggatggaggagggaggccgggacaaggcgccggtgcagccccagcagtctccagcggcggcccccggcggcacggacgagaagccgagcggcaaggagcggcgggatgccggggacaaggacaaagaacaggagctgtctgaagaggataaacagcttcaagatgaactggagatgctcgtggaacgactaggggagaaggatacatccctgtatcgaccagcgctggaggaattgcgaaggcagattcgttcttctacaacttccatgacttcagtgcccaagcctctcaaatttctgcgtccacactatggcaaactgaaggaaatctatgagaacatggcccctggggagaataagcgttttgctgctgacatcatctccgttttggccatgaccatgagtggggagcgtgagtgcctcaagtatcggctagtgggctcccaggaggaattggcatcatggggtcatgagtatgtcaggcatctggcaggagaagtggctaaggagtggcaggagctggatgacgcagagaaggtccagcgggagcctctgctcactctggtgaaggaaatcgtcccctataacatggcccacaatgcagagcatgaggcttgcgacctgcttatggaaattgagcaggtggacatgctggagaaggacattgatgaaaatgcatatgcaaaggtctgcctttatctcaccagttgtgtgaattacgtgcctgagcctgagaactcagccctactgcgttgtgccctgggtgtgttccgaaagtttagccgcttccctgaagctctgagattggcattgatgctcaatgacatggagttggtagaagacatcttcacctcctgcaaggatgtggtagtacagaaacagatggcattcatgctaggccggcatggggtgttcctggagctgagtgaagatgtcgaggagtatgaggacctgacagagatcatgtccaatgtacagctcaacagcaacttcttggccttagctcgggagctggacatcatggagcccaaggtgcctgatgacatctacaaaacccacctagagaacaacaggtttgggggcagtggctctcaggtggactctgcccgcatgaacctggcctcctcttttgtgaatggctttgtgaatgcagcttttggccaagacaagctgctaacagatgatggcaacaaatggctttacaagaacaaggaccacggaatgttgagtgcagctgcatctcttgggatgattctgctgtgggatgtggatggtggcctcacccagattgacaagtacctgtactcctctgaggactacattaagtcaggagctcttcttgcctgtggcatagtgaactctggggtccggaatgagtgtgaccctgctctggcactgctctcagactatgttctccacaacagcaacaccatgagacttggttccatctttgggctaggcttggcttatgctggctcaaatcgtgaagatgtcctaacactgctgctgcctgtgatgggagattcaaagtccagcatggaggtggcaggtgtcacagctttagcctgtggaatgatagcagtagggtcctgcaatggagatgtaacttccactatccttcagaccatcatggagaagtcagagactgagctcaaggatacttatgctcgttggcttcctcttggactgggtctcaaccacctggggaagggtgaggccatcgaggcaatcctggctgcactggaggttgtgtcagagccattccgcagttttgccaacacactggtggatgtgtgtgcatatgcaggctctgggaatgtgctgaaggtgcagcagctgctccacatttgtagcgaacactttgactccaaagagaaggaggaagacaaagacaagaaggaaaagaaagacaaggacaagaaggaagcccctgctgacatgggagcacatcagggagtggctgttctggggattgcccttattgctatgggggaggagattggtgcagagatggcattacgaacctttggccacttgctgagatatggggagcctacactccggagggctgtacctttagcactggccctcatctctgtttcaaatccacgactcaacatcctggataccctaagcaaattctctcatgatgctgatccagaagtttcctattactccatttttgccatgggcatggtgggcagtggtaccaataatgcccgtctggctgcaatgctgcgccagttagctcaatatcatgccaaggacccaaacaacctcttcatggtgcgcttggcacagggcctgacacatttagggaagggcacccttaccctctgcccctaccacagcgaccggcagcttatgagccaggtggccgtggctggactgctcactgtgcttgtctctttcctggatgttcgaaacattattctaggcaaatcacactatgtattgtatgggctggtggctgccatgcagccccgaatgctggttacgtttgatgaggagctgcggccattgccagtgtctgtccgtgtgggccaggcagtggatgtggtgggccaggctggcaagccgaagactatcacagggttccagacgcatacaaccccagtgttgttggcccacggggaacgggcagaattggccactgaggagtttcttcctgttacccccattctggaaggttttgttatccttcggaagaaccccaattatgatctctaagtgaccaccaggggctctgaactgcagctgatgttatcagcaggccatgcatcctgctgccaagggtggacacggctgcagacttctgggggaattgtcgcctcctgctcttttgttactgagtgagataaggttgttcaataaagacttttatccccaaggtcaaaaaaaaaaaaaaaaaaaaaaaaaaaaaaaaaaaaaaaaaaaaaaaaaaaaaaaaaaaaaaaaaa

SEQ ID NO: 98 - protein, 908 aa, Homo sapien
MEEGGRDKAPVQPQQSPAAAPGGTDEKPSGKERRDAGDKDKEQELSEEDKQLQDELEMLVERLGEKDTSLYRPALEELRRQIRSSTTSMTSVPKPLKFLRPHYGKLKEIYENMAPGENKRFAADIISVLAMTMSGERECLKYRLVGSQEELASWGHEYVRHLAGEVAKEWQELDDAEKVQREPLLTLVKEIVPYNMAHNAEHEACDLLMEIEQVDMLEKDIDENAYAKVCLYLTSCVNYVPEPENSALLRCALGVFRKFSRFPEALRLALMLNDMELVEDIFTSCKDVVVQKQMAFMLGRHGVFLELSEDVEEYEDLTEIMSNVQLNSNFLALARELDIMEPKVPDDIYKTHLENNRFGGSGSQVDSARMNLASSFVNGFVNAAFGQDKLLTDDGNKWLYKNKDHGMLSAAASLGMILLWDVDGGLTQIDKYLYSSEDYIKSGALLACGIVNSGVRNECDPALALLSDYVLHNSNTMRLGSIFGLGLAYAGSNREDVLTLLLPVMGDSKSSMEVAGVTALACGMIAVGSCNGDVTSTILQTIMEKSETELKDTYARWLPLGLGLNHLGKGEAIEAILAALEVVSEPFRSFANTLVDVCAYAGSGNVLKVQQLLHICSEHFDSKEKEEDKDKKEKKDKDKKEAPADMGAHQGVAVLGIALIAMGEEIGAEMALRTFGHLLRYGEPTLRRAVPLALALISVSNPRLNILDTLSKFSHDADPEVSYYSIFAMGMVGSGTNNARLAAMLRQLAQYHAKDPNNLFMVRLAQGLTHLGKGTLTLCPYHSDRQLMSQVAVAGLLTVLVSFLDVRNIILGKSHYVLYGLVAAMQPRMLVTFDEELRPLPVSVRVGQAVDVVGQAGKPKTITGFQTHTTPVLLAHGERAELATEEFLPVTPILEGFVILRKNPNYDL

SEQ ID NO: 99 - DNA, 4586 bp, Homo sapien
tatacttcgctacttggctagagttgcaactacagctgggttatatggctctaatctgatggaacatactgagattgatcactggttggagttcagtgctacaaaattatcttcatgtgattcctttacttctacaattaatgaactcaatcattgcctgtctctgagaacatacttagttggaaactccttgagtttagcagatttatgtgtttgggccaccctaaaaggaaatgctgcctggcaagaacagttgaaacagaagaaagctccagttcatgtaaaacgttggtttggctttcttgaagcccagcaggccttccagtcagtaggtaccaagtgggatgtttcaacaaccaaagctcgagtggcacctgagaaaaagcaagatgttgggaaatttgttgagcttccaggtgcggagatgggaaaggttaccgtcagatttcctccagaggccagtggttacttacacattgggcatgcaaaagctgctcttctgaaccagcactaccaggttaactttaaagggaaactgatcatgagatttgatgacacaaatcctgaaaaagaaaaggaagattttgagaaggttatcttggaagatgttgcaatgttgcatatcaaaccagatcaatttacttatacttcggatcattttgaaactataatgaagtatgcagagaagctaattcaagaagggaaggcttatgtggatgatactcctgctgaacagatgaaagcagaacgtgagcagaggatagaatctaaacatagaaaaaaccctattgagaagaatctacaaatgtgggaagaaatgaaaaaagggagccagtttggtcactcctgttgtttgcgagcaaaaattgacatgagtagtaacaatggatgcatgagagatccaaccctttatcgctgcaaaattcaaccacatccaagaactggaaataaatacaatgtttatccaacatatgattttgcctgccccatagttgacagcatcgaaggtgttacacatgccctgagaacaacagaataccatgacagagatgagcagttttactggattattgaagctttaggcataagaaaaccatatatttgggaatatagtcggctaaatctcaacaacacagtgctatccaaaagaaaactcacatggtttgtcaatgaaggactagtagatggatgggatgacccaagatttcctacggttcgtggtgtactgagaagagggatgacagttgaaggactgaaacagtttattgctgctcagggctcctcacgttcagtcgtgaacatggagtgggacaaaatctgggcgtttaacaaaaaggttattgacccagtggctccacgatatgttgcattactgaagaaagaagtgatcccagtgaatgtacctgaagctcaggaggagatgaaagaagtagccaaacacccaaagaatcctgaggttggcttgaagcctgtgtggtatagtcccaaagttttcattgaaggtgctgatgcagagactttttcggagggtgagatggttacatttataaattggggcaacctcaacattacaaaaatacacaaaaatgcagatggaaaaatcatatctcttgatgcaaagtttaatttggaaaacaaagactacaagaaaaccactaaggtcacttggcttgcagagactacacatgctcttcctattccagtaatctgtgtcacttatgagcacttgatcacaaagccagtgctaggaaaagacgaggactttaagcagtatgtcaacaagaacagtaagcatgaagagctaatgctaggggatccctgccttaaggatttgaaaaaaggagatattatacaactccagagaagaggattcttcatatgtgatcaaccttatgaacctgttagcccatatagttgcaaggaagccccgtgtgttttgatatacattcctgatgggcacacaaaggaaatgccaacatcagggtcaaaggaaaagaccaaagtagaagccacaaaaaatgagacctctgctccttttaaggaaagaccaacaccttctctgaataataattgtactacatctgaggattccttggtcctttacaatagagtggctgttcaaggagatgtggttcgtgaattaaaagccaagaaagcaccaaaggaagatgtagatgcagctgtaaaacagcttttgtctttgaaagctgaatataaggagaaaactggccaggaatataaacctggaaaccctcctgctgaaataggacagaatatttcttctaattcctcagcaagtattctggaaagtaaatctctgtatgatgaagttgctgcacaaggggaggtggttcgtaagctaaaagctgaaaaatcccctaaggctaaaataaatgaagctgtagaatgcttactgtccctgaaggctcagtataaagaaaaaactgggaaggagtacatacctggtcagcccccattatctcaaagttcggattcaagcccaaccagaaattctgaacctgctggtttagaaacaccagaagcgaaagtactttttgacaaagtagcttctcaaggggaagtagttcggaaacttaaaactgaaaaagcccctaaggatcaagtagatatagctgttcaagaactccttcagctaaaggcacagtacaagtctttgataggagtagagtataagcctgtgtcggccactggagctgaggacaaagataagaagaagaaagaaaaagaaaataaatctgaaaagcagaataagcctcagaaacaaaatgatggccaaaggaaagacccttctaaaaaccaaggaggtgggctctcatcaagtggagcaggagaagggcaggggcctaagaaacagaccaggttgggtcttgaggcaaaaaaagaagaaaatcttgctgattggtattctcaggtcatcacaaagtcagaaatgattgaataccatgacataagtggctgttatattcttcgtccctgggcctatgccatttgggaagccatcaaggacttttttgatgctgagatcaagaaacttggtgttgaaaactgctacttccccatgtttgtgtctcaaagtgcattagagaaagagaagactcatgttgctgactttgccccagaggttgcttgggttacaagatctggcaaaaccgagctggcagaaccaattgccattcgtcctactagtgaaacagtaatgtatcctgcatatgcaaaatgggtacaatcacacagagacctgcccatcaagctcaatcagtggtgcaatgtggtgcgttgggaattcaagcatcctcagcctttcctacgtactcgtgaatttctttggcaggaagggcacagtgcttttgctaccatggaagaggcagcggaagaggtcttgcagatacttgacttatatgctcaggtatatgaagaactcctggcaattcctgttgttaaaggaagaaagacggaaaaggaaaaatttgcaggaggagactatacaactacaatagaagcatttatatctgctagtggaagagctatccagggaggaacatcacatcatttagggcagaatttttccaaaatgtttgaaatcgtttttgaagatccaaagataccaggagagaagcaatttgcctatcaaaactcctggggcctgacaactcgaactattggtgttatgaccatggttcatggggacaacatgggtttagtattaccaccccgtgtagcatgtgttcaggtggtgattattccttgtggcattaccaatgcactttctgaagaagacaaagaagcgctgattgcaaaatgcaatgattatcgaaggcgattactcagtgttaacatccgcgttagagctgatttacgagataattattctccaggttggaaattcaatcactgggagctcaagggagttcccattagacttgaagttgggccacgtgatatgaagagctgtcagtttgtagccgtcagacgagatactggagaaaagctgacagttgctgaaaatgaggcagagactaaacttcaagctattttggaagacatccaggtcacccttttcacaagggcttctgaagaccttaagactcatatggttgtggctaatacaatggaagactttcagaagatactagattctggaaagattgttcagattccattctgtggggaaattgactgtgaggactggatcaaaaagaccactgccagggatcaagatcttgaacctggtgctccatccatgggagctaaaagcctttgcatccccttcaaaccactctgtgaactgcagcctggagccaaatgtgtctgtggcaagaaccctgccaagtactacaccttatttggtcgcagctactgagggatgaacgaaagccccctcttcaactcctctcactttttaaagcattgatattagtatcttctcagatacagaccgttttatgattttttaaaaagtaaaagttctaaaatgaagtcacacaggacaattattcttatgcctaagttaacagtggataaaagacttttctgtaaacaactccagtaataaatatcatgaacta

SEQ ID NO: 100 - protein, 1440 aa, Homo sapien
MEHTEIDHWLEFSATKLSSCDSFTSTINELNHCLSLRTYLVGNSLSLADLCVWATLKGNAAWQEQLKQKKAPVHVKRWFGFLEAQQAFQSVGTKWDVSTTKARVAPEKKQDVGKFVELPGAEMGKVTVRFPPEASGYLHIGHAKAALLNQHYQVNFKGKLIMRFDDTNPEKEKEDFEKVILEDVAMLHIKPDQFTYTSDHFETIMKYAEKLIQEGKAYVDDTPAEQMKAEREQRIESKHRKNPIEKNLQMWEEMKKGSQFGHSCCLRAKIDMSSNNGCMRDPTLYRCKIQPHPRTGNKYNVYPTYDFACPIVDSIEGVTHALRTTEYHDRDEQFYWIIEALGIRKPYIWEYSRLNLNNTVLSKRKLTWFVNEGLVDGWDDPRFPTVRGVLRRGMTVEGLKQFIAAQGSSRSVVNMEWDKIWAFNKKVIDPVAPRYVALLKKEVIPVNVPEAQEEMKEVAKHPKNPEVGLKPVWYSPKVFIEGADAETFSEGEMVTFINWGNLNITKIHKNADGKIISLDAKFNLENKDYKKTTKVTWLAETTHALPIPVICVTYEHLITKPVLGKDEDFKQYVNKNSKHEELMLGDPCLKDLKKGDIIQLQRRGFFICDQPYEPVSPYSCKEAPCVLIYIPDGHTKEMPTSGSKEKTKVEATKNETSAPFKERPTPSLNNNCTTSEDSLVLYNRVAVQGDVVRELKAKKAPKEDVDAAVKQLLSLKAEYKEKTGQEYKPGNPPAEIGQNISSNSSASILESKSLYDEVAAQGEVVRKLKAEKSPKAKINEAVECLLSLKAQYKEKTGKEYIPGQPPLSQSSDSSPTRNSEPAGLETPEAKVLFDKVASQGEVVRKLKTEKAPKDQVDIAVQELLQLKAQYKSLIGVEYKPVSATGAEDKDKKKKEKENKSEKQNKPQKQNDGQRKDPSKNQGGGLSSSGAGEGQGPKKQTRLGLEAKKEENLADWYSQVITKSEMIEYHDISGCYILRPWAYAIWEAIKDFFDAEIKKLGVENCYFPMFVSQSALEKEKTHVADFAPEVAWVTRSGKTELAEPIAIRPTSETVMYPAYAKWVQSHRDLPIKLNQWCNVVRWEFKHPQPFLRTREFLWQEGHSAFATMEEAAEEVLQILDLYAQVYEELLAIPVVKGRKTEKEKFAGGDYTTTIEAFISASGRAIQGGTSHHLGQNFSKMFEIVFEDPKIPGEKQFAYQNSWGLTTRTIGVMTMVHGDNMGLVLPPRVACVQVVIIPCGITNALSEEDKEALIAKCNDYRRRLLSVNIRVRADLRDNYSPGWKFNHWELKGVPIRLEVGPRDMKSCQFVAVRRDTGEKLTVAENEAETKLQAILEDIQVTLFTRASEDLKTHMVVANTMEDFQKILDSGKIVQIPFCGEIDCEDWIKKTTARDQDLEPGAPSMGAKSLCIPFKPLCELQPGAKCVCGKNPAKYYTLFGRSY

SEQ ID NO: 101 - DNA, 649 bp, Homo sapien
agaatacactcacaagccactccgctgctcgcctctccgccccgcgtccagctcgcccagctcgcccagcgtccgccgcgcctcgccaaggcttcaacggaccacaccaaaatgccatctcaaatggaacacgccatggaaaccatgatgtttacatttcacaaattcgctggggataaaggctacttaacaaaggaggacctgagagtactcatggaaaaggagttccctggatttttggaaaatcaaaaagaccctctggctgtggacaaaataatgaaggacctggaccagtgtagagatggcaaagtgggcttccagagcttcttttccctaattgcgggcctcaccattgcatgcaatgactattttgtagtacacatgaagcagaagggaaagaagtaggcagaaatgagcagttcgctcctccctgataagagttgtccaaagggtcgcttaaggaatctgccccacagcttcccccatagaaggatttcatgagcagatcaggacacttagcaaatgtaaaaataaaatctaactctcatttgacaagcagagaaagaaaagttaaataccagataagcttttgatttttgtattgtttgcatccccttgccctcaataaataaagttcttttttagttcc

SEQ ID NO: 102 - protein, 97 aa, Homo sapien
MPSQMEHAMETMMFTFHKFAGDKGYLTKEDLRVLMEKEFPGFLENQKDPLAVDKIMKDLDQCRDGKVGFQSFFSLIAGLTIACNDYFVVHMKQKGKK

SEQ ID NO: 103 - DNA, 1821 bp, Homo sapien
cgcgtgaactgcttcctgcaggctggccatggcgcttcacgttcccaaggctccgggctttgcccagatgctcaaggagggagcgaaacacttttcaggattagaagaggctgtgtatagaaacatacaagcttgcaaggagcttgcccaaaccactcgtacagcatatggaccaaaaggaatgaacaaaatggttatcaaccacttggagaagttgtttgtgacaaacgatgcagcaactattttaagagaactagaagtacagcatcctgctgcaaaaatgattgtaatggcttctcatatgcaagagcaagaagttggagatggcacaaactttgttctggtatttgctggagctctcctggaattagctgaagaacttctgaggattggcctgtcagtttcagaggtcatagaaggttatgaaatagcctgcagaaaagctcatgagattcttcctaatttggtatgttgttctgcaaaaaaccttcgagatattgatgaagtctcatctctacttcgtacctccataatgagtaaacaatatggtaatgaagtatttctggccaagcttattgctcaggcatgcgtatctatttttcctgattccggccatttcaatgttgataacatcagagtttgtaaaattctgggctctggtatcagttcctcttcagtattgcatggcatggtttttaagaaggaaaccgaaggtgatgtaacatctgtcaaagatgcaaaaatagcagtgtactcttgtccttttgatggcatgataacagaaactaagggaacagtgttgataaagactgctgaagaattgatgaattttagtaagggagaagaaaacctcatggatgcacaagtcaaagctattgctgatactggtgcaaatgtcgtagtaacaggtggcaaagtggcagacatggctcttcattatgcaaataaatataatatcatgttagtgaggctaaactcaaaatgggatctccgaagactttgtaaaactgttggtgctacagctcttcctagattgacacctcctgtccttgaagaaatgggacactgtgacagtgtttacctctcagaagttggagatactcaggtggtggtttttaagcatgaaaaggaagatggcgccatttctaccatagtacttcgaggctctacagacaatctgatggatgacatagaaagggtagtagacgatggtgttaatactttcaaagttcttacaagggataaacgtcttgtacccggaggtggagcaacagaaattgaattagccaaacagatcacatcatatggagagacatgtcctggacttgaacagtatgctattaagaagtttgctgaggcatttgaagctattccccgcgcactggcagaaaactctggagttaaggccaatgaagtaatctctaaactttatgcagtacatcaagaaggaaataaaaacgttggattagatattgaggctgaagtccctgctgtaaaggacatgctggaagctggtattctagatacttacctgggaaaatattgggctatcaaactcgctactaatgctgcagtcactgtacttagagtggatcagatcatcatggcaaaaccagctggtgggcccaagcctccaagtgggaagaaagactgggatgatgaccaaaatgattgaaattggcttaatttttactgtaggtgaaggctgtatttgtagtagtactcaagaatcacctgatgttttcttattctccttaaattaagagttattttgtgtttgtattcttggctggatgttataataaacatattgttactgtc

SEQ ID NO: 104 - protein, 548 aa, Homo sapien
MALHVPKAPGFAQMLKEGAKHFSGLEEAVYRNIQACKELAQTTRTAYGPKGMNKMVINHLEKLFVTNDAATILRELEVQHPAAKMIVMASHMQEQEVGDGTNFVLVFAGALLELAEELLRIGLSVSEVIEGYEIACRKAHEILPNLVCCSAKNLRDIDEVSSLLRTSIMSKQYGNEVFLAKLIAQACVSIFPDSGHFNVDNIRVCKILGSGISSSSVLHGMVFKKETEGDVTSVKDAKIAVYSCPFDGMITETKGTVLIKTAEELMNFSKGEENLMDAQVKAIADTGANVVVTGGKVADMALHYANKYNIMLVRLNSKWDLRRLCKTVGATALPRLTPPVLEEMGHCDSVYLSEVGDTQVVVFKHEKEDGAISTIVLRGSTDNLMDDIERVVDDGVNTFKVLTRDKRLVPGGGATEIELAKQITSYGETCPGLEQYAIKKFAEAFEAIPRALAENSGVKANEVISKLYAVHQEGNKNVGLDIEAEVPAVKDMLEAGILDTYLGKYWAIKLATNAAVTVLRVDQIIMAKPAGGPKPPSGKKDWDDDQND

SEQ ID NO: 105 - DNA, 1973 bp, Homo sapien
ggatccggcaacgaaggtaccatggcgggacgtggcgccatggtgctgttgcacgtgctgtttgagcacgcggtcggctacgcgctcgtggcgctgaaggaagtggaggagatcagtctgctgcagccgcaggtggaggagtccgtgctcaacctgggcaaattccacagcatcgttcgtctggtggccttttgtccctttgcctcatcccaggttgccttggaaaatgccaacgccgtgtctgaaggggttgttcatgaggacctccgcctgctcttggagacccacctgccgtccaaaaagaagaaagtactcttgggagttggggatcccaagattggtgccgcaatacaggaggagttagggtacaactgccagactggaggagtcatagctgagatcctgcgaggagttcgtctgcacttccacaatctggtgaagggtctgaccgatctgtcagcttgtaaagcacagctggggctgggacacagctattcccgtgccaaagttaagtttaatgtgaaccgggtggacaatatgatcatccagtccattagcctcctggaccagctggataaggacatcaataccttctctatgcgtgtcagggagtggtacgggtatcactttccggagctggtgaagatcatcaacgacaatgccacatactgccgtcttgcccagtttattggaaaccgaagggaactgaatgaggacaagctggagaagctggaggagctgacaatggatggggccaaggctaaggctattctggatgcctcacggtcctccatgggcatggacatatctgccattgacttgataaacatcgagagcttctccagtcgtgtggtgtctttatctgaataccgccagagcctacacacttacctgcgctccaagatgagccaagtagcccccagcctgtcagccctaattggggaagcggtaggtgcacgtctcatcgcacatgctggcagcctcaccaacctggccaagtatccagcatccacagtgcagatccttggggctgaaaaggccctgttcagagccctgaagacaaggggtaacactccaaaatatggactcattttccactccaccttcattggccgagcagctgccaagaacaaaggccgcatctcccgatacctggcaaacaaatgcagtattgcctcacgaatcgattgcttctctgaggtgcccacgagtgtattcggggagaagcttcgagaacaagttgaagagcgactgtccttctatgagactggagagataccacgaaagaatctggatgtcatgaaggaagcaatggttcaggcagaggcagaggaagcggctgctgagattactaggaagctggagaaacaggagaagaaacgcttaaagaaggaaaagaaacggctggctgcacttgccctcgcgtcttcagaaaacagcagtagtactccagaggagtgtgaggagacgagtgaaaaacccaaaaagaagaaaaagcaaaagccccaggaggttcctcaggagaatggaatggaagacccatctatctctttctccaaacccaagaaaaagaaatctttttccaaggaggagttgatgagtagcgatcttgaagagaccgctggcagcaccagtattcccaagaggaagaagtctacacccaaggaggaaacagttaatgaccctgaggaggcaggccacagaagtcggtccaagaaaaagaggaaattctccaaagaggagccggtcagcagtgggcctgaagaggcggttggcaagagcagctccaagaagaagaaaaagttccataaagcatcccaggaagattagaatgcaaatggacattctctgggaggtggggcataccatagcccaaggtgacatttcccaccctgtgcccgtgttcccaataaaaacaaattcacaagaaaaaaaaaaaaaaaaaaaaaattcctgaggccgcaagggaattc

SEQ ID NO: 106 - protein, 602 aa, Homo sapien
MAGRGAMVLLHVLFEHAVGYALVALKEVEEISLLQPQVEESVLNLGKFHSIVRLVAFCPFASSQVALENANAVSEGVVHEDLRLLLETHLPSKKKKVLLGVGDPKIGAAIQEELGYNCQTGGVIAEILRGVRLHFHNLVKGLTDLSACKAQLGLGHSYSRAKVKFNVNRVDNMIIQSISLLDQLDKDINTFSMRVREWYGYHFPELVKIINDNATYCRLAQFIGNRRELNEDKLEKLEELTMDGAKAKAILDASRSSMGMDISAIDLINIESFSSRVVSLSEYRQSLHTYLRSKMSQVAPSLSALIGEAVGARLIAHAGSLTNLAKYPASTVQILGAEKALFRALKTRGNTPKYGLIFHSTFIGRAAAKNKGRISRYLANKCSIASRIDCFSEVPTSVFGEKLREQVEERLSFYETGEIPRKNLDVMKEAMVQAEAEEAAAEITRKLEKQEKKRLKKEKKRLAALALASSENSSSTPEECEETSEKPKKKKKQKPQEVPQENGMEDPSISFSKPKKKKSFSKEELMSSDLEETAGSTSIPKRKKSTPKEETVNDPEEAGHRSRSKKKRKFSKEEPVSSGPEEAVGKSSSKKKKKFHKASQED

SEQ ID NO: 107 - DNA, 823 bp, Homo sapien
cgcagccgtgcgatgttgtcctctacagccatgtattcggctcctggcagagacttggggatggaaccgcacagagccgcgggccctttgcagctgcgattttcgccctacgttttcaacggaggtactatactggcaattgctggagaagattttgcaattgttgcttctgatactcgattgagtgaagggttttcaattcatacgcgggatagccccaaatgttacaaattaacagacaaaacagtcattggatgcagcggttttcatggagactgtcttacgctgacaaagattattgaagcaagactaaagatgtataagcattccaataataaggccatgactacgggggcaattgctgcaatgctgtctacaatcctgtattcaaggcgcttctttccatactatgtttacaacatcatcggtggacttgatgaagaaggaaagggggctgtatacagctttgatccagtagggtcttaccagagagactccttcaaggctggaggctcagcaagtgccatgctacagcccctgcttgacaaccaggttggttttaagaacatgcagaatgtggagcatgttccgctgtccttggacagagccatgcggctggtgaaagatgtcttcatttctgcggctgagagagatgtgtacactggggacgcactccggatctgcatagtgaccaaagagggcatcagggaggaaactgtttccttaaggaaggactgatctgtgtgctcttatcaccaatcagttcagacctggttgattttgtactttggaactgtaccttggatggttttgtttattaaaa

SEQ ID NO: 108 - protein, 241 aa, Homo sapien
MLSSTAMYSAPGRDLGMEPHRAAGPLQLRFSPYVFNGGTILAIAGEDFAIVASDTRLSEGFSIHTRDSPKCYKLTDKTVIGCSGFHGDCLTLTKIIEARLKMYKHSNNKAMTTGAIAAMLSTILYSRRFFPYYVYNIIGGLDEEGKGAVYSFDPVGSYQRDSFKAGGSASAMLQPLLDNQVGFKNMQNVEHVPLSLDRAMRLVKDVFISAAERDVYTGDALRICIVTKEGIREETVSLRKD

SEQ ID NO: 109 - DNA, 1883 bp, Homo sapien
atgcccgagaatgtggcaccccggagcggggcgactgccggggctgccggcggccgcgggaaaggcgcctatcaggaccgcgacaagccagcccagatccgcttcagcaacatttccgccgccaaagcggttgctgatgctattagaacaagccttggaccaaaaggaatggataaaatgattcaagatggaaaaggtgatgtaaccattacaaatgatggtgctaccattctgaaacaaatgcaagtattacatccagcagccagaatgctggtggagctgtctaaggctcaagatatagaagcaggagatggcaccacatcagtagtcatcattgctggctccctcttagattcttgtaccaagcttcttcagaaagggattcatccaaccatcatttctgagtcattccagaaggccctggaaaagggcattgaaatcttgactgacatgtctcgacctgtggaactgagtgacagagaaactttgttaaatagtgcaaccacttcactgaactcaaaggtggtttctcagtattcaagtctgctttctccaatgagtgtaaatgcagtgatgaaagtgattgacccagccacagccaccagtgtagatcttagagatattaaaatagttaagaagcttggtgggacaattgatgactgtgagttggtggaagggctggttctcacccaaaaagtgtcaaattctggcataaccagagttgaaaaggccaagattgggcttattcagttttgcttatctgctcccaaaacagacatggataatcaaatagtggtttctgactatgcccagatggaccgagtgctgcgagaagagagagcctatattttaaatttagtgaagcaaattaaaaaaacaggatgtaatgtccttctcatacagaaatctattctaagagatgctcttagtgatcttgcattacactttctgaataaaatgaagatcatggtgattaaggatattgaaagagaagacattgaattcatttgtaagacaattggaaccaagccagttgctcatattgaccaatttactgctgacatgctgggttctgctgagttagctgaggaggtcaatttaaatggttctggcaaactgctcaagattacaggctgtgccagccctggaaaaacagttacaattgttgttcgtggttctaacaaactggtgattgaagaagctgagcgctccattcatgatgccctatgtgttattcgttgtttagtgaagaagagggctcttattgcaggaggtggtgctccagaaatagagttggccctagcattaactgaatattcacgaacactgagtggtatggaatcctactgcgttcgtgcttttgcagatgctatggaggtcattccatctacactagctgaaaatgccggcctgaatcccatttctacagtaacagaactaagaaaccggcatgcccagggagaaaaaactgcaggcattaatgtccgaaagggtggtatttccaacattttggaggaactggttgtccagcctctgttggtatcagtcagtgctctgactcttgcaactgaaactgttcggagcattctgaaaatagatgatgtggtaaacactcgataatctggataactgactagcaccattatgatcaccagtattgtggctggaatggaagaagatcaccttggtgttccttgtttggaagattatttcctctgaatttctgggcttggtcttccagttggcatttgcctgaagttgtattgaaacaatttaatgaaaatattaaatatttggtttcaaaaggcagatttatcttctcccaacattctgttatttctgatacttttgaaaaactaataaaaactaataaaagaagcgta

SEQ ID NO: 110 - protein, 539 aa, Homo sapien
MPENVAPRSGATAGAAGGRGKGAYQDRDKPAQIRFSNISAAKAVADAIRTSLGPKGMDKMIQDGKGDVTITNDGATILKQMQVLHPAARMLVELSKAQDIEAGDGTTSVVIIAGSLLDSCTKLLQKGIHPTIISESFQKALEKGIEILTDMSRPVELSDRETLLNSATTSLNSKVVSQYSSLLSPMSVNAVMKVIDPATATSVDLRDIKIVKKLGGTIDDCELVEGLVLTQKVSNSGITRVEKAKIGLIQFCLSAPKTDMDNQIVVSDYAQMDRVLREERAYILNLVKQIKKTGCNVLLIQKSILRDALSDLALHFLNKMKIMVIKDIEREDIEFICKTIGTKPVAHIDQFTADMLGSAELAEEVNLNGSGKLLKITGCASPGKTVTIVVRGSNKLVIEEAERSIHDALCVIRCLVKKRALIAGGGAPEIELALALTEYSRTLSGMESYCVRAFADAMEVIPSTLAENAGLNPISTVTELRNRHAQGEKTAGINVRKGGISNILEELVVQPLLVSVSALTLATETVRSILKIDDVVNTR

SEQ ID NO: 111 - DNA, 2518 bp, Homo sapien
ctgcggcgcgccgggcggaactttctagaacgctcggtgagaggcggaggagcggtaactaccccggctgcgcacagctcggcgctccttcccgctccctcacacaccggcctcagcccgcaccggcagtagaagatggtgaaagaaacaacttactacgatgttttgggggtcaaacccaatgctactcaggaagaattgaaaaaggcttataggaaactggctttgaagtaccatcctgataagaacccaaatgaaggagagaagtttaaacagatttctcaagcttacgaagttctctctgatgcaaagaaaagggaattatatgacaaaggaggagaacaggcaattaaagagggtggagcaggtggcggttttggctcccccatggacatctttgatatgttttttggaggaggaggaaggatgcagagagaaaggagaggtaaaaatgttgtacatcagctctcagtaaccctagaagacttatataatggtgcaacaagaaaactggctctgcaaaagaatgtgatttgtgacaaatgtgaaggtagaggaggtaagaaaggagcagtagagtgctgtcccaattgccgaggtactggaatgcaaataagaattcatcagataggacctggaatggttcagcaaattcagtctgtgtgcatggagtgccagggccatggggagcggatcagtcctaaagatagatgtaaaagctgcaacggaaggaagatagttcgagagaagaaaattttagaagttcatattgacaaaggcatgaaagatggccagaagataacattccatggtgaaggagaccaagaaccaggactggagccaggcgatattatcattgtgttagatcagaaggaccatgctgtttttactcgacgaggagaagaccttttcatgtgtatggacatacagctcgttgaagcactgtgtggcttccagaagccaatatctactcttgacaaccgaaccatcgtcatcacctctcatccaggtcagattgtcaagcatggagatatcaagtgtgtactaaatgaaggcatgccaatttatcgtagaccatatgaaaagggtcgcctaatcatcgaatttaaggtaaactttcctgagaatggctttctctctcctgataaactgtctttgctggaaaaactcctacccgagaggaaggaagtggaagagactgatgagatggaccaagtagaactggtggactttgatccaaatcaggaaagacggcgccactacaatggagaagcatatgaggatgatgaacatcatcccagaggtggtgttcagtgtcagacctcttaatgggccagtgaataacactcactgctggcatttaatgtgcagtagtgaatgagtgaaggactgtaatcataatatgctcactacttgctcttgtttttgttttaataaactatagtagtgttttaaaaagttaaatgaagaataaacgcaaatataaaagctctgattttgccctgtatgtatgatgacttcagtgtgcaagatgaagtttaatacctgtaaaaactacaaagaagttcccctagcatttctaggccaaaccttgtaattgacttcagctatgtacgtggacaagcttagactgaaatgctaggtatatgtattggcttcagtgtatgacccttcattgttaagctatgaaagtaaaactctgtatttaactggcaatgaggaaaaaaaaattttgtagagaagtgttggtctgtatagttctttatattaagtgggattcattgtaatgcctctgcatttattctgttgcctcagctgttacttgaagatggcgtaatatataatttatcctgtggtatcagtgataaaaatgatacctttctgtaggaggggtttatcataatatgctgcttcttgaaggcttgcacttccagaattgtgtttccttctgctgtgccattcatatatatatacatatatatatataatcttgaccagtcctggtcatttgctcccctccttgtctgtggaccatgataagcccaagtagtgacttcagagctgggtaacagaaattaaagtgaaaagacctttacgtggagaatttgcatgcgtaatataggaaggtgttctttaggtatgttacaggattactttaaaccatttgactttcgctccaaagttatgttggtagtatagcaaattatgatgaatagctttaattgtatgtttaaaagtctcatatgttcacatgcttaaatctgggtatcagaatttaagcaattcttgaaatgtattgtctccttaatatactaattacaaagcatctccaatgtgtgtcactacaggcttttttttcccagatcatcaaattttggcttttaactaagatacatagctttattttagctagtctgaatgagtgatacaaaaatactattgaactatagttaaataatattaaataggatggagagtaaaagtggaggactgggtaatgagccaagaagaaggggtg

SEQ ID NO: 112 - protein, 397 aa, Homo sapien
MVKETTYYDVLGVKPNATQEELKKAYRKLALKYHPDKNPNEGEKFKQISQAYEVLSDAKKRELYDKGGEQAIKEGGAGGGFGSPMDIFDMFFGGGGRMQRERRGKNVVHQLSVTLEDLYNGATRKLALQKNVICDKCEGRGGKKGAVECCPNCRGTGMQIRIHQIGPGMVQQIQSVCMECQGHGERISPKDRCKSCNGRKIVREKKILEVHIDKGMKDGQKITFHGEGDQEPGLEPGDIIIVLDQKDHAVFTRRGEDLFMCMDIQLVEALCGFQKPISTLDNRTIVITSHPGQIVKHGDIKCVLNEGMPIYRRPYEKGRLIIEFKVNFPENGFLSPDKLSLLEKLLPERKEVEETDEMDQVELVDFDPNQERRRHYNGEAYEDDEHHPRGGVQCQTS

SEQ ID NO: 113 - DNA, 1438 bp, Homo sapien
cggtaactaccccggctgcgcacagctcggcgctccttcccgctccctcacacaccgcctcagcccgcaccggcagtagaagatggtgaaagaaacaacttactacgatgttttgggggtcaaacccaatgctactcaggaagaattgaaaaaggcttataggaaactggccttgaagtaccatcctgataagaacccaaatgaaggagagaagtttaaacagatttctcaagcttacgaagttctctctgatgcaaagaaaagggaattatatgacaaaggaggagaacaggcaattaaagagggtggagcaggtggcggttttggctcccccatggacatctttgatatgttttttggaggaggaggaaggatgcagagagaaaggagaggtaaaaatgttgtacatcagctctcagtaaccctagaagacttatataatggtgcaacaagaaaactggctctgcaaaagaatgtgatttgtgacaaatgtgaaggtagaggaggtaagaaaggagcagtagagtgctgtcccaattgccgaggtactggaatgcaaataagaattcatcagataggacctggaatggttcagcaaattcagtctgtgtgcatggagtgccagggccatggggagcggatcagtcctaaagatagatgtaaaagctgcaacggaaggaagatagttcgagagaagaaaattttagaagttcatattgacaaaggcatgaaagatggccagaagataacattccatggtgaaggagaccaagaaccaggactggagccaggcgatattatcattgtgttagatcagaaggaccatgctgtttttactcgacgaggagaagaccttttcatgtgtatggacatacagctcgttgaagcactgtgtggcttccagaagccaatatctactcttgacaaccgaaccatcgtcatcacctctcatccaggtcagattgtcaagcatggagatatcaagtgtgtactaaatgaaggcatgccaatttatcgtagaccatatgaaaagggtcgcctaatcatcgaatttaaggtaaactttcctgagaatggctttctctctcctgataaactgtctttgctggaaaaactcctacccgagaggaaggaagtggaagagactgatgagatggaccaagtagaactggtggactttgatccaaatcaggaaagacggcgccactacaatggagaagcatatgaggatgatgaacatcatcccagaggtggtgttcagtgtcagacctcttaatggccagtgaataacactcactgctggcatttaatgtgcagtagtgaatgagtgaaggactgtaatcataatatgctcactacttgctcttgtttttgttttaataaactatagtagtgttataaaaagttaaatgaagaataaacgcaaatataaaagctc

SEQ ID NO: 114 - protein, 397 aa, Homo sapien; identical to SEQ ID NO: 112

SEQ ID NO: 115 - DNA, 1709 bp, Homo sapien
gggcggggtgccgcatccccagcccgccgccatggccgcctacaaactggtgctgatccggcacggcgagagcgcatggaacctggagaaccgcttcagcggctggtacgacgccgacctgagcccggcgggccacgaggaggcgaagcgcggcgggcaggcgctacgagatgctggctatgagtttgacatctgcttcacctcagtgcagaagagagcgatccggaccctctggacagtgctagatgccattgatcagatgtggctgccagtggtgaggacttggcgcctcaatgagcggcactatgggggtctaaccggtctcaataaagcagaaactgctgcaaagcatggtgaggcccaggtgaagatctggaggcgctcctatgatgtcccaccacctccgatggagcccgaccatcctttctacagcaacatcagtaaggatcgcaggtatgcagacctcacagaagatcagctaccctcctgtgagagtctgaaggatactattgccagagctctgcccttctggaatgaagaaatagttccccagatcaaggaggggaaacgtgtactgattgcagcccatggcaacagcctccggggcattgtcaagcatctggagggtctctctgaagaggctatcatggagctgaacctgccgactggtattcccattgtctatgaattggacaagaacttgaagcctatcaagcccatgcagtttctgggggatgaagagacggtgcgcaaagccatggaagctgtggctgcccagggcaaggccaagaagtgaaggccggcggggaggatactgtccccaggagcaccctccctgcccgtcttgtccctctgcccctcccacctgcacatgtcacactgaccacatctgtagacatcttgagttgtagctgcagacggggaccagtggctcccattttcattttagccattttgtcgcctgcacccactcccttcatacaatctagtcagaatagcagttctagagcacaggttctcagtctaagctatggaaaagctccccttatccaacagagtttaaaagtagtgacttgggtttttgcgagtgctttgtttactaaggactttggggaggaaccatgctaagccatgaccagtgaggagaagcaacagagcctgtctgtccccatgagcggagtctgtcctctgctcttctgcagtcaggtcactgcctactgcctgggggctctagtcattccagtggaagacgaatgtaacctgcgtggtgatgtgacaactgtttcctccctgaccccagaggatctggctctaggttgggatcaatcctgaatttcgttatgtgttaatttacttttattaaaaaagtatagtatatataatacaaaacaataacccttctggggtttcttgtggcggttgaaatagtcccacatgtggtcatcagaaatagcattcctcataccaatataggatcagctccttgacctctgaggggtcaggagtgcttcctggtgtgtgtattagaatcccttcctgccttgtttcatggcagtgaaatgcctcttggtcctgtccagtgtatctttcactgatttctgaatcatgttctagttgcttgaccctgccacatgggtccagtgttcatctgagcataactgtactaaatcctttttccatatcagtataataaaggagtgatgtgcaat

SEQ ID NO: 116 - protein, 254 aa, Homo sapien
MAAYKLVLIRHGESAWNLENRFSGWYDADLSPAGHEEAKRGGQALRDAGYEFDICFTSVQKRAIRTLWTVLDAIDQMWLPVVRTWRLNERHYGGLTGLNKAETAAKHGEAQVKIWRRSYDVPPPPMEPDHPFYSNISKDRRYADLTEDQLPSCESLKDTIARALPFWNEEIVPQIKEGKRVLIAAHGNSLRGIVKHLEGLSEEAIMELNLPTGIPIVYELDKNLKPIKPMQFLGDEETVRKAMEAVAAQGKAKK

SEQ ID NO: 117 - DNA, 1972 bp, Homo sapien
gaattcggcacgagggcgaccggcgcgtcgtgcggggctgcggcggagcctccttaaggaaggtgcaagaggttggcagcttcgattgaagcacatcgaccggcgacagcagccaggagtcatgagcgacagcggcgagcagaactacggcgagcgggaatcccgttctgcttccagaagtggaagtgctcacggatcggggaaatctgcaaggcatacccctgcaaggtctcgctccaaggaagattccaggcgttccagatcaaagtccaggtcccgatctgaatctaggtctagatccagaagaagctcccgaaggcattatacccggtcacggtctcgctcccgctcccatagacgatcacgtagcaggtcttacagtcgagattatcgtagacggcacagccacagccattctcccatgtctactcgcaggcgtcatgttgggaatcgggcaaatcctgatcctaactgttgtcttggagtatttgggctgagcttgtacaccacagaaagagatctaagagaagtgttctctaaatatggtcccattgccgatgtgtctattgtatatgaccagcagtctaggcgttcaagaggatttgcctttgtatattttgaaaatgtagatgatgccaaggaagctaaagaacgtgccaatggaatggagcttgatgggcgtaggatcagagttgatttctctataacaaaaagaccacatacgccaacaccaggaatttacatggggagacctacctatggcagctctcgccgtcgggattactatgacagaggatatgatcggggctatgatgatcgggactactatagcagatcatacagaggaggaggtggaggaggaggaggatggagagctgcccaagacagggatcagatttatagaaggcggtcaccttctccttactatagtcgtggaggatacagatcacgttccagatctcgatcatactcacctcgtcgctattaaagcatgaagactttctgaaacctgccctagagctgggatattgtttgtgggcaatattttttattgtctcttgtttaaaaagtgaacagtgcctagtgaagttaggtgacttttacaccttttacgatgactacttttggtggagttgaaatgctgttttcattctgcatttgtgtagtttggtgctttgttccaagttaagtgttttcagaaaagtatgttttgcatgtatttttttacagtctaaattttgactgctgagaagtttctattgtacaaaacttcatttaaaaggtttttctactgaatccagggtattctgaagatcgaagcctgtgtaaaatgctaccaaatggcaaaaagcaacaataaacagtttgatttttacttttctttctaacatatcaatgcttagcagaactattcagattgtcagtagtaaatttaaagacaaatgcccgttttcctccagtccatgaaacataccatacttatatacctgcaactaagtgtttaaaattatgctctgtaactctgtactgctagtattagaactaaaaatcttaaaatacagccagtgcttaatgcttatatcaatgtggatttgtcggcttttatgtaatctgtaatatgtatagcaggaaatacgaagagttacacagtgtatgccttaaaaggctgtttcttaaaggtgttacaaggggataatggtatttcaactagttatcagcaagtgacaatacattccaccacaaatacactcttgttcttctagcttttagactatatgaaaaaaccgggtgcttcaaagtacatgataagggaacactatacctgtcatggatgaactgaagactttgcctgttcattttttaaatattattttcaggtcctttgcttaccaaaggaggcccaatttcactcaaatgttttgagaactgtgtttaaataaacgcaaatgaaaagaaaaaaaaaaaaaaaaaa

SEQ ID NO: 118 - protein, 288 aa, Homo sapien
MSDSGEQNYGERESRSASRSGSAHGSGKSARHTPARSRSKEDSRRSRSKSRSRSESRSRSRRSSRRHYTRSRSRSRSHRRSRSRSYSRDYRRRHSHSHSPMSTRRRHVGNRANPDPNCCLGVFGLSLYTTERDLREVFSKYGPIADVSIVYDQQSRRSRGFAFVYFENVDDAKEAKERANGMELDGRRIRVDFSITKRPHTPTPGIYMGRPTYGSSRRRDYYDRGYDRGYDDRDYYSRSYRGGGGGGGGWRAAQDRDQIYRRRSPSPYYSRGGYRSRSRSRSYSPRRY

SEQ ID NO: 119 - DNA, 1692 bp, Homo sapien
atacacgtgccatgtgcagcatgaggggctacccgagcccgtcaccctgagatggaagccggcttcccagcccaccatccccatcgtgggcatcattgctggcctggttctccttggatctgtggtctctggagctgtggttgctgctgtgatatggaggaagaagagctcaggtggaaaaggagggagctactctaaggctgagtggagcgacagtgcccaggggtctgagtctcacagcttgtaaagcctgagacagctgccttgtgtgcgactgagatgcacagctgccttgtgtgcgactgagatgcaggatttcctcacgcctcccctatgtgtcttaggggactctggcttctctttttgcaagggcctctgaatctgtctgtgtccctgttagcacaatgtgaggaggtagagaaacagtccacctctgtgtctaccatgacccccttcctcacactgacctgtgttccttccctgttctcttttctattaaaaataagaacctgggcagagtgcggcagctcatgcctgtaatcccagcacttagggaggccgaggagggcagatcacgaggtcaggagatcgaaaccatcctggctaacacggtgaaaccccgtctctactaaaaaatacaaaaaattagctgggcgcagaggcacgggcctgtagtcccagctactcaggaggcggaggcaggagaatggcgtcaacccgggaggcggaggttgcagtgagccaggattgtgcgactgcactccagcctgggtgacagggtgaaacgccatctcaaaaaataaaaattaaaaaataaaaaaagaacctggatctcaatttaatttttcatattcttgcaatgaaatggacttgaggaagctaagatcatagctagaaatacagataattccacagcacatctctagcaaatttagcctattcctattctctagcctattccttaccacctgtaatcttgaccatataccttggagttgaatattgttttcatactgctgtggtttgaatgttccctccaacactcatgttgagacttaatccctaatgtggcaatactgaaaggtggggcctttgagatgtgattggatcgtaaggctgtgccttcattcatgggttaatggattaatgggttatcacaggaatgggactggtggctttataagaagaggaaaagagaactgagctagcatgcccaacccacagagagcctccactagagtgatgctaagtggaaatgtgaggtgcagctgccacagagggcccccaccagggaaatgtctagtgtctagtggatccaggccacaggagagagtgccttgtggagcgctgggagcaggacctgaccaccaccaggaccccagaactgtggagtcagtggcagcatgcagcgcccccttgggaaagctttaggcaccagcctgcaacccattcgagcagccacgtaggctcgacccagcaaagccacaggcacggggctacctgaggccttgggggccaatccctgctccagtgtgtccgtgaggcagcacacgaagtcaaaagagattatctcttcccacagataccttttctctcccatgaccctttaacagcatctgcttcattcccctcaccttcccaggctgatctgaggtaaactttgaagtaaaataaaagctgtgtttgagcatc

SEQ ID NO: 120 - DNA, 1901 bp, Homo sapien
atggggcatcggccggtgctcgtgctcagccagaacacaaagcgtgaatccggaagaaaagttcaatctggaaacatcaatgctgccaagactattgcagatatcatccgaacatgtttgggacccaagtccatgatgaagatgcttttggacccaatgggaggcattgtgatgaccaatgatggcaatgccattcttcgagagattcaagtccagcatccagcggccaagtccatgatcgaaattagccggacccaggatgaagaagttggagatgggaccacatcagtaattattcttgcaggggaaatgctgtctgtagctgagcacttcctggagcagcagatgcacccaacagtggtgatcagtgcttaccgcaaggcattggatgatatgatcagcaccctaaagaaaataagtatcccagtcgacatcagtgacagtgatatgatgctgaacatcatcaacagctctattactaccaaagccatcagccggtggtcatctttggcttgcaacattgccctggatgctgtcaagatggtacagtttgaggagaatggtcggaaagagattgacataaaaaaatatgcaagagtggaaaagatacctggaggcatcattgaagactcctgtgtcttgcgtggagtcatgattaacaaggatgtgacccatccacgtatgcggcgctatatcaagaaccctcgcattgtgctgctggattcttctctggaatacaagaaaggaggaagccagactgacattgagattacacgagaggaggacttcacccgaattctccagatggaggaagagtacatccagcagctctgtgaggacattatccaactgaagcccgatgtggtcatcactgaaaagggcatctcagatttagctcagcactaccttatgcgggccaatatcacagccatccgcagagtccggaagacagacaataatcgcattgctagagcctgtggggcccggatagtcagccgaccagaggaactgagagaagatgatgttggaacaggagcaggcctgttggaaatcaagaaaattggagatgaatactttactttcatcactgactgcaaagaccccaaggcctgcaccattctcctccggggggctagcaaagagattctctcggaagtagaacgcaacctccaggatgccatgcaagtgtgtcgcaatgttctcctggaccctcagctggtgccagggggtggggcctccgagatggctgtcgcccatgccttgacagaaaaatccaaggccatgactggtgtggaacaatggccatacagggctgttgcccaggccctagaggtcattcctcgtaccctgatccagaactgtggggccagcaccatccgtctacttacctcccttcgggccaagcacacccaggagaactgtgagacctggggtgtaaatggtgagacgggtactttggtggacatgaaggaactgggcatatgggagccattggctgtgaagctgcagacttataagacagcagtggagacggcagttctgctactgcgaattgatgacatcgtttcaggccacaaaaagaaaggcgatgaccagagccggcaaggcggggctcctgatgctggccaggagtgagtgctaggcaaggctacttcaatgcacagaaccagcagagtctccccttttcctgagccagagtgccaggaacactgtggacgtctttgttcagaagggatcaggttggggggcagcccccagtccctttctgtcccagctcagttttccaaaagacactgacatgtaattcttctctattgtaaggtttccatttagtttgcttccgatgattaaatctaagtcatttgaaaaaaaaaaaaaaaaaaaaaaaaaaaaaaaaaaaa

SEQ ID NO: 121 - protein, 544 aa, Homo sapien
MGHRPVLVLSQNTKRESGRKVQSGNINAAKTIADIIRTCLGPKSMMKMLLDPMGGIVMTNDGNAILREIQVQHPAAKSMIEISRTQDEEVGDGTTSVIILAGEMLSVAEHFLEQQMHPTVVISAYRKALDDMISTLKKISIPVDISDSDMMLNIINSSITTKAISRWSSLACNIALDAVKMVQFEENGRKEIDIKKYARVEKIPGGIIEDSCVLRGVMINKDVTHPRMRRYIKNPRIVLLDSSLEYKKGGSQTDIEITREEDFTRILQMEEEYIQQLCEDIIQLKPDVVITEKGISDLAQHYLMRANITAIRRVRKTDNNRIARACGARIVSRPEELREDDVGTGAGLLEIKKIGDEYFTFITDCKDPKACTILLRGASKEILSEVERNLQDAMQVCRNVLLDPQLVPGGGASEMAVAHALTEKSKAMTGVEQWPYRAVAQALEVIPRTLIQNCGASTIRLLTSLRAKHTQENCETWGVNGETGTLVDMKELGIWEPLAVKLQTYKTAVETAVLLLRIDDIVSGHKKKGDDQSRQGGAPDAGQE

SEQ ID NO: 122 - DNA, 2188 bp, Homo sapien
ggcacgaggaccgaccgcattgcggcttggttttctcacccagtgcatgtggcaggagcggtgagatcactgcctcacggcgatcctggactgacggtcacgactgcctaccctctaaccctgttctgagctgccccttgcccacacaccccaaacctgtgtgcaggatccgcctccatggagctacagcctcctgaagcctcgatcgccgtcgtgtcgattccgcgccagttgcctggctcacattcggaggctggtgtccagggtctcagcgcgggggacgactcagagttggggtctcactgtgttgcccagactggtctcgaactcttggcctcaggtgatcctcttccctcagcttcccagaatgccgagatgatagagacggggtctgactgtgttacccaggctggtcttcaactcttggcctcaagtgatcctcctgccttagcttccaagaatgctgaggttacaggcaccatgagccaggacaccgaggtggatatgaaggaggtggagctgaatgagttagagcccgagaagcagccgatgaacgcggcgtctggggcggccatgtccctggcgggagccgagaagaatggtctggtgaagatcaaggtggcggaagacgaggcggaggcggcagccgcggctaagttcacgggcctgtccaaggaggagctgctgaaggtggcaggcagccccggctgggtacgcacccgctgggcactgctgctgctcttctggctcggctggctcggcatgcttgctggtgccgtggtcataatcgtgcgagcgccgcgttgtcgcgagctaccggcgcagaagtggtggcacacgggcgccctctaccgcatcggcgaccttcaggccttccagggccacggcgcgggcaacctggcgggtctgaaggggcgtctcgattacctgagctctctgaaggtgaagggccttgtgctgggtccaattcacaagaaccagaaggatgatgtcgctcagactgacttgctgcagatcgaccccaattttggctccaaggaagattttgacagtctcttgcaatcggctaaaaaaaagagcatccgtgtcattctggaccttactcccaactaccggggtgagaactcgtggttctccactcaggttgacactgtggccaccaaggtgaaggatgctctggagttttggctgcaagctggcgtggatgggttccaggttcgggacatagagaatctgaaggatgcatcctcattcttggctgagtggcaaaatatcaccaagggcttcagtgaagacaggctcttgattgcggggactaactcctccgaccttcagcagatcctgagcctactcgaatccaacaaagacttgctgttgactagctcatacctgtctgattctggttctactggggagcatacaaaatccctagtcacacagtatttgaatgccactggcaatcgctggtgcagctggagtttgtctcaggcaaggctcctgacttccttcttgccggctcaacttctccgactctaccagctgatgctcttcaccctgccagggacccctgttttcagctacggggatgagattggcctggatgcagctgcccttcctggacagcctatggaggctccagtcatgctgtgggatgagtccagcttccctgacatcccaggggctgtaagtgccaacatgactgtgaagggccagagtgaagaccctggctccctcctttccttgttccggcggctgagtgaccagcggagtaaggagcgctccctactgcatggggacttccacgcgttctccgctgggcctggactcttctcctatatccgccactgggaccagaatgagcgttttctggtagtgcttaactttggggatgtgggcctctcggctggactgcaggcctccgacctgcctgccagcgccagcctgccagccaaggctgacctcctgctcagcacccagccaggccgtgaggagggctcccctcttgagctggaacgcctgaaactggagcctcacgaagggctgctgctccgcttcccctacgcggcctgacttcagcctgacatggacccactacccttctcctttccttcccaggccctttggcttctgatttttctcttttttaaaaacaaacaaacaaactgttgcaaaaaaaaaaaaaaaaaaa

SEQ ID NO: 123 - protein, 529 aa, Homo sapien
MSQDTEVDMKEVELNELEPEKQPMNAASGAAMSLAGAEKNGLVKIKVAEDEAEAAAAAKFTGLSKEELLKVAGSPGWVRTRWALLLLFWLGWLGMLAGAVVIIVRAPRCRELPAQKWWHTGALYRIGDLQAFQGHGAGNLAGLKGRLDYLSSLKVKGLVLGPIHKNQKDDVAQTDLLQIDPNFGSKEDFDSLLQSAKKKSIRVILDLTPNYRGENSWFSTQVDTVATKVKDALEFWLQAGVDGFQVRDIENLKDASSFLAEWQNITKGFSEDRLLIAGTNSSDLQQILSLLESNKDLLLTSSYLSDSGSTGEHTKSLVTQYLNATGNRWCSWSLSQARLLTSFLPAQLLRLYQLMLFTLPGTPVFSYGDEIGLDAAALPGQPMEAPVMLWDESSFPDIPGAVSANMTVKGQSEDPGSLLSLFRRLSDQRSKERSLLHGDFHAFSAGPGLFSYIRHWDQNERFLVVLNFGDVGLSAGLQASDLPASASLPAKADLLLSTQPGREEGSPLELERLKLEPHEGLLLRFPYAA

SEQ ID NO: 124 - DNA, 1396 bp, Homo sapien
ggcacgaggccccggttccggcgcggttgaggccttcggtggtgaacgagtctccagcaccatgtctggtttgtctggcccaccagcccggcgcggcccttttccgttagcgttgctgcttttgttcctgctcggccccagattggtccttgccatctccttccatctgcccattaactctcgcaagtgcctccgtgaggagattcacaaggacctgctagtgactggcgcgtacgagatctccgaccagtctgggggcgctggcggcctgcgcagccacctcaagatcacagattctgctggccatattctctactccaaagaggatgcaaccaaggggaaatttgcctttaccactgaagattatgacatgtttgaagtgtgttttgagagcaagggaacagggcggatacctgaccaactcgtgatcctagacatgaagcatggagtggaggcgaaaaattacgaagagattgcaaaagttgagaagctcaaaccattagaggtagagctgcgacgcctagaagacctttcagaatctattgttaatgattttgcctacatgaagaagagagaagaggagatgcgtgataccaacgagtcaacaaacactcgggtcctatacttcagcatcttttcaatgttctgtctcattggactagctacctggcaggtcttctacctgcgacgcttcttcaaggccaagaaattgattgagtaatgaatgaggcatattctcctcccaccttgtacctcagccagcagaacatcgctgggacgtgcctggcctaaggcatcctaccaacagcaccatcaaggcacgttggagctttcttgccagaactgatctcttttggtgtgggaggacatggggtaccacctacacccaacaagtcaatgagggacttctttttaatttggtaggattttgactggttttgcaacaataggtctattattagagtcacctatgacaaaaaataggggttacctagataatgccaaagtcagcatttgtcctgggttcccttgtgtgatctgtttggactatgttttcttttcttctcccacttgctcagcagcttgggcttccattctagttcttttaccaagatttttgtgtgaccatgttgacttcatttggattgccctctttcaatttccttgtgaaaacacccttaactttctctttacccttagctgaaatgtttacatagcttctggtgatatcttttcatgattttatatctcttaaaatggtgatggatgtgacacctcataaaagtgagctttgaactgtagataactcttaaagaaaatgtcattttagacaattaaaatatttgtgctcaactgcttgaaaaaaaaaaaaaaaaaaaaaaaaaaaaaaaaaaaa

SEQ ID NO: 125 - protein, 219 aa, Homo sapien
MSGLSGPPARRGPFPLALLLLFLLGPRLVLAISFHLPINSRKCLREEIHKDLLVTGAYEISDQSGGAGGLRSHLKITDSAGHILYSKEDATKGKFAFTTEDYDMFEVCFESKGTGRIPDQLVILDMKHGVEAKNYEEIAKVEKLKPLEVELRRLEDLSESIVNDFAYMKKREEEMRDTNESTNTRVLYFSIFSMFCLIGLATWQVFYLRRFFKAKKLIE

SEQ ID NO: 126 - DNA, 6480 bp, Homo sapien
agagcgagcaggggagagcgagaccagttttaaggggaggaccggtgcgagtgaggcagccccgaggctctgctcgcccaccacccaatcctcgcctcccttctgctccaccttctctctctgccctcacctctcccccgaaaaccccctatttagccaaaggaaggaggtcaggggaacgctctcccctccccttccaaaaaacaaaaacagaaaaacccttttccaggccggggaaagcaggagggagaggggccgccgggctggccatggagctgctgtgccacgaggtggacccggtccgcagggccgtgcgggaccgcaacctgctccgagacgaccgcgtcctgcagaacctgctcaccatcgaggagcgctaccttccgcagtgctcctacttcaagtgcgtgcagaaggacatccaaccctacatgcgcagaatggtggccacctggatgctggaggtctgtgaggaacagaagtgcgaagaagaggtcttccctctggccatgaattacctggaccgtttcttggctggggtcccgactccgaagtcccatctgcaactcctgggtgctgtctgcatgttcctggcctccaaactcaaagagaccagcccgctgaccgcggagaagctgtgcatttacaccgacaactccatcaagcctcaggagctgctggagtgggaactggtggtgctggggaagttgaagtggaacctggcagctgtcactcctcatgacttcattgagcacatcttgcgcaagctgccccagcagcgggagaagctgtctctgatccgcaagcatgctcagaccttcattgctctgtgtgccaccgactttaagtttgccatgtacccaccgtcgatgatcgcaactggaagtgtgggagcagccatctgtgggctccagcaggatgaggaagtgagctcgctcacttgtgatgccctgactgagctgctggctaagatcaccaacacagacgtggattgtctcaaagcttgccaggagcagattgaggcggtgctcctcaatagcctgcagcagtaccgtcaggaccaacgtgacggatccaagtcggaggatgaactggaccaagccagcacccctacagacgtgcgggatatcgacctgtgaggatgccagttgggccgaaagagagagacgcgtccataatctggtctcttcttctttctggttgtttttgttctttgtgttttagggtgaaacttaaaaaaaaaattctgcccccacctagatcatatttaaagatcttttagaagtgagagaaaaaggtcctacgaaaacggaataataaaaagcatttggtgcctatttgaagtacagcataagggaatcccttgtatatgcgaacagttattgtttgattatgtaaaagtaatagtaaaatgcttacaggaaaacctgcagagtagttagagaatatgtatgcctgcaatatgggaacaaattagaggagacttttttttttcatgttatgagctagcacatacacccccttgtagtataatttcaaggaactgtgtacgccatttatggcatgattagattgcaaagcaatgaactcaagaaggaattgaaataaggagggacatgatggggaaggagtacaaaacaatctctcaacatgattgaaccatttgggatggagaagcacctttgctctcagccacctgttactaagtcaggagtgtagttggatctctacattaatgtcctcttgctgtctacagtagctgctacctaaaaaaagatgttttattttgccagttggacacaggtgattggctcctgggtttcatgttctgtgacatcctgcttcttcttccaaatgcagttcattgcagacaccaccatattgctatctaatggggaaatgtagctatgggccataaccaaaactcacatgaaacggaggcagatggagaccaagggtgggatccagaatggagtcttttctgttattgtatttaaaagggtaatgtggccttggcatttcttcttagaaaaaaactaatttttggtgctgattggcatgtctggttcacagtttagcattgttataaaccattccattcgaaaagcactttgaaaaattgttcccgagcgatagatgggatggtttatgcaagtcatgctgaatactcctcccctcttctcttttgccccctcccttcctgcccccagtctgggttactcttcgcttctggtatctggcgttctttggtacacagttctggtgttcctaccaggactcaagagacaccccttcctgctgacattcccatcacaacattcctcagacaagcctgtaaactaaaatctgttaccattctgatggcacagaaggatcttaattcccatctctatacttctcctttggacatggaaagaaaagttattgctggtgcaaagatagatggctgaacatcagggtgtggcattttgttcccttttccgttttttttttttttattgttgttgttaattttattgcaaagttgtattcagcgtacttgaatttttcttcctctccacttcttagaggcattcagttagcaaagaggttggagcaacaacttttttttttttttttgcacaattgtaattgacaggtaatgaagctatttgttaaaatatttgcctttttaagtaaaaaagaaaaatcagaacagggctatttgaagaattattttatacacagattctgccttgtttcatagtatgagggttgaagacggaaaacaatctaagggtctctcatttttttaattttgttttgttcagtttggtttttttttttttttgcgctgctaagaagctaaagtcatccatccttattcacgttgacagtacctagctgtaatgtttcacagagtgtgctgctattttataaacatttttataatatattattttactgcttaaattccaagtcctgaagtagatggttgagatatgagttcttcgtactggaaaagcccttccgtagtttgttttcttctggtagcatattcatggttgtttttttttttcttttttggttttttggttttttttttttcctctgatcacattcttcaaagacggagtattctttacctcaggtttactggacaaaatcaataactacaaaaggcaatgattcacgcttttgttttcataatacctcacaaccgtacagtttctgcttgggagcccattcgcatgaggaatacagaagcagtgtgagcagggctgactccctctcaggtggaaggcagggcggtctcactcccagggacctttttggtcatggaggccatcgggctcccagttagaccctggtatcctcatcatgatggaaaaaatacattgaaccaagggatcctccctccccttcaaggcagacgttcagtacaaacatttatgcggtaggctcagatgtcgtaatttgcacttaggtaccaggtgtcaggaaacagactaaaaagaattccaccaggctgtttggagatcctcatcttggagctttttcaaaagcggggcttcatctgcaaagggccctttcatcttgaagtttttcccctccgtctttcccctcccctggcatggacaccttgtgtttaggatcatctctgcaggtttcctaggtctgaatctgcgagtagatgaacctgcagcaagcagcgtttatggtgcttccttctccctcctctgtctcaaactgcgcaggcaagcactatgcaagcccaggccctctgctgagcggtactaaacggtcgggttttcaatcacactgaattggcaggataagaaaaataggtcagataagtatgggatgatagttgaagggaggtgaagaggctgcttctctacagaggtgaaattccagatgagtcagtctcttgggaagtgtgtttagaagggttcaggactttgtgagttagcatgaccctaaaattctaggggatttctggtgggacaatgggtggtgaattttgaagttttggagagggaagtggagcagccagcaagtaagctagccagagttttctcaagagccagctttgctcagcacactctcctgggccccaaggagtcccacggaatggggaaagtgggaaccctggagttcttgggaatcttggagcctaaagagaaaccgaggtgcaaattcatttcatggtgactgacccttgagcttaaacagaagcagcaaatgaaagaaccggacaaataaggaagggcacaagcctacccgactctatttacagtctgtaactttccactcttcctgtagtcccgaggcccctgggtccttctagcttttctctttcccatccttggggccttgtgtgatgatgggtgtggggctgccgatgggaaagtcgggggttgttaggcttttctgcctgctcctgcttaaacacaagaaggaatcctggattttgccctctccttagctcttagtctctttggtaggagttttgttccagaggagctctcccccttggatttgaacttgctctttttgttgttgttgttctttctcttctttttcttacctcccactaaaggggttccaaattatcctggtctttttctaccttgttgtgtttctatctcgtctttacttccatctgtttgtttttttctccatcagtgggggccgagttgttcccccagcctgccaaattttgatccttcccctcttttggccaaatcctagggggaagaaatcctagtatgccaaaaatatatgctaagcataattaaactccatgcgggtccataacagccaagaagcctgcaggagaaagccaagggcagttccctccgcagaacaccccatgcgtgctgagaggcgagctccttgaagaaggggctgttcttccaggaggccttattttgaactgcctcaggaccccactggagagcacagcatgccttactactgggtcatccttggtctatgtgctctgtactggaggctctgttctgcctcttatcagccaggtcaggggcacacatggcttaagtgacaaagccagaggagaagacaaccctgacagcatcacgctgcatcccattgctagcaggattggcaactcttcagacggagctgcgcttccctgcagtctagcacctctagggcctctccagactgtgccctgggagctctgggactgaaaggttaagaacataaggcaggatcagatgactctctccaagagggcaggggaattttctctccatgggccacaggggacagggctgggagaagaaatagacttgcaccttatgtcatgtaaataattgattttctagttcaagaagataatattggtagtgtgggaattggaggtaggaaggggaggaagtctgagtaagccagttggcttctaagccaaaaggattcctctttgtttatctctgagacagtccaaccttgagaatagctttaaaagggaaattaatgctgagatgataaagtccccttaagccaacaaaccctctgtagctatagaatgagtgcaggtttctattggtgtggactcagagcaatttacaagagctgttcatgcagccatccatttgtgcaaaatagggtaagaagattcaagaggatatttattacttcctcataccacatggcttttgatgattctggattctaaacaacccagaatggtcatttcaggcacaacgatactacattcgtgtgtgtctgcttttaaacttggctgggctatcagaccctattctcggctcaggttttgagaagccatcagcaaatgtgtacgtgcatgctgtagctgcagcctgcatcccttcgcctgcagcctactttggggaaataaagtgccttactgactgtagccattacagtatccaatgtcttttgacaggtgcctgtccttgaaaaacaaagtttctatttttatttttaattggtttagttcttaactgctggccaactcttacatccccagcaaatcatcgggccattggattttttccattatgttcatcacccttatatcatgtacctcagatctctctctctctcctctctctcagttatatagtttcttgtcttggactttttttttcttttctttttctttttttttttgctttaaaacaagtgtgatgccatatcaagtccatgttattctctcacagtgtactctataagaggtgtgggtgtctgtttggtcaggatgttagaaagtgctgataagtagcatgatcagtgtatgcgaaaaggtttttaggaagtatggcaaaaatgttgtattggctatgatggtgacatgatatagtcagctgccttttaagaggtcttatctgttcagtgttaagtgatttaaaaaaataataacctgttttctgactagtttaaagatggatttgaaaatggttttgaatgcaattaggttatgctatttggacaataaactcaccttgacct

SEQ ID NO: 127 - protein, 289 aa, Homo sapien
MELLCHEVDPVRRAVRDRNLLRDDRVLQNLLTIEERYLPQCSYFKCVQKDIQPYMRRMVATWMLEVCEEQKCEEEVFPLAMNYLDRFLAGVPTPKSHLQLLGAVCMFLASKLKETSPLTAEKLCIYTDNSIKPQELLEWELVVLGKLKWNLAAVTPHDFIEHILRKLPQQREKLSLIRKHAQTFIALCATDFKFAMYPPSMIATGSVGAAICGLQQDEEVSSLTCDALTELLAKITNTDVDCLKACQEQIEAVLLNSLQQYRQDQRDGSKSEDELDQASTPTDVRDIDL

SEQ ID NO: 128 - DNA, 7101 bp, Homo sapien
tgtggctgtgacctggcacaagggggcttcttcataaagaacggagagtatctctgcaccctggactaccagcggatgtacgggacacgctgccatggctgtggggagttcgtggagggcgaagtggtgactgctctgggcaagacctaccatcccaattgctttgcttgtactatctgcaagcgcccgtttccacccggagaccgagtcacattcaatgggagagactgcctttgtcaactctgtgcacagccgatgtcgtccagtccgaaagaaaccaccttctccagcaattgtgccggctgcggaagagatatcaagaacgggcaggcgctgctggcgctggataagcagtggcacttggggtgctttaaatgcaagtcctgcgggaaggtcctcaccggggagtacatcagcaaggatggtgctccgtactgtgaaaaggactaccagggactctttggggtgaaatgtgaggcgtgtcaccagtttatcacagggaaagtcctggaggcaggtgacaaacattaccaccccagctgtgcacgatgcagcagatgcaaccagatgttcacagaaggagaggaaatgtatcttcaaggctccaccgtttggcatcccgactgtaagcaatctacgaagaccgaggaaaagctgcggcctaccaggacatcctcggaaagtatttattctaggccaggctccagtattcctggctcaccaggtcatactatctatgcaaaagtagacaatgagatcctggattacaaggatttagcagccattccgaaggtcaaggcaatttatgacattgaacgtccagatcttattacctatgagcctttctacacttcgggctatgatgacaaacaggagagacagagccttggagagtctccgaggactttgtctcctactccatcagcagaagggtaccaggatgttcgggatcggatgatccatcggtccacgagccagggctccatcaactcccctgtgtacagccgccacagctacactccaaccacgtcccgctctccccagcatttccacagacctggcaatgagccgtccagcggccggaactcccctctcccttaccggccagacagccgccctctaactccaacttacgctcaggcccctaaacatttccatgttccagatcaaggaatcaacatttaccgaaagccacccatctacaaacagcatgctgccttggcagcccagagcaagtcctcagaagatatcatcaagttttccaagttcccagcagcccaggcaccagaccccagcgagacaccagagattgagacggaccactggcctggtcccccctcatttgctgtcataggacctgacatgaaacgcagatctagtggcagagaggaagatgatgaggaacttctgagacgtcggcagcttcaagaagagcaattaatgaagcttaactcaggcctgggacagttgatcttgaaagaagagatggagaaagagagccgggaaaggtcatctctgttagccagtcgctacgattctcccatcaactcagcttcacatattccatcatctaaaactgcatctctccctggctatggaagaaatgggcttcaccggcctgtttctaccgacttcgctcagtataacagctatggggatgtcagcgggggagtgcgagattaccagacactcccagatggccacatgcctgcaatgagaatggaccgaggagtgtctatgcccaacatgttggaaccaaagatatttccatatgaaatgctcatggtgaccaacagagggcgaaacaaaatcctcagagaggtggacagaaccaggctggagcgccacttagcccctgaagtgtttcgggaaatctttggaatgtccatacaggagtttgacaggttacctctttggagacgcaacgacatgaagaaaaaagcaaaactcttctaagtcccactcgtgaatggcaattagagaaaggactgacagtggcggtgccccataggatgtcatattgaggcccaaacttgattggagaatttgcaaactaccgtcgctcagcaacaccaaaaagagaaagtctggttaaaacaccatgagtcaaatgtcgggccagccaacagtaacacttgccaagaagcatggcgtagaaatttctatgttccgaaacacagagtagtgtccacatgtgaccttttcacattaccttatgtatacaacaggagctgcgttgttttcttctttttcttttcctttatctgttgtccaacaacagtgctgactgtccggataagagctggcaagtgcccttaggatgccgcatgggaaaaatcggttatcataatttcaaagtataaatatatttattatgtagcgctgcggctaagaaggaagagtgaggggtctgtccatggggtggcagtgatttcacacccgcctttcttgaatggcttcgtgttactcagccgtgccctggcaggaatggaactccatcagggaacagggcagctctgtttgaatggggtgaaaaacagcaaaattaattcttagcaagctccttgttctctactgttcaccgggacctggctggcaaatgacttagctattagtatatttaaaaactgttcaaaagcaaaagagaaggaacaggaatgaaaggaaaccttcccttaactctttctgcttcccatagcaggtctggttcctgctccccgcctaggacaggagctgtctggagctccacctttgcaaagaaaggaaaaacacaaattgcccccagattggcccagtggcatgccattaggtgattttgcgtaggggccatatcattcatggccaaaaaaaaccaaaaagcaaaaaacaaaaacaagtcccatgtcctactgactctagttcttccagtcgttatcctctgctgtctctctggcatcctatgaatcagatcaagcccatgctgttgttggtttttaaggtttctttcaataataggctaaggaaagacatgtttttctcttttaaatctctgcaactccaaagtagactccttcgaacgtatttaatttggccttttcagctttcttcttgcccagctctgtcgaattcatgggtgtgtgtgcacatgttggtttcactcacccagagtaattttgtgagcatgcatgtgctttttaatttctgcttgaatgtttgtcctgctgtgttgcagcttctaaagacattgtcaccgagtgtgtgtgactcaaagatcaagagtgaggctaaactgcgaccccaacatcacttccttcatggaaaggtgttggcgctgatgtagctcatggaaggatcagactgggaaccacagaggaaggatgaggtgggatgtggaggtcagagcatctcacgagagtccctcaggctctgcaacactagattcgaatatgagcctagggtttccccaacacgtgcgtgcatatgaaaccacatcatgattcccgacgtgagttagatgagggagagtttgtgtaactccacacccaggagggtaagccactttattatcatgctttggggctgtgcttaagaatttaagctctgttttaaagccgaagaagaaaacatttgaatttaccttcatatgccactaagaacaaaagctctgaagttcttcctgctggcaccaaatattaggattacaagctgtctctctgacaccagtggtaaaaaagcaagtagaatagtttctgagtctgtgttgcagcctctgacacgtggctcactgctgtcatttggggggtggaatgaacagtcactgttctatagcatcctcctgtgctcttacctaaggaatctaaattgtcctagccttccattgctatgcactgaatgaggactactctcgtgtgtgtgtgtgtgtgtgtgtgtgtgtgtgtgtgtgtgtgtgtgtgttggatctactaacatgtttagcaaatggctctgacagggtggccatgagcagatgagaccagctcttgcttggttggaagccacactgcagtttgcagtttagcctttggtgtctcagtggcctcttgcttattccatgctttttctatcccatcctctctctgtgccctcctgcaatggcagccttggcacaatgcctgggtgtcctcatccttgctttactctggaaagtgtggggatggagaggatggtgcatttccagtgcttccttacctgtcaataacaatggtggccacctgggtcccagcacttggctggtggagagatttttttcattatggagctaataaagggtccctacgttttacattgattaatgaattatcacccagacatgtgcagatgaaatgtcaatataagaaaaatcaaggtatttgggaaacatgggcataatcaggtagttttgctaaaattcctcttccttggtctacataaagaagacatgggtctgtcatagaatggggacattagactgaaaactgggacaacccccttccttattttatagagactaggagttaaggggcctgcctaagattgcagtgataaagaactgaaccctaaatcagctcccactaatgaaaccctgctttccttgtatcttttaaactcagttctgcatccaacttgagaagaaaaaaagcttctttccatatcaagtaccatatgagttcatttaaactgcaccttgcagaaatgcattgccagaaagcaccagtagcctcctatctgcaagcagagtagtgctctgctctggggaggggtcattggaaaccataatgcagagtgggccccctactccatttcccagcaaaaggctccagctggagggatgggttgtggggcaacctggttcctgctaactgccagattgaatgtgtgggctagaatgcctgcgcatttagttaaactgggctcagcatgcttgtcctcaaaatgtccatcctggtcacagcacacaagatggctattggtctgcttttaccctaccctgtactatacatgaaaattccagttattaacacactcaaactggtggagcttgttcaccctaggaaggggattgtatatatggcaggcttccctggtgccgatgtaaagggctacatttgggaacatttgacttccttgggactcttaagtgcatactgatggcatgaagtaaaaggggcctcaatgatgataggaaaatcagttcttttaaaatttcttcaagaaaatccaggctatcacatagtctttctgtgtgacttattaggagataggaagagcattgggaaacttgcacagctagctatgcatctacattttggtttggggttagttatgaaatgttcttaatatgacgtgttcaataacttcacataaacttcctgttctccaaaacctcaaagagatagagttaatgagttgttgtttttttttaaatgggggtagttttctatctgtcatgggctctagcatctactccgctacccaattctgtcatctccaagctgagtttcctcttctgaggcagaggctggagcagttctttttcagttctcatcctctccatcccaatccagtatatcaatcaactctaactcggagacgtctagctggcaatgtttctaaaactttcactggatttctttagacattgaagcaaacatttttttctaagaattgcttctcagatgatgatatcaaatgtatatgcttttgcaagtttgaaaagttcaaattaaccacttttgactaggtaagtctttctaaaaaccatttaaagctaactgggtcttagcatcctcctgtgtatggaagagacaggtgaccgctccaggttgggtgctcacagaacccttttcctgactctcatggaagatggtggaaggaaaatagactgtctcatcaaccctcctgtgtcctctgaagcaatctcagtttttattaaccacctcttctgtgtttctggtagctatttaacctgtatttaatctgtacttcctatgccagcctcaattttatttgatttttaaaattattctcttctaaccaatgaagtgtttgtcagtatgccccaaagcttgctcttttgtgctcccttttgaataactttctatccagaaaaagagattatttgggacttgagatttgcagtgataccaacttatagcaatgatgtactttaagggaactacccaactatgttgtgatagaagaaagagaaaccttcactttggcattttttttaatcactgtttatttttctgtttgcggcccaggaagcagtgggaggtggtggcagatatgctttgcatatggattgttatgtttttatttgggcaagtttaatcatggaaaactcaaaaagaaggggggaaatggtcagtttaagccaaaagaaactttctaaacaatgtataggtacacagcaaaattaaacaaatccaacaatttctgaagcttagtgtaattgagtggtggttgttattcaataaaattattcccaaaagtgtttctcctaagagtgcagttcccatgagtcacttcctgaacccattgaccaaaggtggacagagacaatcctgtagaccttgacattcagaaagatgtgagctgcttactgatcatatatgcatacgtttctttacagcagaggaaaccattgtccacaaaactgatgttcttttggggttttatgtacagacttgtccaatcatgtgtgtggttcctgcgagttgctgatgactccgcattgaagctctctgagttctttgattttaagttgggtttatggaattttttcaaatgttggaaggcgtgtggttcttcctgccctccctccccttttggaaatatgaaagcaaatgtttagaagaattccttttgaaaagctgtgtcgtgttccctgtgaaactgagcaggtgtgtgttggcgcgctaagtgccacatgcttgtgtgtagaggaggaggtggccctgccggctccgcgctgctgtgcctgtgatccctacctgctccccgctcctgttgccagcagcactcactgcactcctttgtcatatactctgcatcactgtcatactcacaacttcgtgaataaagttgtgtgctttattcgtc

SEQ ID NO: 129 - protein, 626 aa, Homo sapien
MYGTRCHGCGEFVEGEVVTALGKTYHPNCFACTICKRPFPPGDRVTFNGRDCLCQLCAQPMSSSPKETTFSSNCAGCGRDIKNGQALLALDKQWHLGCFKCKSCGKVLTGEYISKDGAPYCEKDYQGLFGVKCEACHQFITGKVLEAGDKHYHPSCARCSRCNQMFTEGEEMYLQGSTVWHPDCKQSTKTEEKLRPTRTSSESIYSRPGSSIPGSPGHTIYAKVDNEILDYKDLAAIPKVKAIYDIERPDLITYEPFYTSGYDDKQERQSLGESPRTLSPTPSAEGYQDVRDRMIHRSTSQGSINSPVYSRHSYTPTTSRSPQHFHRPGNEPSSGRNSPLPYRPDSLPLTPTYAQAPKHFHVPDQGINIYRKPPIYKQHRALAAQSKSSEDIIKFSKFPAAQAPDPSETPKIETDHWPGPPSFAVVGPDMKRRSSGREEDDEELLRRRQLQEEQLMKLNSGLGQLILKEEMEKESRERSSLLASRYDSPINSASHIPSSKTASLPGYGRNGLHRPVSTDFAQYNSYGDVSGGVRDYQTLPDGHMPAMRMDRGVSMPNMLEPKIFPYEMLMVTNRGRNKILREVDRTRLERHLAPEVFREIFGMSIQEFDRLPLWRRNDMKKKAKLF

SEQ ID NO: 130 - DNA, 3933 bp, Homo sapien
cacgaggcagcactctcttcgtcgcttcggccagtgtgtcgggctgggccctgacaagccacctgaggagaggctcggagccgggcccggaccccggcgattgccgcccgcttctctctagtctcacgaggggtttcccgcctcgcacccccacctctggacttgcctttccttctcttctccgcgtgtggagggagccagcgcttaggccggagcgagcctgggggccgcccgccgtgaagacatcgcggggaccgattcaccatggagggcgccggcggcgcgaacgacaagaaaaagataagttctgaacgtcgaaaagaaaagtctcgagatgcagccagatctcggcgaagtaaagaatctgaagttttttatgagcttgctcatcagttgccacttccacataatgtgagttcgcatcttgataaggcctctgtgatgaggcttaccatcagctatttgcgtgtgaggaaacttctggatgctggtgatttggatattgaagatgacatgaaagcacagatgaattgcttttatttgaaagccttggatggttttgttatggttctcacagatgatggtgacatgatttacatttctgataatgtgaacaaatacatgggattaactcagtttgaactaactggacacagtgtgtttgattttactcatccatgtgaccatgaggaaatgagagaaatgcttacacacagaaatggccttgtgaaaaagggtaaagaacaaaacacacagcgaagcttttttctcagaatgaagtgtaccctaactagccgaggaagaactatgaacataaagtctgcaacatggaaggtattgcactgcacaggccacattcacgtatatgataccaacagtaaccaacctcagtgtgggtataagaaaccacctatgacctgcttggtgctgatttgtgaacccattcctcacccatcaaatattgaaattcctttagatagcaagactttcctcagtcgacacagcctggatatgaaattttcttattgtgatgaaagaattaccgaattgatgggatatgagccagaagaacttttaggccgctcaatttatgaatattatcatgctttggactctgatcatctgaccaaaactcatcatgatatgtttactaaaggacaagtcaccacaggacagtacaggatgcttgccaaaagaggtggatatgtctgggttgaaactcaagcaactgtcatatataacaccaagaattctcaaccacagtgcattgtatgtgtgaattacgttgtgagtggtattattcagcacgacttgattttctcccttcaacaaacagaatgtgtccttaaaccggttgaatcttcagatatgaaaatgactcagctattcaccaaagttgaatcagaagatacaagtagcctctttgacaaacttaagaaggaacctgatgctttaactttgctggccccagccgctggagacacaatcatatctttagattttggcagcaacgacacagaaactgatgaccagcaacttgaggaagtaccattatataatgatgtaatgctcccctcacccaacgaaaaattacagaatataaatttggcaatgtctccattacccaccgctgaaacgccaaagccacttcgaagtagtgctgaccctgcactcaatcaagaagttgcattaaaattagaaccaaatccagagtcactggaactttcttttaccatgccccagattcaggatcagacacctagtccttccgatggaagcactagacaaagttcacctgagcctaatagtcccagtgaatattgtttttatgtggatagtgatatggtcaatgaattcaagttggaattggtagaaaaactttttgctgaagacacagaagcaaagaacccattttctactcaggacacagatttagacttggagatgttagctccctatatcccaatggatgatgacttccagttacgttccttcgatcagttgtcaccattagaaagcagttccgcaagccctgaaagcgcaagtcctcaaagcacagttacagtattccagcagactcaaatacaagaacctactgctaatgccaccactaccactgccaccactgatgaattaaaaacagtgacaaaagaccgtatggaagacattaaaatattgattgcatctccatctcctacccacatacataaagaaactactagtgccacatcatcaccatatagagatactcaaagtcggacagcctcaccaaacagagcaggaaaaggagtcatagaacagacagaaaaatctcatccaagaagccctaacgtgttatctgtcgctttgagtcaaagaactacagttcctgaggaagaactaaatccaaagatactagctttgcagaatgctcagagaaagcgaaaaatggaacatgatggttcactttttcaagcagtaggaattggaacattattacagcagccagacgatcatgcagctactacatcactttcttggaaacgtgtaaaaggatgcaaatctagtgaacagaatggaatggagcaaaagacaattattttaataccctctgatttagcatgtagactgctggggcaatcaatggatgaaagtggattaccacagctgaccagttatgattgtgaagttaatgctcctatacaaggcagcagaaacctactgcagggtgaagaattactcagagctttggatcaagttaactgagctttttcttaatttcattcctttttttggacactggtggctcactacctaaagcagtctatttatattttctacatctaattttagaagcctggctacaatactgcacaaacttggttagttcaatttttgatcccctttctacttaatttacattaatgctcttttttagtatgttctttaatgctggatcacagacagctcattttctcagttttttggtatttaaaccattgcattgcagtagcatcattttaaaaaatgcacctttttatttatttatttttggctagggagtttatccctttttcgaattatttttaagaagatgccaatataatttttgtaagaaggcagtaacctttcatcatgatcataggcagttgaaaaatttttacaccttttttttcacattttacataaataataatgctttgccagcagtacgtggtagccacaattgcacaatatattttcttaaaaaataccagcagttactcatggaatatattctgcgtttataaaactagtttttaagaagaaattttttttggcctatgaaattgttaaacctggaacatgacattgttaatcatataataatgattcttaaatgctgtatggtttattatttaaatgggtaaagccatttacataatatagaaagatatgcatatatctagaaggtatgtggcatttatttggataaaattctcaattcagagaaatcatctgatgtttctatagtcactttgccagctcaaaagaaaacaataccctatgtagttgtggaagtttatgctaatattgtgtaactgatattaaacctaaatgttctgcctaccctgttggtataaagatattttgagcagactgtaaacaagaaaaaaaaaatcatgcattcttagcaaaattgcctagtatgttaatttgctcaaaatacaatgtttgattttatgcactttgtcgctattaacatcctttttttcatgtagatttcaataattgagtaattttagaagcattattttaggaatatatagttgtcacagtaaatatcttgttttttctatgtacattgtacaaatttttcattccttttgctctttgtggttggatctaacactaactgtattgttttgttacatcaaataaacatcttctgtggaaaaaaaaaaaaaaaaaaaa

SEQ ID NO: 131 - protein, 826 aa, Homo sapien
MEGAGGANDKKKISSERRKEKSRDAARSRRSKESEVFYELAHQLPLPHNVSSHLDKASVMRLTISYLRVRKLLDAGDLDIEDDMKAQMNCFYLKALDGFVMVLTDDGDMIYISDNVNKYMGLTQFELTGHSVFDFTHPCDHEEMREMLTHRNGLVKKGKEQNTQRSFFLRMKCTLTSRGRTMNIKSATWKVLHCTGHIHVYDTNSNQPQCGYKKPPMTCLVLICEPIPHPSNIEIPLDSKTFLSRHSLDMKFSYCDERITELMGYEPEELLGRSIYEYYHALDSDHLTKTHHDMFTKGQVTTGQYRMLAKRGGYVWVETQATVIYNTKNSQPQCIVCVNYVVSGIIQHDLIFSLQQTECVLKPVESSDMKMTQLFTKVESEDTSSLFDKLKKEPDALTLLAPAAGDTIISLDFGSNDTETDDQQLEEVPLYNDVMLPSPNEKLQNINLAMSPLPTAETPKPLRSSADPALNQEVALKLEPNPESLELSFTMPQIQDQTPSPSDGSTRQSSPEPNSPSEYCFYVDSDMVNEFKLELVEKLFAEDTEAKNPFSTQDTDLDLEMLAPYIPMDDDFQLRSFDQLSPLESSSASPESASPQSTVTVFQQTQIQEPTANATTTTATTDELKTVTKDRMEDIKILIASPSPTHIHKETTSATSSPYRDTQSRTASPNRAGKGVIEQTEKSHPRSPNVLSVALSQRTTVPEEELNPKILALQNAQRKRKMEHDGSLFQAVGIGTLLQQPDDHAATTSLSWKRVKGCKSSEQNGMEQKTIILIPSDLACRLLGQSMDESGLPQLTSYDCEVNAPIQGSRNLLQGEELLRALDQVN

SEQ ID NO: 132 - DNA, 2704 bp, Homo sapien
gcttagtgtaaccagcggcgtatattttttaggcgccttttcgaaaacctagtagttaatattcatttgtttaaatcttattttatttttaagctcaaactgcttaagaataccttaattccttaaagtgaaataattttttgcaaaggggtttcctcgatttggagctttttttttcttccaccgtcatttctaactcttaaaaccaactcagttccatcatggtgatgttcaagaagatcaagtcttttgaggtggtctttaacgaccctgaaaaggtgtacggcagtggcgagagggtggctggccgggtgatagtggaggtgtgtgaagttactcgtgtcaaagccgttaggatcctggcttgcggagtggctaaagtgctttggatgcagggatcccagcagtgcaaacagacttcggagtacctgcgctatgaagacacgcttcttctggaagaccagccaacaggtgagaatgagatggtgatcatgagacctggaaacaaatatgagtacaagttcggctttgagcttcctcaggggcctctgggaacatccttcaaaggaaaatatgggtgtgtagactactgggtgaaggcttttcttgaccgcccgagccagccaactcaagagacaaagaaaaactttgaagtagtggatctggtggatgtcaatacccctgatttaatggcacctgtgtctgctaaaaaagaaaagaaagtttcctgcatgttcattcctgatgggcgggtgtctgtctctgctcgaattgacagaaaaggattctgtgaaggtgatgagatttccatccatgctgactttgagaatacatgttcccgaattgtggtccccaaagctgccattgtggcccgccacacttaccttgccaatggccagaccaaggtgctgactcagaagttgtcatcagtcagaggcaatcatattatctcagggacatgcgcatcatggcgtggcaagagccttcgggttcagaagatcaggccttctatcctgggctgcaacatccttcgagttgaatattccttactgatctatgttagcgttcctggatccaagaaggtcatccttgacctgcccctggtaattggcagcagatcaggtctaagcagcagaacatccagcatggccagccgaaccagctctgagatgagttgggtagatctgaacatccctgataccccagaagctcctccctgctatatggatgtcattcctgaagatcaccgattggagagcccaacaactcctctgctagatgacatggatggctctcaagacagccctatctttatgtatgcccctgagttcaagttcatgccaccaccgacttatactgaggtggatccctgcatcctcaacaacaatgtgcagtgagcatgtggaagaaaagaagcagctttacctacttgtttctttttgtctctcttcctggacactcactttttcagagactcaacagtctcgtcaatggagtgtgggtccaccttagcctctgacttcctaatgtaggaggtggtcagcaggcaatctcctgggccttaaaggatgcggactcatcctcagccagcgcccatgttgtgatacaggggtgtttgttggatgggtttaaaaataactagaaaaactcaggcccatccattttctcagatctccttgaaaattgaggccttttcgatagtttcgggtcaggtaaaaatggcctcctggcgtaagcttttcaaggttttttggaggctttttgtaaattgtgataggaactttggaccttgaacttacgtatcatgtggagaagagccaatttaacaaactaggaagatgaaaagggaaattgtggccaaaactttgggaaaaggaggttcttaaaatcagtgtttcccctttgtgcacttgtagaaaaaaaagaaaaaccttctagagctgatttgatggacaatggagagagctttccctgtgattataaaaaaggaagctagctgctctacggtcatctttgcttagagtatactttaacctggcttttaaagcagtagtaactgccccaccaaaggtcttaaaagccatttttggagcctattgcactgtgttctcctactgcaaatattttcatatgggaggatggttttctcttcatgtaagtccttggaattgattctaaggtgatgttcttagcactttaattcctgtcaaattttttgttctccccttctgccatcttaaatgtaagctgaaactggtctactgtgtctctagggttaagccaaaagacaaaaaaaattttactacttttgagattgccccaatgtacagaattatataattctaacgcttaaatcatgtgaaagggttgctgctgtcagccttgcccactgtgacttcaaacccaaggaggaactcttgatcaagatgcccaaccctgtgatcagaacctccaaatactgccatgagaaactagagggcaggtgttcataaaagccctttgaacccccttcctgccctgtgttaggagatagggatattggcccctcactgcagctgccagcacttggtcagtcactctcagccatagcactttgttcactgtcctgtgtcagagcactgagctccacccttttctgagagttattacagccagaaagtgtgggctgaagatggttggtttcatgtgggggtattatgtaccc

SEQ ID NO: 133 - protein, 391 aa, Homo sapien
MVMFKKIKSFEVVFNDPEKVYGSGERVAGRVIVEVCEVTRVKAVRILACGVAKVLWMQGSQQCKQTSEYLRYEDTLLLEDQPTGENEMVIMRPGNKYEYKFGFELPQGPLGTSFKGKYGCVDYWVKAFLDRPSQPTQETKKNFEVVDLVDVNTPDLMAPVSAKKEKKVSCMFIPDGRVSVSARIDRKGFCEGDEISIHADFENTCSRIVVPKAAIVARHTYLANGQTKVLTQKLSSVRGNHIISGTCASWRGKSLRVQKIRPSILGCNILRVEYSLLIYVSVPGSKKVILDLPLVIGSRSGLSSRTSSMASRTSSEMSWVDLNIPDTPEAPPCYMDVIPEDHRLESPTTPLLDDMDGSQDSPIFMYAPEFKFMPPPTYTEVDPCILNNNVQ

SEQ ID NO: 134 - DNA, 1399 bp, Homo sapien
agtgtgaaatcttcagagaagaatttctctttagttctttgcaagaaggtagagataaagacactttttcaaaaatggcaatggtatcagaattcctcaagcaggcctggtttattgaaaatgaagagcaggaatatgttcaaactgtgaagtcatccaaaggtggtcccggatcagcggtgagcccctatcctaccttcaatccatcctcggatgtcgctgccttgcataaggccataatggttaaaggtgtggatgaagcaaccatcattgacattctaactaagcgaaacaatgcacagcgtcaacagatcaaagcagcatatctccaggaaacaggaaagcccctggatgaaacacttaagaaagcccttacaggtcaccttgaggaggttgttttagctctgctaaaaactccagcgcaatttgatgctgatgaacttcgtgctgccatgaagggccttggaactgatgaagatactctaattgagattttggcatcaagaactaacaaagaaatcagagacattaacagggtctacagagaggaactgaagagagatctggccaaagacataacctcagacacatctggagattttcggaacgctttgctttctcttgctaagggtgaccgatctgaggactttggtgtgaatgaagacttggctgattcagatgccagggccttgtatgaagcaggagaaaggagaaaggggacagacgtaaacgtgttcaataccatccttaccaccagaagctatccacaacttcgcagagtgtttcagaaatacaccaagtacagtaagcatgacatgaacaaagttctggacctggagttgaaaggtgacattgagaaatgcctcacagctatcgtgaagtgcgccacaagcaaaccagctttctttgcagagaagcttcatcaagccatgaaaggtgttggaactcgccataaggcattgatcaggattatggtttcccgttctgaaattgacatgaatgatatcaaagcattctatcagaagatgtatggtatctccctttgccaagccatcctggatgaaaccaaaggagattatgagaaaatcctggtggctctttgtggaggaaactaaacattcccttgatggtctcaagctatgatcagaagactttaattatatattttcatcctataagcttaaataggaaagtttcttcaacaggattacagtgtagctacctacatgctgaaaaatatagcctttaaatcatttttatattataactctgtataatagagataagtccattttttaaaaatgttttccccaaaccataaaaccctatacaagttgttctagtaacaatacatgagaaagatgtctatgtagctgaaaataaaatgacgtcacaagac

SEQ ID NO: 135 - protein, 346 aa, Homo sapien
MAMVSEFLKQAWFIENEEQEYVQTVKSSKGGPGSAVSPYPTFNPSSDVAALHKAIMVKGVDEATIIDILTKRNNAQRQQIKAAYLQETGKPLDETLKKALTGHLEEVVLALLKTPAQFDADELRAAMKGLGTDEDTLIEILASRTNKEIRDINRVYREELKRDLAKDITSDTSGDFRNALLSLAKGDRSEDFGVNEDLADSDARALYEAGERRKGTDVNVFNTILTTRSYPQLRRVFQKYTKYSKHDMNKVLDLELKGDIEKCLTAIVKCATSKPAFFAEKLHQAMKGVGTRHKALIRIMVSRSEIDMNDIKAFYQKMYGISLCQAILDETKGDYEKILVALCGGN

SEQ ID NO: 136 - DNA, 3322 bp, Homo sapien
gaaagctgtatttgctgcacgtggaaatctccgttattttccagcacccaacagtagcgtaatgggagtaacggacttaacctcatttctctttcagagcatttagccttcatatgcccttccctgcatgcttcccccaggccgtcaagacttgagttctgcctcgcttcccggcgcggtcgcagccctcagcccacttaggataatggcgacagctgaggtactgaacattggtaaaaaattatatgagggtaaaacaaaagaagtctacgaattgttagacagtccaggaaaagtcctcctgcagtccaaggaccagattacagcaggaaatgcagctagaaaaaaccacctggaaggaaaagctgcaatctcaaataaaatcaccagttgtatttttcagttattacaggaagcaggtattaaaactgccttcaccagaaaatgtggggagacagctttcattgcaccgcagtgtgaaatgattccaattgaatgggtttgcagaagaatagcaactggttcttttctcaaaagaaatcctggtgtcaaggaaggatataagttttacccacctaaagtggagttgtttttcaaggatgatgccaataatgacccacagtggtctgaggaacagctgattgctgcaaaattttgctttgctggacttcttataggccagactgaagtggatatcatgagtcatgctacacaggctatatttgaaatactggagaaatcctggttgccccagaattgtacactggttgatatgaagattgaatttggtgttgatgtaaccaccaaagaaattgttcttgctgatgttattgacaatgattcctggagactctggccatcaggagatcgaagccaacagaaagacaaacagtcttatcgggacctcaaagaagtaactcctgaagggctccaaatggtaaagaaaaactttgagtgggttgcagagagagtagagttgcttttgaaatcagaaagtcagtgcagggttgtagtgttgatgggctctacttctgatcttggtcactgtgaaaaaatcaagaaggcctgtggaaattttggcattccatgtgaacttcgagtaacatctgcgcataaaggaccagatgaaactctgaggattaaagctgagtatgaaggggatggcattcctactgtatttgtggcagtggcaggcagaagtaatggtttgggaccagtgatgtctgggaacactgcatatccagttatcagctgtcctcccctcacaccagactggggagttcaggatgtgtggtcttctcttcgactacccagtggtcttggctgttcaaccgtactttctccagaaggatcagctcaatttgctgctcagatatttgggttaagcaaccatttggtatggagcaaactgcgagcaagcattttgaacacatggatttccttgaagcaggctgacaagaaaatcagagaatgtaatttataagaaagaatgccattgaattttttaggggaaaaactacaaatttctaatttagctgaaggaaaatcaagcaagatgaaaaggtaattttaaattagagaacacaaataaaatgtattagtgaataaatgcttctctagatccatattaataaacatgagcatctaacccctcctttcttaggctagacaccaagatatttcagccagcctttatcattcctcttactttatcctttttccttaagtattggtggtcactactattgagtttcttccttaacactgattaaatgatcttaactccctcagctaaaactggcattactgactcccagctatatttctccagacttgcatttttttttttttttttgagacagggtctcactgtcgcccaggctggagtgcagtggcgtgatctcagttcactgctgctttccctcctgggctcaagcagttctcccacctcagcctctcgactaacagggactataatcttgcagcaccatgccgagctaattttattttttgtagagatgagctctcactatgtcacccaggttcgtctcaaactcctgaaccctagtaattctcctatctcagcctcccaaagtgctagggttacagacatgagccactgtgcctgtctagacttgtactttcaactgtccatttctccctgtctgtcccatgggcactcatgaaaaaacagaatgctcccaactttattcatcttccaagcctgtagctcttggtatactcactgttgcaagtcagaagcttgatttcatcattgatgtttttctcacgtttcacatctcactcatcaccaagtcatgttggtgttaatttctgattaacccttgaatttaccgtcttctcatcctctgtacaaaagcctcaagtgagggtcaaattcaacattatcctgatctagacagcccccattctcaatccacccttttccaagttgattgcccaaggacttctaacaataaactctcttttgcaccacagacttctttgaaaatatacatgctgttgaccctctctgtagaaaaccgcacacataaaacttaccaacagatttcattggttcttgggttctcccgaagcctatccatggtttatagattaagaattgatgaggtagctgggcacagtggctcacacctacgatcacagcacttcgggaggctgaagcaagcagatcacttgaggtcaggagtttgagaccagcctggccaacatggtgaaaccctgtctctactaaaaatacaaaaagtagccagccgtgatgacaggcacctgtaatcccagctactcgggaggctgaggcatgagaattgcttgaacccgggaggcggaggttgcagtgagcctggatcatgccactgcactccaacctgggcagcagagcaagactctgtctcaaaaggggaaaaaaaaaattgctgatgtgacccatgaagggaactcattttcctcgtaattttggactgccacacattggtacctttagttctctgaaggcccacgtttttatcattaagacctatttgttagctagtagagctttatgttcgctgtccatgaaaccttctgtaaccacagtgactacaagtagttctttctctattgaattattaggtccagaatagaagatgtcattgtacactttatttccctcacactgtgttatgctctgatgtgctatgcttagctatctgtcagagattagtaaattataaaactcatgtgtactacttaagtttatatcttatgctagtttataagaacaattaaaaggacttagaagattaaaaaaaaaaaaaaaaaa

SEQ ID NO: 137 - protein, 425 aa, Homo sapien
MATAEVLNIGKKLYEGKTKEVYELLDSPGKVLLQSKDQITAGNAARKNHLEGKAAISNKITSCIFQLLQEAGIKTAFTRKCGETAFIAPQCEMIPIEWVCRRIATGSFLKRNPGVKEGYKFYPPKVELFFKDDANNDPQWSEEQLIAAKFCFAGLLIGQTEVDIMSHATQAIFEILEKSWLPQNCTLVDMKIEFGVDVTTKEIVLADVIDNDSWRLWPSGDRSQQKDKQSYRDLKEVTPEGLQMVKKNFEWVAERVELLLKSESQCRVVVLMGSTSDLGHCEKIKKACGNFGIPCELRVTSAHKGPDETLRIKAEYEGDGIPTVFVAVAGRSNGLGPVMSGNTAYPVISCPPLTPDWGVQDVWSSLRLPSGLGCSTVLSPEGSAQFAAQIFGLSNHLVWSKLRASILNTWISLKQADKKIRECNL

SEQ ID NO: 138 - DNA, 1767 bp, Homo sapien
  Unsure 26: Unknown base
  Unsure 68: Unknown base
  Unsure 80: Unknown base
  Unsure 107: Unknown base
  Unsure 1762: Unknown base
aagaaaaaaataggcctggttgccanattaaggtcccctgggctattttaaaccggatttggataccnaggtctttccanaggccgtattttgccccccgtaacccntaaaaaaaaaaaaagatttccaaaatgccgttttcagaacctgggttttaatagcagtattgaatttgtaagcttagtagttgcagaaattgaacactaggtggcactcagttatcttaacaggggaagtactgatacaattgttgacttttcttttactatgtgtaagaaataccccaaacatgaaaagattgttttgatcatatgcatgtatgtagaatatttttgcagagcagaaagattatgttagaagtgtgatttttattttcagaagtcatatacatgtaagctacaattttgagtgctttataaacacttaagatatatatataaattttaatttcatagcaacttgtaaaaaataaaatacttgttgaaaagcctttttcaacatatccctaagctaagggaagaggaaggaataacaactcagtgaaaagatggtctccagtttctgaatgaaaaagctacagctgagaaataaaataaaatgtcatgctgcagaatatgttatacccttattttgtgttaaggatatattttattatgtgaatggttttgtttttgttttttgtttttgttttttgcttgtattgggaattagctttactggtaacttccttatttagtttttagtggtcaactctaataaaatgaaactagggctgagctagttagccctcactagccaaactgaaactctatgcaacattaaaagaagagatccatcatgtagcttgtgacacttttattttattagtcaccggggaacttttcagtgatgaaaatacacagggtaataaaccttcacatggcttcaaaaggaaaacaagcaaatcttctctaatctactcttactataatttcctaagtgtacaccaaactctggatttaaaaatctgaagtactatagaacattaagttgaagaatggaaattaagagtacgtattcatggtttatatttcttattctatggagttcgtgaacacatctaggtggaatgcatctgagactaagggctggtttttaatcctcataagaaaccagccttgaagaattaacaattctcttcattggtattctaaacctcctaagatatttaggcttctgtacataaaagtgtttttgctaaatttacagtatatatagatcctttcatattattttactaagaatgtttgaactttgcatatttgatatagttcctggtaggaatagcacagctcaaacattagtttttctacttacctcctctaacacgtggtttgtctggagagtttctaaaaattcagctataaccccagttcatgtatttactggtgattgttcttgctgaggtagtaacagcccaatcttgggctgttaaatcctaggaaatctcgaatcatagtgattaaaatagttggggtaaagttgtagcttatatgcaatactacttggaggaattcttctactaatttgtatttaatgtggaaattgtatagtttcattgatttaatcataaataatggaaatggtctccaagaagttttatttttcatttttttgcttatacactctgattcctataatacagtgctataagctatgcacagaaaataaaatgtttgaaatccaaaaaaaaaaaaaaaaaaaaaaaaaaaaaaaaaaaaanggggg

SEQ ID NO: 139 - protein, 27 aa, Homo sapien
MVLFLFFVFVFCLYWELALLVTSLFSF

SEQ ID NO: 140 - DNA, 4170 bp, Homo sapien
cgcgggtctgtggagagccgggtgcgagcggcggcagcacgaggggaaaagagctgagcggagaccaaagtcagccgggagacagtgggtctgtgagagaccgaatagaggggctggggccacgagcgccattgacaagcaatggggaagaaacagaaaaacaagagcgaagacagcaccaaggatgacattgatcttgatgccttggctgcagaaatagaaggagctggtgctgccaaagaacaggagcctcaaaagtcaaaagggaaaaagaaaaaagagaaaaaaaagcaggactttgatgaagatgatatcctgaaagaactggaagaattgtctttggaagctcaaggcatcaaagctgacagagaaactgttgcagtgaagccaacagaaaacaatgaagaggaattcacctcaaaagataaaaaaaagaaaggacagaagggcaaaaaacagagttttgatgataatgatagcgaagaattggaagataaagattcaaaatcaaaaaagactgcaaaaccgaaagtggaaatgtactctgggagtgatgatgatgatgattttaacaaacttcctaaaaaagctaaagggaaagctcaaaaatcaaataagaagtgggatgggtcagaggaggatgaggataacagtaaaaaaattaaagagcgttcaagaataaattcttctggtgaaagtggtgatgaatcagatgaatttttgcaatctagaaaaggacagaaaaaaaatcagaaaaacaagccaggtcctaacatagaaagtgggaatgaagatgatgacgcctccttcaaaattaagacagtggcccaaaagaaggcagaaaagaaggagcgcgagagaaaaaagcgagatgaagaaaaagcgaaactgcggaagctgaaagaaaaagaagagttagaaacaggtaaaaaggatcagagtaaacaaaaggaatctcaaaggaaatttgaagaagaaactgtaaaatccaaagtgactgttgatactggagtaattcctgcctctgaagagaaagcagagactcccacagctgcagaagatgacaatgaaggagacaaaaagaagaaagataagaagaaaaagaaaggagaaaaggaagaaaaagagaaagagaagaaaaaaggacctagcaaagccactgttaaagctatgcaagaagctctggctaagcttaaagaggaagaagaaagacagaagagagaagaggaagaacgtataaaacggcttgaagaattagaagccaagcgtaaagaagaggaacgattggaacaagaaaaaagagaaaggaaaaagcaaaaagaaaaagaaagaaaagaacgcttgaaaaaagaagggaaacttttaactaaatcccagagagaagccagagccagagccgaagctactcttaaactgctacaagctcagggtgttgaagtgccatcaaaagactctttgccaaagaagaggccaatttatgaagataaaaagaggaaaaaaataccacagcagctagaaagtaaagaagtgtctgaatcaatggaattatgtgctgctgtagaagttatggaacaaggagtaccagaaaaggaagagacaccacctcctgttgaaccagaagaagaagaagatactgaggatgctggattggatgattgggaagctatggccagtgatgaggagacagaaaaagtagaaggaaacacagttcatatagaagtaaaagaaaaccctgaagaggaggaggaggaggaagaagaggaagaagaagatgaagaaagtgaagaagaggaggaagaggagggagaaagtgaaggcagtgaaggtgatgaggaagatgaaaaggtgtcagatgagaaggattcagggaagacattagataaaaagccaagtaaagaaatgagctcagattctgaatatgactctgatgatgatcggactaaagaagaaagggcttatgacaaagcaaaacggaggattgagaaacggcgacttgaacatagtaaaaatgtaaacaccgaaaagctaagagcccctattatctgcgtacttgggcatgtggacacagggaagacaaaaattctagataagctccgtcacacacatgtacaagacggtgaagcaggtggtatcacacaacaaatttgggccaccaatgttcctcttgaagctattaatgaacagactaagatgattaaaaattttgatagagagaatgtacggattccaggaatgctaattattgatactcctgggcatgaatctttcagtaatctgagaaatagaggaagctctctttgtgacattgccattttagttgttgatattatgcatggtttggagccccagacaattgagtctatcaaccttctcaaatctaaaaaatgtcccttcattgttgcactcaataagattgataggttatatgattggaaaaagagtcctgactctgatgtggctgctactttaaagaagcagaaaaagaatacaaaagatgaatttgaggagcgagcaaaggctattattgtagaatttgcacagcagggtttgaatgctgctttgttttatgagaataaagatccccgcacttttgtgtctttggtacctacctctgcacatactggtgatggcatgggaagtctgatctaccttcttgtagagttaactcagaccatgttgagcaagagacttgcacactgtgaagagctgagagcacaggtgatggaggttaaagctctcccggggatgggcaccactatagatgtcattttgatcaatgggcgtttgaaggaaggagatacaatcattgttcctggagtagaagggcccattgtaactcagattcgaggcctcctgttacctcctcctatgaaggaattacgagtgaagaaccagtatgaaaagcataaagaagtagaagcagctcagggggtaaagattcttggaaaagacctggagaaaacattggctggtttacccctccttgtggcttataaagaagatgaaatccctgttcttaaagatgaattgatccatgagttaaagcagacactaaatgctatcaaattagaagaaaaaggagtctatgtccaggcatctacactgggttctttggaagctctactggaatttctgaaaacatcagaagtgccctatgcaggaattaacattggcccagtgcataaaaaagatgttatgaaggcttcagtgatgttggaacatgaccctcagtatgcagtaattttggccttcgatgtgagaattgaacgagatgcacaagaaatggctgatagtttaggagttagaatttttagtgcagaaattatttatcatttatttgatgcctttacaaaatatagacaagactacaagaaacagaaacaagaagaatttaagcacatagcagtatttccctgcaagataaaaatcctccctcagtacatttttaattctcgagatccgatagtgatgggggtgacggtggaagcaggtcaggtgaaacaggggacacccatgtgtgtcccaagcaaaaattttgttgacatcggaatagtaacaagtattgaaataaaccataaacaagtggatgttgcaaaaaaaggacaagaagtttgtgtaaaaatagaacctatccctggtgagtcacccaaaatgtttggaagacattttgaagctacagatattcttgttagtaagatcagccggcagtccattgatgcactcaaagactggttcagagatgaaatgcagaagagtgactggcagcttattgtggagctgaagaaagtatttgaaatcatctaattttttcacatggagcaggaactggagtaaatgcaatactgtgttgtaatatcccaacaaaaatcagacaaaaaatggaacagacgtatttggacactgatggacttaagtatggaaggaagaaaaataggtgtataaaatgttttccatgagaaaccaagaaacttacactggtttgacagtggtcagttacatgtccccacagttccaatgtgcctgttcactcacctctcccttccccaacccttctctacttggctgctgttttaaagtttgcccttccccaaatttggatttttattacagagtctaaagctctttcgattttatactgattaaatcagtactgcagtatttgattaacca

SEQ ID NO: 141 - protein, 1220 aa, Homo sapien
MGKKQKNKSEDSTKDDIDLDALAAEIEGAGAAKEQEPQKSKGKKKKEKKKQDFDEDDILKELEELSLEAQGIKADRETVAVKPTENNEEEFTSKDKKKKGQKGKKQSFDDNDSEELEDKDSKSKKTAKPKVEMYSGSDDDDDFNKLPKKAKGKAQKSNKKWDGSEEDEDNSKKIKERSRINSSGESGDESDEFLQSRKGQKKNQKNKPGPNIESGNEDDDASFKIKTVAQKKAEKKERERKKRDEEKAKLRKLKEKEELETGKKDQSKQKESQRKFEEETVKSKVTVDTGVIPASEEKAETPTAAEDDNEGDKKKKDKKKKKGEKEEKEKEKKKGPSKATVKAMQEALAKLKEEEERQKREEEERIKRLEELEAKRKEEERLEQEKRERKKQKEKERKERLKKEGKLLTKSQREARARAEATLKLLQAQGVEVPSKDSLPKKRPIYEDKKRKKIPQQLESKEVSESMELCAAVEVMEQGVPEKEETPPPVEPEEEEDTEDAGLDDWEAMASDEETEKVEGNTVHIEVKENPEEEEEEEEEEEEDEESEEEEEEEGESEGSEGDEEDEKVSDEKDSGKTLDKKPSKEMSSDSEYDSDDDRTKEERAYDKAKRRIEKRRLEHSKNVNTEKLRAPIICVLGHVDTGKTKILDKLRHTHVQDGEAGGITQQIWATNVPLEAINEQTKMIKNFDRENVRIPGMLIIDTPGHESFSNLRNRGSSLCDIAILVVDIMHGLEPQTIESINLLKSKKCPFIVALNKIDRLYDWKKSPDSDVAATLKKQKKNTKDEFEERAKAIIVEFAQQGLNAALFYENKDPRTFVSLVPTSAHTGDGMGSLIYLLVELTQTMLSKRLAHCEELRAQVMEVKALPGMGTTIDVILINGRLKEGDTIIVPGVEGPIVTQIRGLLLPPPMKELRVKNQYEKHKEVEAAQGVKILGKDLEKTLAGLPLLVAYKEDEIPVLKDELIHELKQTLNAIKLEEKGVYVQASTLGSLEALLEFLKTSEVPYAGINIGPVHKKDVMKASVMLEHDPQYAVILAFDVRIERDAQEMADSLGVRIFSAEIIYHLFDAFTKYRQDYKKQKQEEFKHIAVFPCKIKILPQYIFNSRDPIVMGVTVEAGQVKQGTPMCVPSKNFVDIGIVTSIEINHKQVDVAKKGQEVCVKIEPIPGESPKMFGRHFEATDILVSKISRQSIDALKDWFRDEMQKSDWQLIVELKKVFEII

SEQ ID NO: 142 - DNA, 2591 bp, Homo sapien
cccggacgtgcggctcccctcggcctcctcgccatggacgcggacgactcccgggcccccaagggctccttgcggaagttcctggagcacctctccggggccggcaaggccatcggcgtgctgaccagcggcggggatgctcaaggtatgaacgctgccgtccgtgccgtggtgcgcatgggtatctacgtgggggccaaggtgtacttcatctacgagggctaccagggcatggtggacggaggctcaaacatcgcagaggccgactgggagagtgtctccagcatcctgcaagtgggcgggacgatcattggcagtgcgcggtgccaggccttccgcacgcgggaaggccgcctgaaggctgcttgcaacctgctgcagcgcggcatcaccaacctgtgtgtgatcggcggggacgggagcctcaccggggccaacctcttccggaaggagtggagtgggctgctggaggagctggccaggaacggccagatcgataaggaggccgtgcagaagtacgcctacctcaacgtggtgggcatggtgggctccatcgacaatgatttctgcggcaccgacatgaccatcggcacggactccgccctgcacaggatcatcgaggtcgtcgacgccatcatgaccacggcccagagccaccagaggaccttcgttctggaggtgatgggacgacactgtgggtacctggccctggtgagtgccttggcctgcggtgcggactgggtgttccttccagaatctccaccagaggaaggctgggaggagcagatgtgtgtcaaactctcggagaaccgtgcccggaaaaaaaggctgaatattattattgtggctgaaggagcaattgatacccaaaataaacccatcacctctgagaaaatcaaagagcttgtcgtcacgcagctgggctatgacacacgtgtgaccatcctcgggcacgtgcagagaggagggaccccttcggcattcgacaggatcttggccagccgcatgggagtggaggcagtcatcgccttgctagaggccaccccggacaccccagcttgcgtcgtgtcactgaacgggaaccacgccgtgcgcctgccgctgatggagtgcgtgcagatgactcaggatgtgcagaaggcgatggacgagaggagatttcaagatgcggttcgactccgagggaggagctttgcgggcaacctgaacacctacaagcgacttgccatcaagctgccggatgatcagatcccaaagaccaattgcaacgtagctgtcatcaacgtgggggcacccgcggctgggatgaacgcggccgtacgctcagctgtgcgcgtgggcattgccgacggccacaggatgctcgccatctatgatggctttgacggcttcgccaagggccagatcaaagaaatcggctggacagatgtcgggggctggaccggccaaggaggctccattcttgggacaaaacgcgttctcccggggaagtacttggaagagatcgccacacagatgcgcacgcacagcatcaacgcgctgctgatcatcggtggattcgaggcctacctgggactcctggagctgtcagccgcccgggagaagcacgaggagttctgtgtccccatggtcatggttcccgctactgtgtccaacaatgtgccgggttccgatttcagcatcggggcagacaccgccctgaacactatcaccgacacctgcgaccgcatcaagcagtccgccagcggaaccaagcggcgcgtgttcatcatcgagaccatgggcggctactgtggctacctggccaacatgggggggctcgcggccggagctgatgccgcatacattttcgaagagcccttcgacatcagggatctgcagtccaacgtggagcacctgacggagaaaatgaagaccaccatccagagaggccttgtgctcagaaatgagagctgcagtgaaaactacaccaccgacttcatttaccagctgtattcagaagagggcaaaggcgtgtttgactgcaggaagaacgtgctgggtcacatgcagcagggtggggcaccctctccatttgatagaaactttggaaccaaaatctctgccagagctatggagtggatcactgcaaaactcaaggaggcccggggcagaggaaaaaaatttaccaccgatgattccatttgtgtgctgggaataagcaaaagaaacgttatttttcaacctgtggcagagctgaagaagcaaacggattttgagcacaggattcccaaagaacagtggtggctcaagctacggcccctcatgaaaatcctggccaagtacaaggccagctatgacgtgtcggactcaggccagctggaacatgtgcagccctggagtgtctgacccagtcccgcctgcatgtgcctgcagccaccgtggactgtctgtttttgtaacacttaagttattttatcagcactttatgcacgtattattgacattaatacctaatcggcgagtgcccatctgccccaccagctccagtgcgtgctgtctgtggagtgtgtctcatgctttcagatgtgcatatgagcagaattaattaa

SEQ ID NO: 143 - protein, 784 aa, Homo sapien
MDADDSRAPKGSLRKFLEHLSGAGKAIGVLTSGGDAQGMNAAVRAVVRMGIYVGAKVYFIYEGYQGMVDGGSNIAEADWESVSSILQVGGTIIGSARCQAFRTREGRLKAACNLLQRGITNLCVIGGDGSLTGANLFRKEWSGLLEELARNGQIDKEAVQKYAYLNVVGMVGSIDNDFCGTDMTIGTDSALHRIIEVVDAIMTTAQSHQRTFVLEVMGRHCGYLALVSALACGADWVFLPESPPEEGWEEQMCVKLSENRARKKRLNIIIVAEGAIDTQNKPITSEKIKELVVTQLGYDTRVTILGHVQRGGTPSAFDRILASRMGVEAVIALLEATPDTPACVVSLNGNHAVRLPLMECVQMTQDVQKAMDERRFQDAVRLRGRSFAGNLNTYKRLAIKLPDDQIPKTNCNVAVINVGAPAAGMNAAVRSAVRVGIADGHRMLAIYDGFDGFAKGQIKEIGWTDVGGWTGQGGSILGTKRVLPGKYLEEIATQMRTHSINALLIIGGFEAYLGLLELSAAREKHEEFCVPMVMVPATVSNNVPGSDFSIGADTALNTITDTCDRIKQSASGTKRRVFIIETMGGYCGYLANMGGLAAGADAAYIFEEPFDIRDLQSNVEHLTEKMKTTIQRGLVLRNESCSENYTTDFIYQLYSEEGKGVFDCRKNVLGHMQQGGAPSPFDRNFGTKISARAMEWITAKLKEARGRGKKFTTDDSICVLGISKRNVIFQPVAELKKQTDFEHRIPKEQWWLKLRPLMKILAKYKASYDVSDSGQLEHVQPWSV

SEQ ID NO: 144 - DNA, 1478 bp, Homo sapien
ccattgtgctctaaagggaaggtgctgtgtaatcattaaggagcggaggcttttggagctgctaaaatgccggattacctcggtgccgatcagcggaagaccaaagaggatgagaaggacgacaagcccatccgagctctggatgagggggatattgccttgttgaaaacttatggtcagagcacttactctaggcagatcaagcaagttgaagatgacattcagcaacttctcaagaaaattaatgagctcactggtattaaagaatctgacactggcctggccccaccagcactctgggatttggctgcagataagcagacactccagagtgaacagcctttacaggttgccaggtgtacaaagataatcaatgctgattcggaggacccaaaatacattatcaacgtaaagcagtttgccaagtttgtggtggaccttagtgatcaggtggcacctactgacattgaagaagggatgagagtgggcgtggatagaaataaatatcaaattcacattccattgcctcctaagattgacccaacagttaccatgatgcaggtggaagagaaacctgatgtcacatacagtgatgttggtggctgtaaggaacagattgagaaactgcgagaagtagttgaaaccccattacttcatccagagaggtttgtgaaccttggcattgagcctcccaagggcgtgctgctctttggtccacccggtacaggcaagacactctgtgcgcgggcagttgctaatcggactgatgcgtgcttcattcgagttattggatctgagcttgtacagaaatacgtcggtgagggggctcgaatggttcgtgaactctttgaaatggccagaacaaaaaaagcctgccttatcttctttgatgaaattgatgctattggaggggctcgttttgatgatggtgctggaggtgacaatgaagtgcagagaacaatgttggaactgatcaatcagcttgatggttttgatcctcgaggcaatattaaagtgctgatggccactaacagacctgatactttggatccagcactgatgaggccagggagattggatagaaaaattgaatttagcttgcccgatctagagggtcggacccacatatttaagattcacgctcgttcaatgagtgttgaaagagatatcagatttgaactgttagcacgactgtgtccaaatagcactggtgctgagattagaagcgtctgcacagaggctggtatgtttgccatcagagcacggcgaaaaattgctaccgagaaggatttcttggaagctgtaaataaggtcattaagtcttatgccaaattcagtgctactcctcgttacatgacatacaactgaaccctgaaggctttcaagtgaaaactttaaattggaatcctaaccttatatagacttgttaataaccaattcataaacaaataaatggcttcaactttagagcacaatgg

SEQ ID NO: 145 - protein, 433 aa, Homo sapien
MPDYLGADQRKTKEDEKDDKPIRALDEGDIALLKTYGQSTYSRQIKQVEDDIQQLLKKINELTGIKESDTGLAPPALWDLAADKQTLQSEQPLQVARCTKIINADSEDPKYIINVKQFAKFVVDLSDQVAPTDIEEGMRVGVDRNKYQIHIPLPPKIDPTVTMMQVEEKPDVTYSDVGGCKEQIEKLREVVETPLLHPERFVNLGIEPPKGVLLFGPPGTGKTLCARAVANRTDACFIRVIGSELVQKYVGEGARMVRELFEMARTKKACLIFFDEIDAIGGARFDDGAGGDNEVQRTMLELINQLDGFDPRGNIKVLMATNRPDTLDPALMRPGRLDRKIEFSLPDLEGRTHIFKIHARSMSVERDIRFELLARLCPNSTGAEIRSVCTEAGMFAIRARRKIATEKDFLEAVNKVIKSYAKFSATPRYMTYN

SEQ ID NO: 146 - DNA, 1475 bp, Homo sapien
atccgtgtccttgcggtgctgggcagcagaccgtccaaaccgacacgcgtggtatcctcgcggtgtccggcaagagactaccaagacagacgctatgactgaggctgatgtgaatccaaaggcctatccccttgccgatgcccacctcaccaagaagctactggacctcgttcagcagtcatgtaactataagcagcttcggaaaggagccaatgaggccaccaaaaccctcaacaggggcatctctgagttcatcgtgatggctgcagacgccgagccactggagatcattctgcacctgccgctgctgtgtgaagacaagaatgtgccctacgtgtttgtgcgctccaagcaggccctggggagagcctgtggggtctccaggcctgtcatcgcctgttctgtcaccatcaaagaaggctcgcagctgaaacagcagatccaatccattcagcagtccattgaaaggctcttagtctaaacctgtggcctctgccacgtgctccctgccagcttcccccctgaggttgtgtatcatattatctgtgttagcatgtagtattttcagctactctctattgttataaaatgtagtactaaatctggtttctggatttttgtgttgtttttgttctgttttacagggttgctatcccccttcctttcctccctccctctgccatccttcatccttttatcctccctttttggaacaagtgttcagagcagacagaagcagggtggtggcaccgttgaaaggcagaaagagccaggagaaagctgatggagccaggacagagatctggttccagctttcagccactagcttcctgttgtgtgcggggtgtggtggaattaaacagcattcattgtgtgtccctgtgcctggcacacagaatcattcatacgtgttcaagtgatcaaggggtttcatttgctcttgggggattaggtatcatttggggaggaagcatgtgttctgtgaggttgttcggctatgtccaagtgtcgtttactaatgtacccctgctgtttgcttttggtaatgtgatgttgatgttctccccctacccacaaccatgcccttgagggtagcagggcagcagcataccaaagagatgtgctgcaggactccggaggcagcctgggtgggtgagccatggggcagttgacctgggtcttgaaagagtcgggagtgacaagctcagagagcatgaactgatgctggcatgaaggattccaggaagatcatggagacctggctggtagctgtaacagagatggtggagtccaaggaaacagcctgtctctggtgaatgggactttctttggtggacacttggcaccagctctgagagcccttcccctgtgtcctgccaccatgtgggtcagatgtactctctgtcacatgaggagagtgctagttcatgtgttctccattcttgtgagcatcctaataaatctgttccattttg

SEQ ID NO: 147 - protein, 128 aa, Homo sapien
MTEADVNPKAYPLADAHLTKKLLDLVQQSCNYKQLRKGANEATKTLNRGISEFIVMAADAEPLEIILHLPLLCEDKNVPYVFVRSKQALGRACGVSRPVIACSVTIKEGSQLKQQIQSIQQSIERLLV

SEQ ID NO: 148 - DNA, 1491 bp, Homo sapien
gcggcggcggcagcggcggcgacggcgacatggagagcggggcctacggcgcggccaaggcgggcggctccttcgacctgcggcgcttcctgacgcagccgcaggtggtggcgcgcgccgtgtgcttggtcttcgccttgatcgtgttctcctgcatctatggtgagggctacagcaatgcccacgagtctaagcagatgtactgcgtgttcaaccgcaacgaggatgcctgccgctatggcagtgccatcggggtgctggccttcctggcctcggccttcttcttggtggtcgacgcgtatttcccccagatcagcaacgccactgaccgcaagtacctggtcattggtgacctgctcttctcagctctctggaccttcctgtggtttgttggtttctgcttcctcaccaaccagtgggcagtcaccaacccgaaggacgtgctggtgggggccgactctgtgagggcagccatcaccttcagcttcttttccatcttctcctggggtgtgctggcctccctggcctaccagcgctacaaggctggcgtggacgacttcatccagaattacgttgaccccactccggaccccaacactgcctacgcctcctacccaggtgcatctgtggacaactaccaacagccacccttcacccagaacgcggagaccaccgagggctaccagccgccccctgtgtactgagcggcggttagcgtgggaagggggacagagagggccctcccctctgccctggactttcccatgagcctcctggaactgccagcccctctctttcacctgttccatcctgtgcagctgacacacagctaaggagcctcatagcctggcgggggctggcagagccacaccccaagtgcctgtgcccagagggcttcagtcagccgctcactcctccagggcatttttaggaaagggttttcagctagtgtttttcctcgcttttaatgacctcagccccgcctgcagtggctagaagccagcaggtgcccatgtgctactgacaagtgcctcagcttccccccggcccgggtcaggccgtgggagccgctattatctgcgttctctgccaaagactcgtgggggccatcacacctgccctgtgcagcggagccggaccaggctcttgtgtcctcactcaggtttgcttcccctgtgcccactgctgtatgatctgggggccaccaccctgtgccggtggcctctgggctgcctcccgtggtgtgagggcggggctggtgctcatggcacttcctccttgctcccacccctggcagcagggaagggctttgcctgacaacacccagctttatgtaaatattctgcagttgttacttaggaagcctggggagggcaggggtgccccatggctcccagactctgtctgtgccgagtgtattataaaatcgtgggggagatgcccggcctgggatgctgtttggagacggaataaatgttttctcattcagta

SEQ ID NO: 149 - protein, 224 aa, Homo sapien
MESGAYGAAKAGGSFDLRRFLTQPQVVARAVCLVFALIVFSCIYGEGYSNAHESKQMYCVFNRNEDACRYGSAIGVLAFLASAFFLVVDAYFPQISNATDRKYLVIGDLLFSALWTFLWFVGFCFLTNQWAVTNPKDVLVGADSVRAAITFSFFSIFSWGVLASLAYQRYKAGVDDFIQNYVDPTPDPNTAYASYPGASVDNYQQPPFTQNAETTEGYQPPPVY

SEQ ID NO: 150 - DNA, 1976 bp, Homo sapien
gccacacggtctttgagctgagtcgaggtggaccctttgaacgcagtcgccctacagccgctgattccccccgcatcgcctcccgtggaagcccaggcccgcttcgcagctttctccctttgtctcataaccatgtccaccaacgagaatgctaatacaccagctgcccgtcttcacagattcaagaacaagggaaaagacagtacagaaatgaggcgtcgcagaatagaggtcaatgtggagctgaggaaagctaagaaggatgaccagatgctgaagaggagaaatgtaagctcatttcctgatgatgctacttctccgctgcaggaaaaccgcaacaaccagggcactgtaaattggtctgttgatgacattgtcaaaggcataaatagcagcaatgtggaaaatcagctccaagctactcaagctgccaggaaactactttccagagaaaaacagccccccatagacaacataatccgggctggtttgattccgaaatttgtgtccttcttgggcagaactgattgtagtcccattcagtttgaatctgcttgggcactcactaacattgcttctgggacatcagaacaaaccaaggctgtggtagatggaggtgccatcccagcattcatttctctgttggcatctccccatgctcacatcagtgaacaagctgtctgggctctaggaaacattgcaggtgatggctcagtgttccgagacttggttattaagtacggtgcagttgacccactgttggctctccttgcagttcctgatatgtcatctttagcatgtggctacttacgtaatcttacctggacactttctaatctttgccgcaacaagaatcctgcacccccgatagatgctgttgagcagattcttcctaccttagttcggctcctgcatcatgatgatccagaagtgttagcagatacctgctgggctatttcctaccttactgatggtccaaatgaacgaattggcatggtggtgaaaacaggagttgtgccccaacttgtgaagcttctaggagcttctgaattgccaattgtgactcctgccctaagagccatagggaatattgtcactggtacagatgaacagactcaggttgtgattgatgcaggagcactcgccgtctttcccagcctgctcaccaaccccaaaactaacattcagaaggaagctacgtggacaatgtcaaacatcacagccggccgccaggaccagatacagcaagttgtgaatcatggattagtcccattccttgtcagtgttctctctaaggcagattttaagacacaaaaggaagctgtgtgggccgtgaccaactataccagtggtggaacagttgaacagattgtgtaccttgttcactgtggcataatagaaccgttgatgaacctcttaactgcaaaagataccaagattattctggttatcctggatgccatttcaaatatctttcaggctgctgagaaactaggtgaaactgagaaacttagtataatgattgaagaatgtggaggcttagacaaaattgaagctctacaaaaccatgaaaatgagtctgtgtataaggcttcgttaagcttaattgagaagtatttctctgtagaggaagaggaagatcaaaacgttgtaccagaaactacctctgaaggctacactttccaagttcaggatggggctcctgggacctttaacttttagatcatgtagctgagacataaatttgttgtgtactacgtttggtattttgtcttattgtttctctactaagaactctttcttaaatgtggtttgttactgtagcactttttacactgaaactatacttgaacagttccaactgtacatacatactgtatgaagcttgtcctctgactaggtttctaatttctatgtggaatttcctatcttgcagcatcctgtaaataaacattcaagtccacccttaaaaaaaa

SEQ ID NO: 151 - protein, 529 aa, Homo sapien [sequence omitted]

SEQ ID NO: 152 - DNA, 1596 bp, Homo sapien
tgtcggggacggtaaccgggacccgtgctctgctcctgtcgccttcgcctcctgaatccctagccatatgcgtgagtgcatctccatccacgttggccaggctggtgtccagattggcaatgcctgctgggagctctactgcctggaacacggcatccagcccgatggccagatgccaagtgacaagaccattgggggaggagatgactccttcaacaccttcttcagtgagacgggcgctggcaagcacgtgccccgggctgtgtttgtagacttggaacccacagtcattgatgaagttcgcactggcacctaccgccagctcttccaccctgagcagctcatcacaggcaaggaagatgctgccaataactatgcccgagggcactacaccattggcaaggagatcattgaccttgtgttggaccgaattcgcaagctggctgaccagtgcacccgtcttcagggcttcttggttttccacagctttggtgggggaactggttctgggttcacctccctgctcatggaacgcctgtcagttgattatggcaagaaatccaagctggagttctccatttacccggcaccccaggtttccacagctgtagttgagccctacaactccatcctcaccacccacaccaccctggagcactctgattgtgccttcatggtagacaatgaggccatctatgacatctgtcgtagaaacctcgatatcgagcgcccaacctacactaaccttaaccgccttattagccagattgtgtcctccatcactgcttccctgagatttgatggagccctgaatgttgacctgacagaattccagaccaacctggtcccctacccccgcatccacttccctctggccacatatgcccctgtcatctctgctgagaaagcctaccatgaacagctttctgtagcagacatcaccaatgcttgctttgagccagccaaccagatggtgaaatgtgaccctggccatggtaaatacatggcttgctgcctgttgtaccgtggtgacgtggttcccaaagatgtcaatgctgccattgccaccatcaaaaccaagcgcacgatccagtttgtggattggtgccccactggcttcaaggttggcatcaactaccagcctcccactgtggtgcctggtggagacctggccaaggtacagagagctgtgtgcatgctgagcaacaccacagccattgctgaggcctgggctcgcctggaccacaagtttgacctgatgtatgccaagcgtgcctttgttcactggtacgtgggtgaggggatggaggaaggcgagttttcagaggcccgtgaagatatggctgcccttgagaaggattatgaggaggttggtgtggattctgttgaaggagagggtgaggaagaaggagaggaatactaattatccattccttttggccctgcagcatgtcatgctcccagaatttcagcttcagcttaactgacagatgttaaagctttctggttagattgttttcacttggtgatcatgtcttttccatgtgtacctgtaatatttttccatcatatctcaaagtaaagtcattaacatca

SEQ ID NO: 153 - protein, 451 aa, Homo sapien
MRECISIHVGQAGVQIGNACWELYCLEHGIQPDGQMPSDKTIGGGDDSFNTFFSETGAGKHVPRAVFVDLEPTVIDEVRTGTYRQLFHPEQLITGKEDAANNYARGHYTIGKEIIDLVLDRIRKLADQCTRLQGFLVFHSFGGGTGSGFTSLLMERLSVDYGKKSKLEFSIYPAPQVSTAVVEPYNSILTTHTTLEHSDCAFMVDNEAIYDICRRNLDIERPTYTNLNRLISQIVSSITASLRFDGALNVDLTEFQTNLVPYPRIHFPLATYAPVISAEKAYHEQLSVADITNACFEPANQMVKCDPGHGKYMACCLLYRGDVVPKDVNAAIATIKTKRTIQFVDWCPTGFKVGINYQPPTVVPGGDLAKVQRAVCMLSNTTAIAEAWARLDHKFDLMYAKRAFVHWYVGEGMEEGEFSEAREDMAALEKDYEEVGVDSVEGEGEEEGEEY

SEQ ID NO: 154 - DNA, 5722 bp, Homo sapien
ggacgcacaggcattccccgcgcccctccagccctcgccgccctcgccaccgctcccggccgccgcgctccggtacacacaggatccctgctgggcaccaacagctccaccatggggctggcctggggactaggcgtcctgttcctgatgcatgtgtgtggcaccaaccgcattccagagtctggcggagacaacagcgtgtttgacatctttgaactcaccggggccgcccgcaaggggtctgggcgccgactggtgaagggccccgacccttccagcccagctttccgcatcgaggatgccaacctgatcccccctgtgcctgatgacaagttccaagacctggtggatgctgtgcgggcagaaaagggtttcctccttctggcatccctgaggcagatgaagaagacccggggcacgctgctggccctggagcggaaagaccactctggccaggtcttcagcgtggtgtccaatggcaaggcgggcaccctggacctcagcctgaccgtccaaggaaagcagcacgtggtgtctgtggaagaagctctcctggcaaccggccagtggaagagcatcaccctgtttgtgcaggaagacagggcccagctgtacatcgactgtgaaaagatggagaatgctgagttggacgtccccatccaaagcgtcttcaccagagacctggccagcatcgccagactccgcatcgcaaaggggggcgtcaatgacaatttccagggggtgctgcagaatgtgaggtttgtctttggaaccacaccagaagacatcctcaggaacaaaggctgctccagctctaccagtgtcctcctcacccttgacaacaacgtggtgaatggttccagccctgccatccgcactaactacattggccacaagacaaaggacttgcaagccatctgcggcatctcctgtgatgagctgtccagcatggtcctggaactcaggggcctgcgcaccattgtgaccacgctgcaggacagcatccgcaaagtgactgaagagaacaaagagttggccaatgagctgaggcggcctcccctatgctatcacaacggagttcagtacagaaataacgaggaatggactgttgatagctgcactgagtgtcactgtcagaactcagttaccatctgcaaaaaggtgtcctgccccatcatgccctgctccaatgccacagttcctgatggagaatgctgtcctcgctgttggcccagcgactctgcggacgatggctggtctccatggtccgagtggacctcctgttctacgagctgtggcaatggaattcagcagcgcggccgctcctgcgatagcctcaacaaccgatgtgagggctcctcggtccagacacggacctgccacattcaggagtgtgacaaaagatttaaacaggatggtggctggagccactggtccccgtggtcatcttgttctgtgacatgtggtgatggtgtgatcacaaggatccggctctgcaactctcccagcccccagatgaatgggaaaccctgtgaaggcgaagcgcgggagaccaaagcctgcaagaaagacgcctgccccatcaatggaggctggggtccttggtcaccatgggacatctgttctgtcacctgtggaggaggggtacagaaacgtagtcgtctctgcaacaaccccgcaccccagtttggaggcaaggactgcgttggtgatgtaacagaaaaccagatctgcaacaagcaggactgtccaattgatggatgcctgtccaatccctgctttgccggcgtgaagtgtactagctaccctgatggcagctggaaatgtggtgcttgtccccctggttacagtggaaatggcatccagtgcacagatgttgatgagtgcaaagaagtgcctgatgcctgcttcaaccacaatggagagcaccggtgtgagaacacggaccccggctacaactgcctgccctgccccccacgcttcaccggctcacagcccttcggccagggtgtcgaacatgccacggccaacaaacaggtgtgcaagccccgtaacccctgcacggatgggacccacgactgcaacaagaacgccaagtgcaactacctgggccactatagcgaccccatgtaccgctgcgagtgcaagcctggctacgctggcaatggcatcatctgcggggaggacacagacctggatggctggcccaatgagaacctggtgtgcgtggccaatgcgacttaccactgcaaaaaggataattgccccaaccttcccaactcagggcaggaagactatgacaaggatggaattggtgatgcctgtgatgatgacgatgacaatgataaaattccagatgacagggacaactgtccattccattacaacccagctcagtatgactatgacagagatgatgtgggagaccgctgtgacaactgtccctacaaccacaacccagatcaggcagacacagacaacaatggggaaggagacgcctgtgctgcagacattgatggagacggtatcctcaatgaacgggacaactgccagtacgtctacaatgtggaccagagagacactgatatggatggggttggagatcagtgtgacaattgccccttggaacacaatccggatcagctggactctgactcagaccgcattggagatacctgtgacaacaatcaggatattgatgaagatggccaccagaacaatctggacaactgtccctatgtgcccaatgccaaccaggctgaccatgacaaagatggcaagggagatgcctgtgaccacgatgatgacaacgatggcattcctgatgacaaggacaactgcagactcgtgcccaatcccgaccagaaggactctgacggcgatggtcgaggtgatgcctgcaaagatgattttgaccatgacagtgtgccagacatcgatgacatctgtcctgagaatgttgacatcagtgagaccgatttccgccgattccagatgattcctctggaccccaaagggacatcccaaaatgaccctaactgggttgtacgccatcagggtaaagaactcgtccagactgtcaactgtgatcctggactcgctgtaggttatgatgagtttaatgctgtggacttcagtggcaccttcttcatcaacaccgaaagggacgatgactatgctggatttgtctttggctaccagtccagcagccgcttttatgttgtgatgtggaagcaagtcacccagtcctactgggacaccaaccccacgagggctcagggatactcgggcctttctgtgaaagttgtaaactccaccacagggcctggcgagcacctgcggaacgccctgtggcacacaggaaacacccctggccaggtgcgcaccctgtggcatgaccctcgtcacataggctggaaagatttcaccgcctacagatggcgtctcagccacaggccaaagacgggtttcattagagtggtgatgtatgaagggaagaaaatcatggctgactcaggacccatctatgataaaacctatgctggtggtagactagggttgtttgtcttctctcaagaaatggtgttcttctctgacctgaaatacgaatgtagagatccctaatcatcaaattgttgattgaaagactgatcataaaccaatgctggtattgcaccttctggaactatgggcttgagaaaacccccaggatcacttctccttggcttccttcttttctgtgcttgcatcagtgtggactcctagaacgtgcgacctgcctcaagaaaatgcagttttcaaaaacagactcatcagcattcagcctccaatgaataagacatcttccaagcatataaacaattgctttggtttccttttgaaaaagcatctacttgcttcagttgggaaggtgcccattccactctgcctttgtcacagagcagggtgctattgtgaggccatctctgagcagtggactcaaaagcattttcaggcatgtcagagaagggaggactcactagaattagcaaacaaaaccaccctgacatcctccttcaggaacacggggagcagaggccaaagcactaaggggagggcgcatacccgagacgattgtatgaagaaaatatggaggaactgttacatgttcggtactaagtcattttcaggggattgaaagactattgctggatttcatgatgctgactggcgttagctgattaacccatgtaaataggcacttaaatagaagcaggaaagggagacaaagactggcttctggacttcctccctgatccccacccttactcatcaccttgcagtggccagaattagggaatcagaatcaaaccagtgtaaggcagtgctggctgccattgcctggtcacattgaaattggtggcttcattctagatgtagcttgtgcagatgtagcaggaaaataggaaaacctaccatctcagtgagcaccagctgcctcccaaaggaggggcagccgtgcttatatttttatggttacaatggcacaaaattattatcaacctaactaaaacattccttttctcttttttccgtaattactaggtagttttctaattctctcttttggaagtatgatttttttaaagtctttacgatgtaaaatatttattttttacttattctggaagatctggctgaaggattattcatggaacaggaagaagcgtaaagactatccatgtcatctttgttgagagtcttcgtgactgtaagattgtaaatacagattatttattaactctgttctgcctggaaatttaggcttcatacggaaagtgtttgagagcaagtagttgacatttatcagcaaatctcttgcaagaacagcacaaggaaaatcagtctaataagctgctctgccccttgtgctcagagtggatgttatgggattccttttttctctgttttatcttttcaagtggaattagttggttatccatttgcaaatgttttaaattgcaaagaaagccatgaggtcttcaatactgttttaccccatcccttgtgcatatttccagggagaaggaaagcatatacacttttttctttcatttttccaaaagagaaaaaaatgacaaaaggtgaaacttacatacaaatattacctcatttgttgtgtgactgagtaaagaatttttggatcaagcggaaagagtttaagtgtctaacaaacttaaagctactgtagtacctaaaaagtcagtgttgtacatagcataaaaactctgcagagaagtattcccaataaggaaatagcattgaaatgttaaatacaatttctgaaagttatgttttttttctatcatctggtataccattgctttatttttataaattattttctcattgccattggaatagaatattcagattgtgtagatatgctatttaaataatttatcaggaaatactgcctgtagagttagtatttctatttttatataatgtttgcacactgaattgaagaattgttggttttttcttttttttgttttttttttttttttttttttttttgcttttgacctcccatttttactatttgccaatacctttttctaggaatgtgcttttttttgtacacatttttatccattttacattctaaagcagtgtaagttgtatattactgtttcttatgtacaaggaacaacaataaatcatatggaaatttatattt

SEQ ID NO: 155 - protein, 1170 aa, Homo sapien
MGLAWGLGVLFLMHVCGTNRIPESGGDNSVFDIFELTGAARKGSGRRLVKGPDPSSPAFRIEDANLIPPVPDDKFQDLVDAVRAEKGFLLLASLRQMKKTRGTLLALERKDHSGQVFSVVSNGKAGTLDLSLTVQGKQHVVSVEEALLATGQWKSITLFVQEDRAQLYIDCEKMENAELDVPIQSVFTRDLASIARLRIAKGGVNDNFQGVLQNVRFVFGTTPEDILRNKGCSSSTSVLLTLDNNVVNGSSPAIRTNYIGHKTKDLQAICGISCDELSSMVLELRGLRTIVTTLQDSIRKVTEENKELANELRRPPLCYHNGVQYRNNEEWTVDSCTECHCQNSVTICKKVSCPIMPCSNATVPDGECCPRCWPSDSADDGWSPWSEWTSCSTSCGNGIQQRGRSCDSLNNRCEGSSVQTRTCHIQECDKRFKQDGGWSHWSPWSSCSVTCGDGVITRIRLCNSPSPQMNGKPCEGEARETKACKKDACPINGGWGPWSPWDICSVTCGGGVQKRSRLCNNPAPQFGGKDCVGDVTENQICNKQDCPIDGCLSNPCFAGVKCTSYPDGSWKCGACPPGYSGNGIQCTDVDECKEVPDACFNHNGEHRCENTDPGYNCLPCPPRFTGSQPFGQGVEHATANKQVCKPRNPCTDGTHDCNKNAKCNYLGHYSDPMYRCECKPGYAGNGIICGEDTDLDGWPNENLVCVANATYHCKKDNCPNLPNSGQEDYDKDGIGDACDDDDDNDKIPDDRDNCPFHYNPAQYDYDRDDVGDRCDNCPYNHNPDQADTDNNGEGDACAADIDGDGILNERDNCQYVYNVDQRDTDMDGVGDQCDNCPLEHNPDQLDSDSDRIGDTCDNNQDIDEDGHQNNLDNCPYVPNANQADHDKDGKGDACDHDDDNDGIPDDKDNCRLVPNPDQKDSDGDGRGDACKDDFDHDSVPDIDDICPENVDISETDFRRFQMIPLDPKGTSQNDPNWVVRHQGKELVQTVNCDPGLAVGYDEFNAVDFSGTFFINTERDDDYAGFVFGYQSSSRFYVVMWKQVTQSYWDTNPTRAQGYSGLSVKVVNSTTGPGEHLRNALWHTGNTPGQVRTLWHDPRHIGWKDFTAYRWRLSHRPKTGFIRVVMYEGKKIMADSGPIYDKTYAGGRLGLFVFSQEMVFFSDLKYECRDP

SEQ ID NO: 156 - DNA, 1299 bp, Homo sapien
ggcacgagggcggcggcggcggtagaggcggcggcggcggcggcagcgggctcggaggcagcggttgggctcgcggcgagcggacggggtcgagtcagtgcgttcgcgcgagttggaatcgaagcctcttaaaatggcagatgacttggacttcgagacaggagatgcaggggcctcagccaccttcccaatgcagtgctcagcattacgtaagaatggctttgtggtgctcaaaggccggccatgtaagatcgtcgagatgtctacttcgaagactggcaagcacggccacgccaaggtccatctggttggtattgacatctttactgggaagaaatatgaagatatctgcccgtcaactcataatatggatgtccccaacatcaaaaggaatgacttccagctgattggcatccaggatgggtacctatcactgctccaggacagcggggaggtacgagaggaccttcgtctccctgagggagaccttggcaaggagattgagcagaagtacgactgtggagaagagatcctgatcacggtgctgtctgccatgacagaggaggcagctgttgcaatcaaggccatggcaaaataactggctcccaggatggcggtggtggcagcagtgatcctctgaacctgcagaggccccctccccgagcctggcctggctctggcccggtcctaagctggactcctcctacacaatttatttgacgttttattttggttttccccaccccctcaatctgtcggggagcccctgcccttcacctagctcccttggccaggagcgagcgaagctgtggccttggtgaagctgccctcctcttctcccctcacactacagccctggtgggggagaagggggtgggtgctgcttgtggtttagtcttttttttttttttttttttttttttaaattcaatctggaatcagaaagcggtggattctggcaaatggtccttgtgccctccccactcatccctggtctggtcccctgttgcccatagccctttaccctgagcaccaccccaacagactggggaccagccccctcgcctgcctgtgtctctccccaaacccctttagatggggagggaagaggaggagaggggaggggacctgccccctcctcaggcatctgggagggccctgcccccatgggctttacccttccctgcgggctctctccccgacacatttgttaaaatcaaacctgaataaaactacaagtttaatatgaaaaaaaaaaaaaaaaaaaaaaaaaaaaaaaaaaaaaaaaaaaaaaaaaaa

SEQ ID NO: 157 - protein, 154 aa, Homo sapien
MADDLDFETGDAGASATFPMQCSALRKNGFVVLKGRPCKIVEMSTSKTGKHGHAKVHLVGIDIFTGKKYEDICPSTHNMDVPNIKRNDFQLIGIQDGYLSLLQDSGEVREDLRLPEGDLGKEIEQKYDCGEEILITVLSAMTEEAAVAIKAMAK

SEQ ID NO: 158 - DNA, 1501 bp, Homo sapien
agcgagtccttcttttcctgactgcagctcttttcattttgccatccttctccagctccatgatggttctgcaggtttctgcggccccccggacagtggctctgacggcgttactgatggtgctgctcacatctgtggtccagggcagggccactccagagaattacgtgtaccagggacggcaggaatgctacgcgtttaatgggacacagcgcttcctggagagatacatctacaaccgggaggagtacgcgcgcttcgacagcgacgtgggggagttccgggcggtgacggagctggggcggcctgctgcggagtactggaacagccagaaggacatcctggaggagaagcgggcagtgccggacagggtatgcagacacaactacgagctggacgaggccgtgaccctgcagcgccgagtccagcctaaggtgaacgtttccccctccaagaaggggcccctgcagcaccacaacctgcttgtctgccacgtgacagatttctacccaggcagcattcaagtccgatggttcctgaatggacaggaggaaacagctggggtcgtgtccaccaacctgatccgtaatggagactggaccttccagatcctggtgatgctggaaatgaccccccagcagggagacgtctacatctgccaagtggagcacaccagcctggacagtcctgtcaccgtggagtggaaggcacagtctgattctgcccagagtaagacattgacgggagctgggggcttcgtgctggggctcatcatctgtggagtgggcatcttcatgcacaggaggagcaagaaagttcaacgaggatctgcataaacagggttcctgacctcaccgaaaagactaatgtgccttagaacaagcatttgctgtgttttgttaacacctggttccaggacagaccctcagcttcccaagaggatactgctgccaagaagttgctctgaagtcagtttctatcgttctgctctttgattcaaagcactgtttctctcactgggcctccaaccatgttcccttcttcttagcaccacaaataatcaaaacccaacataagtgtttgctttcctttaaaaatatgcatcaaatcgtctctcattacttttctctgagggttttagtaaacagtaggagttaataaagaagttcattttggtttacacgtaggaaagaagagaagcatcaaagtggagatatgttaactattgtataatgtggcctgttatacatgacactcttctgaattgactgtatttcagtgagctgcccccaaatcaagtttagtgccctcatccatttatgtctcagaccgctattcttaactattcaatggtgagcagactgcaaatctgcctgataggacccatattcccacagcactaattcaacatatatcttactgagagcatgttttatcattaccattaagaagttaaatgaacatcagaatttaaaatcataaatataatctaatacacttt

SEQ ID NO: 159 - protein, 258 aa, Homo sapien [sequence omitted]

SEQ ID NO: 160 - DNA, 2992 bp, Homo sapien
ggcacgaggggcggccggtgagggggaagcaagtctggtctctgtgattgaagaagtcggctctgggctccagtgcgggaatcacacacatacctcagaatgccgggtctaagttgtagattttatcaacacaaatttcctgaggtggaagatgtagtgatggtgaatgtcagatccattgctgaaatgggggcttatgtcagcttgctggaatacaacaacattgaaggcatgattcttcttagtgaattatccagaaggcgtatccgttctatcaacaaactcatccgaattggcaggaatgagtgtgtggttgtcattagggtggacaaagaaaaaggatatattgatttgtcaaaaagaagagtttctccagaggaagcaatcaaatgtgaagacaaattcacaaaatccaaaactgtttatagcattcttcgtcatgttgctgaggtgttagaatacaccaaggatgagcagctggaaagcctattccagaggactgcctgggtctttgatgacaagtacaagagacctggatatggtgcctatgatgcatttaagcatgcagtctcagacccatctattttggatagtttagatttgaatgaagatgaacgggaagtactcattaataatattaataggcgcttgaccccacaggctgtcaaaattcgagcagatattgaagtggcttgttatggttatgaaggcattgatgctgtaaaagaagccctaagagcaggtttgaattgttctacagaaaacatgcccattaagattaatctaatagctcctcctcggtatgtaatgactacgacaaccctggagagaacagaaggcctttctgtcctcagtcaagctatggctgttatcaaagagaagattgaggaaaagaggggtgtgttcaatgttcaaatggagcccaaagtggtcacagatacagatgagactgaacttgcgaggcagatggagaggcttgaaagagaaaatgccgaagtggatggagatgatgatgcagaagaaatggaagccaaagctgaagattaactttgtgggaaacagagtccaatttaaggaacacagagcagcgcttcctggctgtaaatcctagacttgaaagttttccagtattgaaaacttcaaagctgaatattttttatttctaagtatttaaatgttctaacagatcagaacatgaaatgccctcctaaatgtcagctgttgtcacacagtagctccaacactttgagcatttttaagggagtggcctcatttcactagagacaaatctttaagaatagttctaaaattgggcttgtgatttccatttctgatgtctccagattggcacccctttctagttcaatgcctcacgagatttgccaggggcatccaaggcaaacaatcccaatctttctatataaaatgtattcaagcaaacatcaaataaatttctgggatatttaactataggcttcttccttcttgtcaccagttaaaagcattttaatactaagaccctaattcttttatctttattttagtcttgatgtggaactgtaggagcaggtgaataaaggatctctataacagatcctttcaaaagaagagttttagagaaaataaatttaactttaaccacagtgaaagttgacccttagcgggacaaagccttaaaatgcattgaaagaattagatcggttctgtgccttttatctatttgagattgatgacaacctgtgtgagagaatttatcacaccacgtccttattggaataataagctacttgccttgagtttataattcagggtggtaaagtatgtttttaaattttaaaaagcagctgcattttttatttagttggaatatcacccaattttttatttttattgctattaaaatatccactagatgccacctagagctccagttctttataacaaaacagggatctgtttgaacacttactgttgtttttttttttttacatgtttccatcatttctgtctttaagaactaattcgtacataataagtttcataggtaacacattatattctcttatgatacttgaggtaccagttgtatttaattttattcattatccctagatagctattaagatacttagattagacctaacccaccatagtcaatccaagactagactactcaatattaaagggtctggaaaatagaagagtgtgttgggcaggtagtttgtaccatttatgaaggtttgttcctttgttaaatttagcagcctgtactagcttttgaaatccagaagttttaacttccagtggctggtttctgagagagtgccatgattgctagccagcattccatattgggaatatgtagaggagaacctggatgtacttaagagtggcatataattttcacttctgtctgttgaggcaaaaaaaaaacaagtttagaaagctggcaacatgaagaatgcattcaaaatataacaggtgcttctttgttgtacgcagaggaattttttcttttgattttgtttactgaaatttgttatacttcaaaagccataacttgaaaaatactggtggcgtcgatggtgagtgatttttatcccacgtgggccttttgctcagttccatggcaattttgtaaattgaccctagccagagaatagatcagtatttcactgataccacgaggaaaagaacaaacaaaacttaaaagtattcatacaccttgctaacctaaaagacagcagggacaagatacatatgaggacaaggtatacacccagttctgaataacttgaagaacaggcttggcaaagaagtaagtttatccaaatcttgaatttctgccaggcatggtagctcatgcctgtaaccctggcacttaaggggccaaggcaggaggatcacttgaggccagtgagctgtgatcactccagtgcactcgagcctgggtgacagggcaagaccctgtctcaaaaaaaaaaaaaaaaaa

SEQ ID NO: 161 - protein, 315 aa, Homo sapien
MPGLSCRFYQHKFPEVEDVVMVNVRSIAEMGAYVSLLEYNNIEGMILLSELSRRRIRSINKLIRIGRNECVVVIRVDKEKGYIDLSKRRVSPEEAIKCEDKFTKSKTVYSILRHVAEVLEYTKDEQLESLFQRTAWVFDDKYKRPGYGAYDAFKHAVSDPSILDSLDLNEDEREVLINNINRRLTPQAVKIRADIEVACYGYEGIDAVKEALRAGLNCSTENMPIKINLIAPPRYVMTTTTLERTEGLSVLSQAMAVIKEKIEEKRGVFNVQMEPKVVTDTDETELARQMERLERENAEVDGDDDAEEMEAKAED

SEQ ID NO: 162 - DNA, 1196 bp, Homo sapien
aggtccggcttaccgtcgtttacgacagtgtcaggatcgcgggcttgctttccggtagcgtgggctgacgcctcgctcaatttctcacagggctgcgcaggtttcccccgtctgcgaatggaccactggaggggttcaaaggttcgcgtcccagtacgggaatgagcctctttgatctcttccggggctttttcggctttcctggacctcggagccacagagatcccttttttggagggatgactcgagatgaagatgatgatgaggaagaagaagaagaagggggctcatggggccgtgggaacccaaggttccatagtcctcagcacccccctgaggaatttggcttcggcttcagcttcagcccaggaggagggatacgtttccacgataacttcggctttgatgacctagtacgagatttcaatagcatcttcagcgatatgggggcctggaccttgccttcccatcctcctgaacttccaggtcctgagtcagagacacctggtgagagactacgggagggacagacacttcgggactcaatgcttaagtatccagatagtcaccagcccaggatctttgggggggtcttggagagtgatgcaagaagtgaatccccccaaccagcaccagactggggctcccagaggccatttcataggtttgatgatgtatggcctatggacccccatcctagaaccagagaggacaatgatcttgattcccaggtttcccaggagggtcttggcccggttctacagccccagcccaaatcctatttcaagagcatctctgtgaccaagatcactaaaccagatgggatagtggaggagcgccggactgtggtggacagtgagggccggacagagactacagtaacccgacacgaagcagatagcagtcctaggggtgatccagaatcaccaagacctccagccctggatgatgccttttccatcctggacttattcctgggacgttggttccggtcccggtagccttgttaaccctcagaggccttcaagtcctttccacctctcacccattgcccaccattaataagcttagcttctcttgccacctcaggggcttggatatgtggaatagtgaactggggccatgtcagtttgtcactcacccaaactgaccaataaaacctttatttatgctaaaaaaaaaaaaaaaaaaaaaaa

SEQ ID NO: 163 - protein, 279 aa, Homo sapien
MSLFDLFRGFFGFPGPRSHRDPFFGGMTRDEDDDEEEEEEGGSWGRGNPRFHSPQHPPEEFGFGFSFSPGGGIRFHDNFGFDDLVRDFNSIFSDMGAWTLPSHPPELPGPESETPGERLREGQTLRDSMLKYPDSHQPRIFGGVLESDARSESPQPAPDWGSQRPFHRFDDVWPMDPHPRTREDNDLDSQVSQEGLGPVLQPQPKSYFKSISVTKITKPDGIVEERRTVVDSEGRTETTVTRHEADSSPRGDPESPRPPALDDAFSILDLFLGRWFRSR

SEQ ID NO: 164 - DNA, 2922 bp, Homo sapien
ggacaccgggccatgcacgcccccaactgaagctgcatctcaaagccgaagattccagcagcccaggggatttcaaagagctcagactcagaggaacatctgcggagagacccccgaagccctctccagggcagtcctcatccagacgctccgctagtgcagacaggagcgcgcagtggccccggctcgccgcgccatggagcggatccccagcgcgcaaccaccccccgcctgcctgcccaaagcaccgggactggagcacggagacctaccagggatgtaccctgcccacatgtaccaagtgtacaagtcaagacggggaataaagcggagcgaggacagcaaggagacctacaaattgccgcaccggctcatcgagaaaaagagacgtgaccggattaacgagtgcatcgcccagctgaaggatctcctacccgaacatctcaaacttacaactttgggtcacttggaaaaagcagtggttcttgaacttaccttgaagcatgtgaaagcactaacaaacctaattgatcagcagcagcagaaaatcattgccctgcagagtggtttacaagctggtgagctgtcagggagaaatgtcgaaacaggtcaagagatgttctgctcaggtttccagacatgtgcccgggaggtgcttcagtatctggccaagcacgagaacactcgggacctgaagtcttcgcagcttgtcacccacctccaccgggtggtctcggagctgctgcagggtggtacctccaggaagccatcagacccagctcccaaagtgatggacttcaaggaaaaacccagctctccggccaaaggttcggaaggtcctgggaaaaactgcgtgccagtcatccagcggactttcgctcactcgagtggggagcagagcggcagcgacacggacacagacagtggctatggaggagaatcggagaagggcgacttgcgcagtgagcagccgtgcttcaaaagtgaccacggacgcaggttcacgatgggagaaaggatcggcgcaattaagcaagagtccgaagaaccccccacaaaaaagaaccggatgcagctttcggatgatgaaggccatttcactagcagtgacctgatcagctccccgttcctgggcccacacccacaccagcctcctttctgcctgcccttctacctgatcccaccttcagcgactgcctacctgcccatgctggagaagtgctggtatcccacctcagtgccagtgctatacccaggcctcaacgcctctgccgcagccctctctagcttcatgaacccagacaagatctcggctcccttgctcatgccccagagactcccttctcccttgccagctcatccgtccgtcgactcttctgtcttgctccaagctctgaagccaatcccccctttaaacttagaaaccaaagactaaactctctaggggatcctgctgctttgctttccttcctcgctacttcctaaaaagcaacaaaaaagtttttgtgaatgctgcaagattgttgcattgtgtatactgagataatctgaggcatggagagcagattcagggtgtgtgtgtgtgtgtgtgtgtgtgtgtgtatgtgcgtgtgcgtgcacatgtgtgcctgcgtgttggtataggactttaaagctccttttggcatagggaagtcacgaaggattgcttgacatcaggagacttgggggggattgtagcagacgtctgggcttttccccacccagagaatagcccccttcgatacacatcagctggattttcaaaagcttcaaagtcttggtctgtgagtcactcttcagtttgggagctgggtctgtggctttgatcagaaggtactttcaaaagagggctttccagggctcagctcccaaccagctgttaggaccccacccttttgcctttattgtcgacgtgactcaccagacgtcggggagagagagcagtcagaccgagctttctgctaacatggggaggtagcaggcactggcatagcacggtagtggtttggggaggtttccgcaggtctgctccccacccctgcctcggaagaataaagagaatgtagttccctactcaggctttcgtagtgattagcttactaaggaactgaaaatgggccccttgtacaagctgagctgccccggagggagggaggagttccctgggcttctggcacctgtttctaggcctaaccattagtacttactgtgcagggaaccaaaccaaggtctgagaaatgcggacaccccgagcgagcaccccaaagtgcacaaagctgagtaaaaagctgcccccttcaaacagaactagactcagttttcaattccatcctaaaactccttttaaccaagcttagcttctcaaaggcctaaccaagccttggcaccgccagatcctttctgtaggctaattcctcttgcccaacggcatatggagtgtccttattgctaaaaaggattccgtctccttcaaagaagttttatttttggtccagagtacttgttttcccgatgtgtccagccagctccgcagcagcttttcaagatgcactatgcctgattgctgatcgtgttttaactttttcttttcctgtttttattttggtattaagtcgttgcctttatttgtaaagctgttataaatatatattatataaatatattaaaaaggaaaatgtttcagatgtttatttgtataattacttgattcacacagtgagaaaaaatgaatgtattcctgtttttgaagagaagaataatttttttttctctagggagaggtacagtgtttatattttggagccttcctgaaggtgtaaaattgtaaatatttttatctatgagtaaatgttaagtagttgttttaaaatacttaataaaataattcttttcctgtggaag

SEQ ID NO: 165 - protein, 412 aa, Homo sapien
MERIPSAQPPPACLPKAPGLEHGDLPGMYPAHMYQVYKSRRGIKRSEDSKETYKLPHRLIEKKRRDRINECIAQLKDLLPEHLKLTTLGHLEKAVVLELTLKHVKALTNLIDQQQQKIIALQSGLQAGELSGRNVETGQEMFCSGFQTCAREVLQYLAKHENTRDLKSSQLVTHLHRVVSELLQGGTSRKPSDPAPKVMDFKEKPSSPAKGSEGPGKNCVPVIQRTFAHSSGEQSGSDTDTDSGYGGESEKGDLRSEQPCFKSDHGRRFTMGERIGAIKQESEEPPTKKNRMQLSDDEGHFTSSDLISSPFLGPHPHQPPFCLPFYLIPPSATAYLPMLEKCWYPTSVPVLYPGLNASAAALSSFMNPDKISAPLLMPQRLPSPLPAHPSVDSSVLLQALKPIPPLNLETKD

SEQ ID NO: 166 - DNA, 3984 bp, Homo sapien
gtcctttcacgcgtgtcttcgtgttggtgcgcttttcactggtcataaagtgctgctcacggccgtgaactgctacagcgtgaaggccgccacccgggtccaggatgcttttgccgccgccaagctcctggccctggccctgatcatcctgctgggcttcgtccagatcgggaagggtgatgtgtccaatctagatcccaagttctcatttgaaggcaccaaactggatgtggggaacattgtgctggcattatacagcggcctctttgcctatggaggatggaattacttgaatttcgtcacagaggaaatgatcaacccctacagaaacctgcccctggccatcatcatctccctgcccatcgtgacgctggtgtacgtgctgaccaacctggcctacttcaccaccctgtccaccgagcagatgctgtcgtccgaggccgtggccgtggacttcgggaactatcacctgggcgtcatgtcctggatcatccccgtcttcgtgggcctgtcctgctttggctccgtcaatgggtccctgttcacatcctccaggctcttcttcgtggggtcccgggaaggccacctgccctccatcctctccatgatccacccacagctcctcacccccgtgccgtccctcgtgttcacgtgtgtgatgacgctgctctacgccttctccaaggacatcttctccgtcatcaacttcttcagcttcttcaactggctctgcgtggccctggccatcatcggcatgatctggctgcgccacagaaagcctgagcttgagcggcccatcaaggtgaacctggccctgcctgtgttcttcatcctggcctgcctcttcctgatcgccgtctccttctggaagacacccgtggagtgtggcatcggcttcaccatcatcctcagcgggctgcccgtctacttcttcggggtctggtggaaaaacaagcccaagtggctcctccagggcatcttctccacgaccgtcctgtgtcagaagctcatgcaggtggtcccccaggagacatagccaggaggccgagtggctgccggaggagcatgcgcagaggccagttaaagtagatcacctcctcgaacccactccggttccccgcaacccacagctcagctgcccatcccagtcctcgccgtccctcccaggtcgggcagtggaggctgctgtgaaaactctggtacgaatctcatccctcaactgagggccagggacccaggtgtgcctgtgctcctgcccaggagcagcttttggtctccttgggccctttttcccttccctcctttgtttacttatatatatattttttttaaacttaaattttgggtcaacttgacaccactaagatgattttttaaggagctgggggaaggcaggagccttcctttctcctgccccaagggcccagaccctgggcaaacagagctactgagacttggaacctcattgctaccacagacttgcactgaagccagacagctgcccagacacatgggcttgtgacattcgtgaaaaccaaccctgtgggcttatgtctctgccttagggtttgcagagtggaaactcagccgtagggtggcactgggagggggtgggggatctgggcaaggtgggtgattcctcccaggaggtgcttgaggccccgatggactcctgaccataatcctagccccgagacaccatcctgagccagggaacagccccagggttggggggtgccggcatctcccctagctcaccaggcctggcctctgggcagtgtggcctcttggctatttctgttccagttttggaggctgagttctggttcatgcagacaaagccctgtccttcagtcttctagaaacagagacaagaaaggcagacacaccgcggccaggcacccatgtgggcgcccaccctgggctccacacagcagtgtcccctgccccagaggtcgcagctaccctcagcctccaatgcattggcctctgtaccgcccggcagccccttctggccggtgctgggttcccactcccggcctaggcacctccccgctctccctgtcacgctcatgtcctgtcctggtcctgatgcccgttgtctaggagacagagccaagcactgctcacgtctctgccgcctgcgtttggaggcccctgggctctcacccagtccccacccgcctgcagagagggaactagggcaccccttgtttctgttgttcccgtgaatttttttcgctatgggaggcagccgaggcctggccaatgcggcccactttcctgagctgtcgctgcctccatggcagcagccaaggacccccagaacaagaagacccccccgcaggatccctcctgagctcggggggctctgccttctcaggccccgggcttcccttctccccagccagaggtggagccaagtggtccagcgtcactccagtgctcagctgtggctggaggagctggcctgtggcacagccctgagtgtcccaagccgggagccaacgaagccggacacggcttcactgaccagcggctgctcaagccgcaagctctcagcaagtgcccagtggagcctgccgcccccacctgggcaccgggaccccctcaccatccagtgggcccggagaaacctgatgaacagtttggggactcaggaccagatgtccgtctctcttgcttgaggaatgaagacctttattcacccctgccccgttgcttcccgctgcacatggacagacttcacagcgtctgctcataggacctgcatccttcctggggacgaattccactcgtccaagggacagcccacggtctggaggccgaggaccaccagcaggcaggtggactgactgtgttgggcaagacctcttccctctgggcctgttctcttggctgcaaataaggacagcagctggtgccccacctgcctggtgcattgctgtgtgaatccaggaggcagtggacatcgtaggcagccacggccccaggtccaggagaagtgctccctggaggcacggaccactgcttcccactggggccggcggggcccacgcacgacgtcagcctcttaccttcccgcctcggctaggggtcctcgggatgccgttctgttccaacctcctgttctgggaggtggacatgcctcaaggatacagggagccggcggcctctcgacggcacgcacttcctgttggctgctgcggctgtgggcgagcatgggggctgccagcgtctgttgtggaaagtagctgctagtgaaatggctggggccgctggggtccgtcttcacactgcgcaggtctcttctgggcgtctgagctggggtgggagctcctccgcagaaggttggtggggggtccagtctgtgatccttggtgctgtgtgccccactccagcctggggaccccacttcagaaggtaggggccgtgtcccgcggtgctgactgaggcctgcttccccctccccctcctgctgtgctggaattccacagggaccagggccaccgcaggggactgtctcagaagacttgatttttccgtccctttttctccacactccactgacaaacgtccccagcggtttccacttgtgggcttcaggtgttttcaagcacaacccaccacaacaagcaagtgcattttcagtcgttgtgcttttttgttttgtgctaacgtcttactaatttaaagatgctgtcggcaccatgtttatttatttccagtggtcatgctcagccttgctgctctgcgtggcgcaggtgccatgcctgctccctgtctgtgtcccagccacgcagggccatccactgtgacgtcggccgaccaggctggacaccctctgccgagtaatgacgtgtgtggctgggaccttctttattctgtgttaatggctaacctgttacactgggctgggttgggtagggtgttctggcttttttgtggggtttttatttttaaagaaacactcaatcatcctag

SEQ ID NO: 167 - protein, 241 aa, Homo sapien
MINPYRNLPLAIIISLPIVTLVYVLTNLAYFTTLSTEQMLSSEAVAVDFGNYHLGVMSWIIPVFVGLSCFGSVNGSLFTSSRLFFVGSREGHLPSILSMIHPQLLTPVPSLVFTCVMTLLYAFSKDIFSVINFFSFFNWLCVALAIIGMIWLRHRKPELERPIKVNLALPVFFILACLFLIAVSFWKTPVECGIGFTIILSGLPVYFFGVWWKNKPKWLLQGIFSTTVLCQKLMQVVPQET

SEQ ID NO: 168 - DNA, 3176 bp, Homo sapien
tgaactgagcggcccctgagctgacagatacactgcgcagtggaacggcgagcgagccgacgggcgagtgaggggcgcacatgatcacctcggccgctggaattatttctcttctggatgaagatgaaccacagcttaaggaatttgcactacacaaattgaatgcagttgttaatgacttctgggcagaaatttccgagtccgtagacaaaatagaggttttatacgaagatgaaggtttccggagtcggcagtttgcagccttagtggcatctaaagtattttatcacctgggggcttttgaggagtctctgaattatgctcttggagcaagggacctcttcaatgtcaatgataactctgaatatgtggaaactattatagcaaaatgcattgatcactacaccaaacaatgtgtggaaaatgcagatttgcctgaaggagaaaaaaaaccaattgaccagagattggaaggcatcgtaaataaaatgttccagcgatgtctagatgatcacaagtataaacaggctattggcattgctctggagacacgaagactggacgtctttgaaaagaccatactggagtcgaatgatgtcccaggaatgttagcttatagccttaagctctgcatgtctttaatgcagaataaacagtttcggaataaagtactaagagttctagttaaaatctacatgaacttggagaaacctgatttcatcaatgtttgtcagtgcttaattttcttagatgatcctcaggctgtgagtgatatcttagagaaactggtaaaggaagacaacctcctgatggcatatcagatttgttttgatttgtatgaaagtgctagccagcagtttttgtcatctgtaatccagaatcttcgaactgttggcacccctattgcttctgtgcctggatccactaatacgggtactgttccgggatcagagaaagacagtgactcgatggaaacagaagaaaagacaagcagtgcatttgtaggaaagacaccagaagccagtccagagcctaaggaccagactttgaaaatgattaaaattttaagtggtgaaatggctattgagttacatctgcagttcttaatacgaaacaataatacagacctcatgattctaaaaaacacaaaggatgcagtacggaattctgtatgtcatactgcaaccgttatagcaaactcttttatgcactgtgggacaaccagtgaccagtttcttagagataatttggaatggttagccagagccactaactgggcaaaatttactgctacagccagtttgggtgtaattcataagggtcatgaaaaagaagcattacagttaatggcaacataccttcccaaggatacttctccaggatcagcctatcaggaaggtggaggtctctatgcactaggtcttattcatgccaatcatggtggtgatataattgactatctgcttaatcagcttaagaacgccagcaatgatatcgttagacacggtggcagtctgggccttggtttggcagccatgggaactgcacgtcaagatgtttatgatttgctaaaaacaaacctttatcaggatgatgcagtaacaggggaagcagctggcctggccctaggtttggttatgttgggctctaaaaatgctcaggctattgaggacatggttggttatgcacaagaaactcaacatgagaagattctgcgtggtcttgcagttggcatagctttagtaatgtatgggaggatggaagaggctgatgctctcattgaatctctctgtcgtgacaaggacccaattcttcgaaggtctggaatgtatactgtagccatggcttattgtggctctggtaacaacaaagcaattcgacgcctgctacatgtggctgtaagtgatgtgaatgatgatgtcaggagtgcagcagtagaatcacttgggttcattctattcagaacccctgaacagtgcccaagtgttgtctctttgttgtcagagagttacaaccctcatgtgcgctacggagctgcaatggccttggggatatgctgtgctggtacaggaaacaaggaagccattaatttgctagaaccaatgacaaacgaccccgtgaactacgtgaggcaaggggcactcatagcttcagctctcatcatgatccagcagactgaaatcacttgtccaaaggtgaatcagttcagacagctgtattccaaagtcatcaatgataagcatgatgatgtcatggccaagtttggcgctattctggcccagggcatactggatgcaggtggtcataatgtcacaatctccttgcagtccaggactgggcatactcatatgccttctgtggttggcgtccttgtatttacccagttttggttctggtttcctctttcacacttcctgtcattggcttatacccctacctgtgtcattggccttaacaaggacttaaagatgccgaaagttcagtataaatcgaactgtaaaccatccacatttgcatatcctgcccctctggaagtaccaaaagaaaaagaaaaggaaaaggtttctactgctgtattatctataactgccaaggctaaaaagaaggaaaaagaaaaggaaaaaaaggaggaggagaaaatggaagtggatgaggcagagaaaaaggaggaaaaagagaagaaaaaagaacctgagccaaacttccagttattggataacccagcccgagttatgcctgcccagcttaaggtcctaaccatgccggagacctgtagataccagcctttcaaaccactctctattggaggcatcatcattctgaaggataccagtgaagacattgaggagctggtggaacctgtggcagcacatggcccaaaaatcgaggaggaggaacaagagccagaacccccagaaccatttgagtatattgatgattaaggaccagaggatctcacttgcttatctgaagaagattgtccaggctcatattgggaatgcttatgaggaaattcatgccgagacctgctattcaatgcatgtatcgttgcctctgcactgacctgaagaaccctgtctccaagtctttggttgaagagaagatatatgactgttgagtgtgctctttcacagaacttggttttcaaataaatataagatctccagatggacaag

SEQ ID NO: 169 - protein, 953 aa, Homo sapien [sequence omitted]

SEQ ID NO: 170 - DNA, 3892 bp, Homo sapien
tagaatacttgggtgacatctgcctgagagatctccaagaattacagaagacaaaaatactaatgcatttgagaaagcggtagttttggggggagggggaaaaagcaactgctttcctgatctgcaacttggctggatgctaagatgtcagtggacatgaatagccaggggtctgacagcaatgaagaggactatgacccaaattgtgaggaagaggaagaagaagaagaagacgaccctggggacatagaggactattacgtgggagtagccagcgatgtggagcagcagggggctgatgcctttgatcccgaggagtaccagttcacttgcttgacctacaaggaatctgagggtgccctcaatgagcacatgaccagcttagcttctgtcctaaaggtatctcattcagttgctaaacttatattagttaatttccactggcaagtttcagagatattggacagatacaagtccaattctgctcaactgcttgttgaggctcgagttcagcctaatccatcaaaacatgttcccacatcccatccccctcaccactgtgcagtgtgtatgcagtttgtgcgaaaggaaaacctactctctctggcctgtcagcaccagttttgccgcagctgctgggagcagcactgctcagttctcgtcaaggacggcgtgggcgtgggagtctcttgcatggctcaggactgtccactccgtacaccagaggactttgtgtttccattgcttcccaatgaagaattgagagagaaatacaggcgctacctcttcagggactatgtggagagtcattaccagctccagctgtgccctggtgcagactgccccatggttattcgggtacaggagcctagagctcgccgagtacagtgcaatcggtgcaacgaggtcttctgtttcaagtgtcgtcagatgtatcacgcacccacagactgtgccacaatccggaaatggctcacgaagtgtgcagacgactctgaaacagccaactacattagtgctcacactaaagactgtcccaagtgcaacatctgcattgagaagaatggaggctgcaatcacatgcaatgctccaaatgtaaacacgacttctgctggatgtgtctaggagattggaagactcatggcagtgaatactatgagtgcagtcgttacaaggagaatcctgacatcgtgaaccagagccaacaagcccaggcgagggaagccctcaagaagtacttattctactttgagaggtgggaaaaccacaataaaagcttgcagctagaggcacagacataccagcggattcacgagaagattcaggagagggtcatgaacaatctggggacatggatcgactggcagtacctacagaatgctgccaagctcttggccaagtgtcgatacaccctgcaatacacctacccatatgcatattacatggagtccggacccaggaagaagctgtttgaataccagcaggctcagctggaggctgagatcgaaaacctctcatggaaagtggagcgtgcagacagctatgacagaggggacttggagaaccagatgcatatagcggagcagcggaggagaaccctgctgaaagatttccatgacacctaagttgggatgtggatgtgccggggtgaggaagatgtggctgcaaggtctcccggctgccatactgcatgctgcaggctctgcctttcatgaccccaggcaacagccagggccccactcctgagagacactggcaacacctcttagttgatttctgttttcttctcttttcactttttgtttctaccagggtagaggccatgttgaactggcctcttttcaggacttttatttccccctggatggttgttgggagggagggaaagtgttttctgaatggctattaatagtattagatcattacaacttatgtaactttcaaaggttgtacaattatacaaaaaaaaaaaaaaaggcaaactataggataacacagagccctttttgaaaataaattggcattggagtgttttaccctctagctgttttacttagaatgtaacatatgctgcctacccacctcaaaatgtctgtactgcaagagggccctgggcctctgctttccatattcacgtttggccagagttgtagtcccaaagaagagcatgggtggcagatggtagggaattgaactggcctgtgcaatgggcatggagcacaaggggtcacagcatgcctcctgccttaccgtggcagtacggagacagtccagaacatggtcttcttgccacggggtgttgttgtctctggtggtgctgcatgtctgtggctcacctttattcttgaaactgaggtttacctggatctggctactgaggctagagcccacagcagaatggggttgggcctgtggcccccaaactagggggtgtgggttcatcacagtgttgccttttgtctcctaaagatagggatctacttttgaagggaattgttcctcccaaataaatttgctttaccttggtcctttcttttgtgccagtattcaagtggtatagctctgagcagggtcacatttggccaaacctgacactgtcttgctgcattctcctttggcaaacatcagggtcagaattcaggatagcccttcctagggcactggactttctggcatgggggctgtgtttgcacaagttattttcatgttacctggagagtgtccagaggctgctctgaggctgaggtgtgttcccccttgcctggttccagctgtcagagggataccatcctagggtctgggaatccaaggccacgagactccttggtttgtggtccgagatcctgtactaaggagggtctggccagaggaacagaccagcttttgcacaatgaagcgcaagggaacaagtggtttgcctggtgtcctacctgtcctgaacctggtcctgtgggccattgaaaagttagatctgtgatctctggggtttttgtggctttgttcaatgcttccactctagggcaggcagagcagtctatactctcccaagcctgcttgacctccaagtagagctgatacagagatctgtgaatattgtgatagaaattctttggtattcatacatttcagctgcaagtcagcaatttcccaggtaccatgtaagctataaaacagtcattcttaaagacagaggatagctgtgactcatgggatcatgaggtccatggctggttgcaggttccctttttccttcctcaggttttgtctcttcctgtgttgtccccagcaagggagagactgtggggtggattgggagaacagattaggagtatagcaaatgaacccagaatggaacagtggggagctaactgtgaatgaggagagtacctgctgcaggacctggaggtcaggtgtgaatgctgtattggcacagggaataaatatcctggcgtctggagccttcacctctccgtcaagtccttcctgtgatactgccatggcacaggatctgagttgcagctctgcaccctaaatcacaccctgggcattgtctgggctgcagggctgccaggttctgtacttgtgtccagctgtggccctggatgctggagctggagggttttctgtgctcagactgtagcctgtagctcttggcctgtgtagagccccctcctgtgccctcagtggctgtcgtttgttaacatcatcaggaagatgggaaaggtcaggcagaatttttctgccctacaaagggtggaagagaaaggacacagtattttcatgaatttaccatatatctttgtttttcttcaacgaaaaagttaattgaggcaatgtcatctgctcaaagttgagtggtttattcacaataaactgtaagtttctgattat

SEQ ID NO: 171 - protein, 493 aa, Homo sapien
MSVDMNSQGSDSNEEDYDPNCEEEEEEEEDDPGDIEDYYVGVASDVEQQGADAFDPEEYQFTCLTYKESEGALNEHMTSLASVLKVSHSVAKLILVNFHWQVSEILDRYKSNSAQLLVEARVQPNPSKHVPTSHPPHHCAVCMQFVRKENLLSLACQHQFCRSCWEQHCSVLVKDGVGVGVSCMAQDCPLRTPEDFVFPLLPNEELREKYRRYLFRDYVESHYQLQLCPGADCPMVIRVQEPRARRVQCNRCNEVFCFKCRQMYHAPTDCATIRKWLTKCADDSETANYISAHTKDCPKCNICIEKNGGCNHMQCSKCKHDFCWMCLGDWKTHGSEYYECSRYKENPDIVNQSQQAQAREALKKYLFYFERWENHNKSLQLEAQTYQRIHEKIQERVMNNLGTWIDWQYLQNAAKLLAKCRYTLQYTYPYAYYMESGPRKKLFEYQQAQLEAEIENLSWKVERADSYDRGDLENQMHIAEQRRRTLLKDFHDT

SEQ ID NO: 172 - DNA, 1812 bp, Homo sapien
tagctaggcaggaagtcggcgcgggcggcgcggacagtatctgtgggtacccggagcacggagatctcgccggctttacgttcacctcggtgtctgcagcaccctccgcttcctctcctaggcgacgagacccagtggctagaagttcaccatgtctattctcaagatccatgccagggagatctttgactctcgcgggaatcccactgttgaggttgatctcttcacctcaaaaggtctcttcagagctgctgtgcccagtggtgcttcaactggtatctatgaggccctagagctccgggacaatgataagactcgctatatggggaagggtgtctcaaaggctgttgagcacatcaataaaactattgcgcctgccctggttagcaagaaactgaacgtcacagaacaagagaagattgacaaactgatgatcgagatggatggaacagaaaataaatctaagtttggtgcgaacgccattctgggggtgtcccttgccgtctgcaaagctggtgccgttgagaagggggtccccctgtaccgccacatcgctgacttggctggcaactctgaagtcatcctgccagtcccggcgttcaatgtcatcaatggcggttctcatgctggcaacaagctggccatgcaggagttcatgatcctcccagtcggtgcagcaaacttcagggaagccatgcgcattggagcagaggtttaccacaacctgaagaatgtcatcaaggagaaatatgggaaagatgccaccaatgtgggggatgaaggcgggtttgctcccaacatcctggagaataaagaaggcctggagctgctgaagactgctattgggaaagctggctacactgataaggtggtcatcggcatggacgtagcggcctccgagttcttcaggtctgggaagtatgacctggacttcaagtctcccgatgaccccagcaggtacatctcgcctgaccagctggctgacctgtacaagtccttcatcaaggactacccagtggtgtctatcgaagatccctttgaccaggatgactggggagcttggcagaagttcacagccagtgcaggaatccaggtagtgggggatgatctcacagtgaccaacccaaagaggatcgccaaggccgtgaacgagaagtcctgcaactgcctcctgctcaaagtcaaccagattggctccgtgaccgagtctcttcaggcgtgcaagctggcccaggccaatggttggggcgtcatggtgtctcatcgttcgggggagactgaagataccttcatcgctgacctggttgtggggctgtgcactgggcagatcaagactggtgccccttgccgatctgagcgcttggccaagtacaaccagctcctcagaattgaagaggagctgggcagcaaggctaagtttgccggcaggaacttcagaaaccccttggccaagtaagctgtgggcaggcaagcccttcggtcacctgttggctacacagacccctcccctcgtgtcagctcaggcagctcgaggcccccgaccaacacttgcaggggtccctgctagttagcgccccaccgccgtggagttcgtaccgcttccttagaacttctacagaagccaagctccctggagccctgttggcagctctagctttgcagtcgtgtaattggcccaagtcattgtttttctcgcctcactttccaccaagtgtctagagtcatgtgagcctcgtgtcatctccggggtggccacaggctagatccccggtggttttgtgctcaaaataaaaagcctcagtgacccatgag

SEQ ID NO: 173 - protein, 434 aa, Homo sapien
MSILKIHAREIFDSRGNPTVEVDLFTSKGLFRAAVPSGASTGIYEALELRDNDKTRYMGKGVSKAVEHINKTIAPALVSKKLNVTEQEKIDKLMIEMDGTENKSKFGANAILGVSLAVCKAGAVEKGVPLYRHIADLAGNSEVILPVPAFNVINGGSHAGNKLAMQEFMILPVGAANFREAMRIGAEVYHNLKNVIKEKYGKDATNVGDEGGFAPNILENKEGLELLKTAIGKAGYTDKVVIGMDVAASEFFRSGKYDLDFKSPDDPSRYISPDQLADLYKSFIKDYPVVSIEDPFDQDDWGAWQKFTASAGIQVVGDDLTVTNPKRIAKAVNEKSCNCLLLKVNQIGSVTESLQACKLAQANGWGVMVSHRSGETEDTFIADLVVGLCTGQIKTGAPCRSERLAKYNQLLRIEEELGSKAKFAGRNFRNPLAK

SEQ ID NO: 174 - DNA, 2287 bp, Homo sapien
ggctgaggcagtggctccttgcacagcagctgcacgcgccgtggctccggatcttcttcgtctttgcagcgtagcccgagtcggtcagcgccagaggacctcagcagccatgtcgaagccccatagtgaagccgggactgccttcattcagacccagcagctgcacgcagccatggctgacacattcctggagcacatgtgccgcctggacattgattcaccacccatcacagcccggaacactggcatcatctgtaccattggcccagcttcccgatcagtggagacgttgaaggagatgattaagtctggaatgaatgtggctcgtctgaacttctctcatggaactcatgagtaccatgcggagaccatcaagaatgtgcgcacagccacggaaagctttgcttctgaccccatcctctaccggcccgttgctgtggctctagacactaaaggacctgagatccgaactgggctcatcaagggcagcggcactgcagaggtggagctgaagaagggagccactctcaaaatcacgctggataacgcctacatggaaaagtgtgacgagaacatcctgtggctggactacaagaacatctgcaaggtggtggaagtgggcagcaagatctacgtggatgatgggcttatttctctccaggtgaagcagaaaggtgccgacttcctggtgacggaggtggaaaatggtggctccttgggcagcaagaagggtgtgaaccttcctggggctgctgtggacttgcctgctgtgtcggagaaggacatccaggatctgaagtttggggtcgagcaggatgttgatatggtgtttgcgtcattcatccgcaaggcatctgatgtccatgaagttaggaaggtcctgggagagaagggaaagaacatcaagattatcagcaaaatcgagaatcatgagggggttcggaggtttgatgaaatcctggaggccagtgatgggatcatggtggctcgtggtgatctaggcattgagattcctgcagagaaggtcttccttgctcagaagatgatgattggacggtgcaaccgagctgggaagcctgtcatctgtgctactcagatgctggagagcatgatcaagaagccccgccccactcgggctgaaggcagtgatgtggccaatgcagtcctggatggagccgactgcatcatgctgtctggagaaacagccaaaggggactatcctctggaggctgtgcgcatgcagaacctgattgcccgtgaggcagaggctgccatctaccacttgcaattatttgaggaactccgccgcctggcgcccattaccagcgaccccacagaagccaccgccgtgggtgccgtggaggcctccttcaagtgctgcagtggggccataatcgtcctcaccaagtctggcaggtctgctcaccaggtggccagataccgcccacgtgcccccatcattgctgtgacccggaatccccagacagctcgtcaggcccacctgtaccgtggcatcttccctgtgctgtgcaaggacccagtccaggaggcctgggctgaggacgtggacctccgggtgaactttgccatgaatgttggcaaggcccgaggcttcttcaagaagggagatgtggtcattgtgctgaccggatggcgccctggctccggcttcaccaacaccatgcgtgttgttcctgtgccgtgatggaccccagagcccctcctccagcccctgtcccacccccttcccccagcccatccattaggccagcaacgcttgtagaactcactctgggctgtaacgtggcactggtaggttgggacaccagggaagaagatcaacgcctcactgaaacatggctgtgtttgcagcctgctctagtgggacagcccagagcctggctgccccatcatgtggccccacccaatcaagggaagaaggaggaatgctggactggaggcccctggagccagatggcaagagggtgacagcttcctttcctgtgtgtactctgtccagttcctttagaaaaaatggatgcccagaggactcccaaccctggcttggggtcaagaaacagccagcaagagttaggggccttagggcactgggctgttgttccattgaagccgactctggccctggcccttacttgcttctctagctctctaggcctctccagtttgcacctgtccccaccctccactcagctgtcctgcagcaaacactccaccctccaccttccattttcccccactactgcagcacctccaggcctgttgccgc

SEQ ID NO: 175 - protein, 531 aa, Homo sapien
MSKPHSEAGTAFIQTQQLHAAMADTFLEHMCRLDIDSPPITARNTGIICTIGPASRSVETLKEMIKSGMNVARLNFSHGTHEYHAETIKNVRTATESFASDPILYRPVAVALDTKGPEIRTGLIKGSGTAEVELKKGATLKITLDNAYMEKCDENILWLDYKNICKVVEVGSKIYVDDGLISLQVKQKGADFLVTEVENGGSLGSKKGVNLPGAAVDLPAVSEKDIQDLKFGVEQDVDMVFASFIRKASDVHEVRKVLGEKGKNIKIISKIENHEGVRRFDEILEASDGIMVARGDLGIEIPAEKVFLAQKMMIGRCNRAGKPVICATQMLESMIKKPRPTRAEGSDVANAVLDGADCIMLSGETAKGDYPLEAVRMQNLIAREAEAAIYHLQLFEELRRLAPITSDPTEATAVGAVEASFKCCSGAIIVLTKSGRSAHQVARYRPRAPIIAVTRNPQTARQAHLYRGIFPVLCKDPVQEAWAEDVDLRVNFAMNVGKARGFFKKGDVVIVLTGWRPGSGFTNTMRVVPVP

SEQ ID NO: 176 - DNA, 1425 bp, Homo sapien
ggcttggtcactatggaggagataggcatcttggtggagaaggctcaggatgagatcccagcactgtccgtgtcccggccccagaccggcctgtccttcctgggccctgagcctgaggacctggaggacctgtacagccgctacaagaagctgcagcaagagctggagttcctggaggtgcaggaggaatacatcaaagatgagcaaaagaacctgaaaaaggaatttctccatgcccaggaggaggtgaagcgaatccaaagcatcccgctggtcatcggacaatttctggaggctgtggatcagaatacagccatcgtgggctctaccacaggctccaactattatgtgcgcatcctgagcaccatcgatcgggagctgctcaagcccaacgcctcagtggccctccacaagcacagcaatgcactggtggacgtgctgccccccgaagccgacagcagcatcatgatgctcacctcagaccagaagccagatgtgatgtacgcggacatcggaggcatggacatccagaagcaggaggtgcgggaggccgtggagctcccgctcacgcatttcgagctctacaagcagatcggcatcgatcccccccgaggcgtcctcatgtatggcccacctggctgtgggaagaccatgttggcaaaggcggtggcacatcacacaacagctgcattcatccgggtcgtgggctcggagtttgtacagaagtatctgggtgagggcccccgcatggtccgggatgtgttccgcctggccaaggagaatgcacctgccatcatcttcatagacgagattgatgccatcgccaccaagagattcgatgctcagacaggggccgacagggaggttcagaggatcctgctggagctgctgaatcagatggatggatttgatcagaatgtcaatgtcaaggtaatcatggccacaaacagagcagacaccctggatccggccctgctacggccaggacggctggaccgtaaaattgaatttccacttcctgaccgccgccagaagagattgattttctccactatcactagcaagatgaacctctctgaggaggttgacttggaagactatgtggcccggccagataagatttcaggagctgatatcaactccatctgtcaggagagtggaatgttggctgtccgtgaaaaccgctacattgtcctggccaaggacttcgagaaagcatacaagactgtcatcaagaaggacgagcaggagcatgagttttacaagtgacccttcccttccctccaccacaccactcaggggctggggcttctctcgcacccccagcacctctgtcccaaaacctcattcccttttttctttacccaggattggtttcttcaataaatagataagatcgaatccaaaaaaaaaaaaaaaaaaaaa

SEQ ID NO: 177 - protein, 418 aa, Homo sapien
MEEIGILVEKAQDEIPALSVSRPQTGLSFLGPEPEDLEDLYSRYKKLQQELEFLEVQEEYIKDEQKNLKKEFLHAQEEVKRIQSIPLVIGQFLEAVDQNTAIVGSTTGSNYYVRILSTIDRELLKPNASVALHKHSNALVDVLPPEADSSIMMLTSDQKPDVMYADIGGMDIQKQEVREAVELPLTHFELYKQIGIDPPRGVLMYGPPGCGKTMLAKAVAHHTTAAFIRVVGSEFVQKYLGEGPRMVRDVFRLAKENAPAIIFIDEIDAIATKRFDAQTGADREVQRILLELLNQMDGFDQNVNVKVIMATNRADTLDPALLRPGRLDRKIEFPLPDRRQKRLIFSTITSKMNLSEEVDLEDYVARPDKISGADINSICQESGMLAVRENRYIVLAKDFEKAYKTVIKKDEQEHEFYK

SEQ ID NO: 178 - DNA, 2644 bp, Homo sapien
ccgaggccaagtcccgggcgctagcccacctcccacccgcctcttggctcctctcctctaggccgtcgctttcgggttctctcatcgcttcgtcgttcgccaatgtttgaggagaaggccagcagtccttcagggaagatgggaggcgaggagaagccgattggtgctggtgaagagaagcaaaaggaaggaggcaaaaagaagaacaaagaaggatctggagatggaggtcgagctgagttgaatccttggcctgaatatatttacacacgtcttgagatgtataatatactaaaagcagaacatgattccattctggcagaaaaggcagaaaaagatagcaagccaattaaagtcactttgcctgatggtaaacaggttgatgcggaatcttggaaaactacaccatatcaaattgcctgtggaattagtcaaggcctggccgacaacaccgttattgctaaagtaaataatgttgtgtgggacctggaccgccctctggaagaagattgtaccttggagcttctcaagtttgaggatgaggaagctcaggcagtgtattggcactctagtgctcacataatgggtgaaggcatggaaagagtctatggtggatgtttatgctacggtccgccaatagaaaatggattctattatgacatgtacctcgaagaagggggtgtgtctagcaatgatttctcttctctggaggctttgtgtaagaaaatcattaaagaaaaacaagcttttgaaagactggaagttaagaaagaaactttactggcaatgtttaagtacaacaagttcaaatgccggatattgaatgaaaaggtgaatactccaactaccacagtctatagatgtggccctttgatagatctctgccggggtcctcatgttagacacacgggcaaaattaaggctttaaaaatacacaaaaattcctccacgtactgggaaggcaaagcagatatggagactctccagagaatttatggcatttcattcccagatcctaaaatgttgaaagagtgggagaagttccaagaggaagctaaaaaccgagatcataggaaaattggcagggaccaagaactatatttctttcatgaactcagccctggaagttgcttttttctgccaaaaggagtctatatttataatgcacttattgaattcattaggagcgaatataggaaaagaggattccaggaggtagtcaccccaaacatcttcaacagccgactctggatgacctcgggccactggcagcactacagcgagaacatgttctcctttgaggtggagaaggagctgtttgccctgaaacccatgaactgcccaggacactcccttatgtttgatcatcggccaaggtcctggcgagaactgcctctgcggctagctgattttgggggtcttcataggaacgagctgtctggagcactcacaggactcacccgggtacgaagattccaacaggatgatgctcacatattctgtgccatggagcagattgaagatgaaataaaaggttgtttggattttctacgtacggtatatagcgtatttggattttcttttaaactaaacctttctactcgcccggaaaaattccttggagatatcgaagtatgggatcaagctgagaaacaacttgaaaacagtctgaatgaatttggtgaaaagtgggagttaaactctggagatggagctttctatggcccaaagattgacatacagattaaagatgcgattgggcggtaccaccagtgtgcaaccatccagctggatttccagttgcccatcagatttaatcttacttatgtaagccatgatggtgaggataagaaaaggccagtgattgttcatcgagccatcttgggatcagtggaaagaatgattgctatcctcacagaaaactatgggggcaaattggcccccttttggctgtcccctcgccaggtaatggtagttccagtgggaccaacctgtgatgaatatgcccaaaacgtacgacaacaattccacgatgccaaattcatggcagacattgatctggatccaggctgtacattgaataaaaagattcgaaatgcacagttagcacagtataacttcattttagttgttggtgaaaaagagaaaatcactggcactgttaatatccgcacaagagacaataaggtccacggggaacgcaccatttctgaaactatcgagcggctacagcagctcaaagagttccgcagcaaacaggcagaagaagaattttaatgaaaaaattacccagattggctccatggaaaaggaggaacagcgtttccgtaaaattgactttgtactcgaaaacgtcaatttatattgaacttggaggaggagtttggcaaagtctgaaataggtcaacctgcaggcgtaactatttttgacctagtcagtttttaaacaatgtgcatttgaaggagttaattaaaagagagccaataaaatgattttactcattcagtatctgagtactggaagtgaaacatgaggaatgctttagtgtaatgtgggagaacttttttgtaaatttaatgcaattgaaaaagttttcaaattcaattaagataactagaattggttatggtgtaacccgaattc

SEQ ID NO: 179 - protein, 712 aa, Homo sapien
MGGEEKPIGAGEEKQKEGGKKKNKEGSGDGGRAELNPWPEYIYTRLEMYNILKAEHDSILAEKAEKDSKPIKVTLPDGKQVDAESWKTTPYQIACGISQGLADNTVIAKVNNVVWDLDRPLEEDCTLELLKFEDEEAQAVYWHSSAHIMGEGMERVYGGCLCYGPPIENGFYYDMYLEEGGVSSNDFSSLEALCKKIIKEKQAFERLEVKKETLLAMFKYNKFKCRILNEKVNTPTTTVYRCGPLIDLCRGPHVRHTGKIKALKIHKNSSTYWEGKADMETLQRIYGISFPDPKMLKEWEKFQEEAKNRDHRKIGRDQELYFFHELSPGSCFFLPKGVYIYNALIEFIRSEYRKRGFQEVVTPNIFNSRLWMTSGHWQHYSENMFSFEVEKELFALKPMNCPGHSLMFDHRPRSWRELPLRLADFGGLHRNELSGALTGLTRVRRFQQDDAHIFCAMEQIEDEIKGCLDFLRTVYSVFGFSFKLNLSTRPEKFLGDIEVWDQAEKQLENSLNEFGEKWELNSGDGAFYGPKIDIQIKDAIGRYHQCATIQLDFQLPIRFNLTYVSHDGEDKKRPVIVHRAILGSVERMIAILTENYGGKLAPFWLSPRQVMVVPVGPTCDEYAQNVRQQFHDAKFMADIDLDPGCTLNKKIRNAQLAQYNFILVVGEKEKITGTVNIRTRDNKVHGERTISETIERLQQLKEFRSKQAEEEF

SEQ ID NO: 180 - DNA, 1591 bp, Homo sapien
ggcacgaggattcgctgctccgcagcacggccggagctggtccggtcaagagtcgggatttgtggggagaggttttccactggtcaagagaaggctttaagaaagacggtattaatctcccgttgcggctcccgcctggtcccatcttctgcccgctcctccaggaaatgaatctgctgccgaatattgagagtccagtgactcggcaggagaagatggcgaccgtgtgggatgaggccgagcaagatggaattggggaggaggtgctcaagatgtccacggaggagatcatccagcgcacacggctgctggacagtgagatcaagatcatgaagagtgaagtgttgagagtcacccatgagctccaagccatgaaggacaagataaaagagaacagtgagaaaatcaaagtgaacaagaccctgccgtaccttgtctccaacgtcatcgagctcctggatgttgatcctaatgaccaagaggaggatggtgccaatattgacctggactcccagaggaagggcaagtgtgctgtgatcaaaacctctacacgacagacgtacttccttcctgtgattgggttggtggatgctgaaaagctaaagccaggagacctggtgggtgtgaacaaagactcctatctgatcctggagacgctgcccacagagtatgactcgcgggtgaaggccatggaggtagacgagaggcccacggagcaatacagtgacattgggggtttggacaagcagatccaggagctggtggaggccattgtcttgccaatgaaccacaaggagaagtttgagaacttggggatccaacctccaaaaggggtgctgatgtatgggcccccagggacggggaagaccctcctggcccgggcctgtgccgcacagactaaggccaccttcctaaagctggctggcccccagctggtgcagatgttcattggagatggtgccaagctagtccgggatgcctttgccctggccaaggagaaagcgccctctatcatcttcattgatgagttggatgccatcggcaccaagcgctttgacagtgagaaggctggggaccgggaggtgcagaggacaatgctggagcttctgaaccagctggatggcttccagcccaacacccaagttaaggtaattgcagccacaaacagggtggacatcctggaccccgccctcctccgctcgggccgccttgaccgcaagatagagttcccgatgcccaatgaggaggcccgggccagaatcatgcagatccactcccgaaagatgaatgtcagtcctgacgtgaactacgaggagctggcccgctgcacagatgacttcaatggggcccagtgcaaggctgtgtgtgtggaggcgggcatgatcgcactgcgcaggggtgccacggagctcacccacgaggactacatggaaggcatcctggaggtgcaggccaagaagaaagccaacctacaatactacgcctagggcacacaggccagccccagtctcacggctgaagtgcgcaataaaagatggtttagggtccctgccaaaaaaaaaaaaaaaaaaaaaaaaaaaaaaaaaaaaaa

SEQ ID NO: 181 - protein, 439 aa, Homo sapien
MNLLPNIESPVTRQEKMATVWDEAEQDGIGEEVLKMSTEEIIQRTRLLDSEIKIMKSEVLRVTHELQAMKDKIKENSEKIKVNKTLPYLVSNVIELLDVDPNDQEEDGANIDLDSQRKGKCAVIKTSTRQTYFLPVIGLVDAEKLKPGDLVGVNKDSYLILETLPTEYDSRVKAMEVDERPTEQYSDIGGLDKQIQELVEAIVLPMNHKEKFENLGIQPPKGVLMYGPPGTGKTLLARACAAQTKATFLKLAGPQLVQMFIGDGAKLVRDAFALAKEKAPSIIFIDELDAIGTKRFDSEKAGDREVQRTMLELLNQLDGFQPNTQVKVIAATNRVDILDPALLRSGRLDRKIEFPMPNEEARARIMQIHSRKMNVSPDVNYEELARCTDDFNGAQCKAVCVEAGMIALRRGATELTHEDYMEGILEVQAKKKANLQYYA

SEQ ID NO: 182 - DNA, 1793 bp, Homo sapien
ggcaccgcgcgggacggagcttggctgttggtcggtgggttcccgtgcggcggcggccaaggaggaggagacacagttggagcagctccgtgggctgactggggcgaggcctcagcagcgcgagcttgagtgcggccgagcctgcggcgccttcccctgcgggtggggacgagcgggccccgcggcgtcatcggcggcgaggagccgccgcgcctcggcctagcatgtcggaagcgggcgaggagcagcccatggagacgacgggcgccaccgagaacggacatgaggccgtccccgaagcgagtcgcggccggggctggacgggcgccgcggcggggctggaggcgcgaccgccgcgcccccgagcgggaatcagaacggcgccgagggaccagatcaacgccagcaagaacgaggaggacgcgggaaaaatgttcgttggtggcctgagctgggatactagcaaaaaagatttaaaagactattttactaaatttggagaggtcgttgactgtacaataaaaatggatcccaacactggacggtcaagagggtttgggtttatcctgttcaaagatgcagccagtgtggagaaggtcctagaccagaaggagcacaggctggatggccgtgtcattgaccctaaaaaggccatggctatgaagaaggacccggtcaagaaaatcttcgttgggggtctgaatcctgaaagtcccactgaggaaaagatcagggagtactttggcgagtttggggagattgaggccattgaattgccaatggatccaaagttgaacaaaagacgaggttttgtgtttatcacctttaaagaagaagaacccgtgaagaaggttctggagaaaaagttccatactgtcagtggaagcaagtgtgagatcaaggtggcccagcccaaagaagtctatcagcagcagcagtatggctctgggggccgtggaaaccgcaaccgagggaaccgaggcagcggaggtggtggtggaggtggaggtcagagtcagagttggaatcagggctacggcaactactggaaccagggctacggctaccagcagggctacgggcctggctatggcggctacgactactcgccctatggctattacggctacggccccggctacgactacagtcagggtagtacaaactacggcaagagccagcgacgtggtggccatcagaataactacaagccatactgaggcggccaagggagcgaccaactgatcgcacacatgctttgtttggatatggagtgaacacaattatgtaccaaatttaacttggcaaactttctattgcctgtcccatgtgcatcttatttaaaatttcccccatggaaatcactctcctgttgactatttccagagctctaggtgtttaggcagcgtgtggtgtctgagaggccatagcgccatcatgggctgatttttattaccaggtcccccagaagcaggtgagaggctctgcttcctgctgccgctctgcagcctggacctgtggaccctggttgtaaagagtaaattgtatcttaggaaaccagtgtcacctttttttcaccttttaattttatattatttgcgtcatacatttcctgtaacggaagtgttaattttactgtactttttggtaccccttttgggaatctaatgtattgtaaggtattttacacgtgtcctgattttgccacaacctggatattgaagctatccaagcttttgaaataaaatttaaaaaccccaagcctgggtgagtgtgggaaaaaaaaaaaaaaa

SEQ ID NO: 183 - protein, 331 aa, Homo sapien
MSEAGEEQPMETTGATENGHEAVPEASRGRGWTGAAAGLEARPPRPRAGIRTAPRDQINASKNEEDAGKMFVGGLSWDTSKKDLKDYFTKFGEVVDCTIKMDPNTGRSRGFGFILFKDAASVEKVLDQKEHRLDGRVIDPKKAMAMKKDPVKKIFVGGLNPESPTEEKIREYFGEFGEIEAIELPMDPKLNKRRGFVFITFKEEEPVKKVLEKKFHTVSGSKCEIKVAQPKEVYQQQQYGSGGRGNRNRGNRGSGGGGGGGGQSQSWNQGYGNYWNQGYGYQQGYGPGYGGYDYSPYGYYGYGPGYDYSQGSTNYGKSQRRGGHQNNYKPY

SEQ ID NO: 184 - DNA, 1763 bp, Homo sapien
tagctggattccagccattgctgcagctgctccacagcccttttcaggacccaaacaaccgcagccgctgttcccaggatggtgatccgtgtatatattgcatcttcctctggctctacagcgattaagaagaaacaacaagatgtgcttggtttcctagaagccaacaaaataggatttgaagaaaaagatattgcagccaatgaagagaatcggaagtggatgagagaaaatgtacctgaaaatagtcgaccagccacaggttaccccctgccacctcagattttcaatgaaagccagtatcgcggggactatgatgccttctttgaagccagagaaaataatgcagtgtatgccttcttaggcttgacagccccacctggttcaaaggaagcagaagtgcaagcaaagcagcaagcatgaaccttaagcactgtgctttaagcatcctgaaaaatgagtctccattgcttttataaaatagcagaattagctttgcttcaaaagaaataggcttaatgttgaaataatagattagttgggttttcacatgcaaacattcaaaatgaatacaaaattaaaatttgaacattatggtgattatggtgaggagaatgggatattaacataaaattatattaataagtagatatcgtagaaatagtgttgttacctgccaagccatcctgtatacaccaatgattttacaaagaaaacacccttccctccttctgccattactatggcaacttaagtgtatctgcagctctacattaaaaaggagaaagagaaataacctgtctctcattcctaagttgcctcattaattttcatgaacaagaatatgtacctttttgatgctatattactgcgattaaaaaagttcttgcaggtaatgtttatgtatagttaaacgttgtaatttcttatcgtaattataacattcccattctttgtagatgaaactctacatatgaaccacagattttctgagcttctaaatgtagcctttcattgcacatttcagtgatcagaatagatatccttttacacgcacaaaagcaatagattcattcagtggacaagttccttgtttaactacacagctatgatggaatcatatatccaagttccttgcctcagtgaaatatgcatatgtatatcatgaagtgggatgccaagtaagcttaaaatgcattctctagcaaagagattagacttttaaataactcttataaaacaggttggcgatcatttcccaagattggtttcccttgagtttttgttaaaacaaatcttagtagttttgcccgtttaaaacaactcacaatcgtaaatgctactattcctaagatatcttacctttttatttcagtttagccatgtattgtatgagtgtattagtctaagcagtgagaatcttttctatgcctctattccagcaaaaagtagaagtatcaaataaaaagggcaacttttaaaatattaagcctgaagacttctaaaaagacaagaaacatggcctaaataaccaacatagatttacatagtaagtttcacactaccttattaccaaaagcaaacacctcttactttaaactacattatcatgtatatctattgtatgctggtctttactttttgccaaaatcaacatataatgaagagatgcctttgtttgatgagattcaaacttgatgctatgctttaaaataaactcagtacttttagaaacataaaaaaaaaaaaaaaaaaaaaaaaaa

SEQ ID NO: 185 - protein, 114 aa, Homo sapien
MVIRVYIASSSGSTAIKKKQQDVLGFLEANKIGFEEKDIAANEENRKWMRENVPENSRPATGYPLPPQIFNESQYRGDYDAFFEARENNAVYAFLGLTAPPGSKEAEVQAKQQA

SEQ ID NO: 186 - DNA, 866 bp, Homo sapien
atggcggagcgcgggtacagcttttcgctgactacattcagcccgtctggtaaacttgtccagattgaatatgctttggctgctgtagctggaggagccccgtccgtgggaattaaagctgcaaatggtgtggtattagcaactgagaaaaaacagaaatccattctgtatgatgagcgaagtgtacacaaagtagaaccaattaccaagcatataggtttggtgtacagtggcatgggccccgattacagagtgcttgtgcacagagctcgaaaactagctcaacaatactatcttgtgtaccaagaacccattcctacagctcagctggtacagagagtagcttctgtgatgcaagaatatactcagtcaggtggtgttcgtccatttggagtttctttacttatttgtggttggaatgagggacgaccatatttatttcagtcagatccatctggagcttactttgcctggaaagctacagcaatgggaaagaactatgtgaatgggaagactttccttgagaaaagatataatgaagatctggaacttgaagatgccattcatacagccatcttaaccctaaaggaaagctttgaagggcaaatgacagaggataacatagaagttggaatctgcaatgaagctggatttaggaggcttactccaactgaagttaaggattacttggctgccatagcataacaatgaagtgactgaaaaatccagaatttcagataatctatctacttaaacatgtttaaagtatgttttgttttgcagactttttgcatacttatttctacatggtttaaatcgactgtttttaaaatgacacttataaatcctaataaactgttaaaccc

SEQ ID NO: 187 - protein, 234 aa, Homo sapien
MAERGYSFSLTTFSPSGKLVQIEYALAAVAGGAPSVGIKAANGVVLATEKKQKSILYDERSVHKVEPITKHIGLVYSGMGPDYRVLVHRARKLAQQYYLVYQEPIPTAQLVQRVASVMQEYTQSGGVRPFGVSLLICGWNEGRPYLFQSDPSGAYFAWKATAMGKNYVNGKTFLEKRYNEDLELEDAIHTAILTLKESFEGQMTEDNIEVGICNEAGFRRLTPTEVKDYLAAIA

SEQ ID NO: 188 - DNA, 1325 bp, Homo sapien
gcgattcggtggcacgtggagccacggcgtgggagtagggggctgaaggcaggcagcagcggccagggccgccctctgctagccgcttgggtctcgggataccccgtttcttcctgtaggtgtgggacgtgcgtgcggcgagatggacactcccccgctctcggattcggagtcggaatccgatgaatcccttgtcacagacagagagttgcaggatgcgttttcccgagggcttctgaagccaggcctcaatgtcgtgctagaggggccgaagaaggccgtgaacgacgtgaatggcctgaagcaatgtttggcagaattcaagcgggatctggaatgggttgaaaggctcgatgtgacactgggtccggtaccggagatcggtggatctgaggcgccagcacctcagaacaaggaccagaaagctgttgatccagaagacgacttccagcgagagatgagtttctatcgccaagcccaggccgcagtgcttgcagtcttaccccgcctccatcagctcaaagtccctacgaagcgacccactgattattttgcggaaatggccaaatctgatctgcaggtgcagaagattcgacagaagctgcagactaaacaggctgccatggagaggtctgaaaaagctaagcaactgcgagcacttaggaaatacgggaagaaggtgcaaacggaggttcttcagaagaggcagcaggagaaagcccatatgatgaatgctattaagaaatatcagaaaggcttctctgataaactggatttccttgagggagatcagaaacctctggcacagcgcaagaaggcaggagccaaaggccagcagatgaggaaggggcccagtgctaaacgacggtataaaaaccagaagtttggttttggtggaaagaagaaaggctcaaagtggaacactcgggagagctatgatgatgtatctagcttccgggccaagacagctcatggcagaggcctcaagaggcctggcaagaaagggtcaaataagagacctggaaaacgaacaagagagaagatgaagaacagaacacactaaatagcatctttgaatacaaagaaccaagaaaaaggaatgaagactcgcaatttcacgacacactttgatcccttctgttggtgtcatgttgtaaacatttctttcaataaactaaagaaaaattattaaaggaacacatacctttggttaaatagtctagactaaaagattgagaagttactttccattgctatctattgataatttagacattgagttcaaattgccttcattttatgataaataatgatttaactgaaaa

SEQ ID NO: 189 - protein, 306 aa, Homo sapien
MDTPPLSDSESESDESLVTDRELQDAFSRGLLKPGLNVVLEGPKKAVNDVNGLKQCLAEFKRDLEWVERLDVTLGPVPEIGGSEAPAPQNKDQKAVDPEDDFQREMSFYRQAQAAVLAVLPRLHQLKVPTKRPTDYFAEMAKSDLQVQKIRQKLQTKQAAMERSEKAKQLRALRKYGKKVQTEVLQKRQQEKAHMMNAIKKYQKGFSDKLDFLEGDQKPLAQRKKAGAKGQQMRKGPSAKRRYKNQKFGFGGKKKGSKWNTRESYDDVSSFRAKTAHGRGLKRPGKKGSNKRPGKRTREKMKNRTH

SEQ ID NO: 190 - DNA, 2562 bp, Homo sapien
gccgcgccggctctgggcactcagcatcgtttccttttcctccgctggagcagctatggcggcggtgaagaccctgaaccccaaggccgaggtggcccgagcgcaggcggcgctggcggtcaacatcagcgcagcgcggggtctgcaggacgtgctaaggaccaacctggggcccaagggcaccatgaagatgctcgtttctggcgctggagacatcaaacttactaaagacggcaatgtgctgcttcacgaaatgcaaattcaacacccaacagcttccttaatagcaaaggtagcaacagcccaggatgatataactggtgatggtacgacttctaatgtcctaatcattggagagctgctgaaacaggcggatctctacatttctgaaggccttcatcctagaataatcactgaaggatttgaagctgcaaaggaaaaggcccttcagtttttggaagaagtcaaagtaagcagagagatggacagggaaacacttatagatgtggccagaacatctcttcgtactaaagttcatgctgaacttgcagatgtcttaacagaggctgtagtggactccattttggccattaaaaagcaagatgaacctattgatctcttcatgattgagatcatggagatgaaacataaatctgaaactgatacaagcttaatcagagggcttgttttggaccacggagcacggcatcctgatatgaagaaaagggtggaggatgcatacatcctcacttgtaacgtgtcattagagtatgagaaaacagaagtgaattctggctttttttacaagagtgcagaagagagagaaaaactcgtgaaagctgaaagaaaattcattgaagatagggttaaaaaaataatagaactgaaaaggaaagtctgtggcgattcagataaaggatttgttgttattaatcaaaagggaattgaccccttttccttagatgctctttcaaaagaaggcatagtcgctctgcgcagagctaaaaggagaaatatggagaggctgactcttgcttgtggtggggtagccctgaattcttttgacgacctaagtcctgactgcttgggacatgcaggacttgtatatgagtatacattgggagaagagaagtttacctttattgagaaatgtaacaaccctcgttctgtcacattattgatcaaaggaccaaataagcacacactcactcagatcaaagatgcagtgagggacggcttgagggctgtcaaaaatgctattgatgatggctgtgtggttccaggtgctggtgccgtggaagtggcaatggcagaagccctgattaaacataagcccagtgtaaagggcagggcacagcttggagtccaagcatttgctgatgcattgctcattattcccaaggttcttgctcagaactctggttttgaccttcaggaaacattagttaaaattcaagcagaacattcagaatcaggtcagcttgtgggtgtggacctgaacacaggtgagccaatggtggcagcagaagtaggcgtatgggataactattgtgtaaagaaacagcttcttcactcctgcactgtgattgccaccaacattctcttggttgatgagatcatgcgagctggaatgtcttctctgaaaggttgaattgaagcttcctctgtatctgaatcttgaagactgcaaagtgatcctgaggattacagctgtggaatttttgtccaagcttcaaataattttgaaagaaattttcccatatgaaaaaaggagagaacactggcatctgttgaaatttggaagttctgaaattatagtatttttaaaaattgcactgaagtgtatacacataaagcaggtcttttatccagtgaacaggatgttttgctttagcagcagtgacataaaattccatgttagataagcatatgttacttaccttgttattaaatatttcttgaaaagcaaattttaatggttaattttatgtggacgtatgttaaattatccaaactaccctattgttaagcatttggttttaaaatttttatgctaatataaatgctcaagtaatttaaaatattgaaagcatccctgttggtataaatttctgagtaaatgcattggatcagttggactttgaacgccctttgaaatggctttgctaaaatgctcccgccacaaagttgtaggaaatgggaagaggagtcaactagaggcaagggagttgagagagctgcaactgtaaagggcaagaacaggcagaggtaaaaagatgatggaaggtgtggtgactaagggccacggttattgggtgaaatttgagatgtaggccaactgtattttcaagcttctgaacttaaggcaaaatattcatcgcaaagtctctagcgtcatatttttctcacccaaattacgtttccacgagttattatatatagttggtctatctctgcagtccttgaaggtgaagttgtgtgttactaggctgtgttttgggatgtcagcagtggcctgaagtgagttgtgcaataaatgttaagttgaaacctcaaaaaaaa

SEQ ID NO: 191 - protein, 531 aa, Homo sapien
MAAVKTLNPKAEVARAQAALAVNISAARGLQDVLRTNLGPKGTMKMLVSGAGDIKLTKDGNVLLHEMQIQHPTASLIAKVATAQDDITGDGTTSNVLIIGELLKQADLYISEGLHPRIITEGFEAAKEKALQFLEEVKVSREMDRETLIDVARTSLRTKVHAELADVLTEAVVDSILAIKKQDEPIDLFMIEIMEMKHKSETDTSLIRGLVLDHGARHPDMKKRVEDAYILTCNVSLEYEKTEVNSGFFYKSAEEREKLVKAERKFIEDRVKKIIELKRKVCGDSDKGFVVINQKGIDPFSLDALSKEGIVALRRAKRRNMERLTLACGGVALNSFDDLSPDCLGHAGLVYEYTLGEEKFTFIEKCNNPRSVTLLIKGPNKHTLTQIKDAVRDGLRAVKNAIDDGCVVPGAGAVEVAMAEALIKHKPSVKGRAQLGVQAFADALLIIPKVLAQNSGFDLQETLVKIQAEHSESGQLVGVDLNTGEPMVAAEVGVWDNYCVKKQLLHSCTVIATNILLVDEIMRAGMSSLKG

SEQ ID NO: 192 - DNA, 2562 bp, Homo sapien; identical to SEQ ID NO: 190

SEQ ID NO: 193 - protein, 531 aa, Homo sapien; identical to SEQ ID NO: 191

SEQ ID NO: 194 - DNA, 9501 bp, Homo sapien
ggccccaatgagtggcacacagtctactatcaccgacaggtttcccctcaaaaaacctataaggcatggaagtattttgaaccgagagtcaccaacagataagaagcagaaagttgagcgcattgcatcacatgattttgaccccacagatagctcctccaagaagacaaagtctagttcagaggagagtagatccgagatatatggtcttgttcagcgttgcgtaatcatccagaaagatgacaatggatttgggctgacggtcagtggagacaatccagtcttcgtacagtctgtcaaagaagatggagcagccatgcgggctggagtacagacaggtgatcgaatcatcaaggtgaatggaactctggtgactcattcaaatcatctggaggtggtgaagctaatcaaatctggttcctatgtagctctcactgttcagggacgcccacctgggtcgccccagattccacttgccgactctgaagtagagccgtcagtcattggacatatgtctcccatcatgacatctcctcattcacctggagcatctgggaatatggagagaatcactagtcctgtgctcatgggggaggaaaacaatgtggttcataaccagaaagtagaaattctgagaaaaatgttacagaaagaacaggaacggctacagttattgcaggaagattacaaccgaacacctgcccaaagattgctaaaagagatccaagaggccaagaaacacattcctcagctgcaagagcagttatccaaagccacaggctctgctcaggatggagctgtagttacaccctccagacctttaggggacaccctaacagtcagtgaggcagaaacagatcctggagatgtactgggcaggactgactgtagcagtggagatgcttctcggcccagtagtgacaatgcagatagtcccaagagtggcccaaaagagagaatttatctagaggaaaacccagagaaaagtgaaacaattcaggacactgacactcaatcacttgtcggaagtccctcaacccgtatagcacctcatattattggagcagaagatgatgattttggtactgaacatgaacagatcaatggacagtgcagctgtttccagagcattgaattactaaaatctcgcccggctcatttggctgttttcttacaccatgtagtttcacaatttgaccctgcgactttgctctgttatctctattcagacctgtataaacataccaattccaaagaaactcgtcgcatcttccttgagtttcatcagttctttctagatcgatcagcacacctgaaagtttctgttcctgatgaaatgtctgcagatctagaaaagagaagacctgagctcattcctgaggatctgcatcgccactatatccaaactatgcaagaaagagtccatccagaagttcaaaggcacttagaagattttcggcagaaacgtagtatgggactgaccttggctgaaagcgagctgactaaacttgatgcagagcgagacaaggaccgattgactttggagaaggagcggacatgtgcagaacagattgttgccaaaattgaagaagtattgatgactgctcaggctgtagaggaagataagagctccaccatgcagtatgttattctcatgtatatgaagcatttgggagtaaaagtgaaagagcctcgaaatttggagcacaaacggggtcggattggatttcttcccaaaatcaagcaaagtatgaagaaagataaagaaggggaagaaaaagggaagcgaagaggattccccagcatcctgggacccccacggagaccaagccgtcatgacaacagtgcaattggcagagccatggaactacagaaggcgcgccaccctaagcacttatccacaccctcatctgtgagtcctgaacctcaggactctgccaagttgcgccagagtgggttagcaaatgaaggaacagacgctggatacctgcctgccaattccatgtcttctgtagcttcaggggcctctttttcccaggaaggagggaaagagaatgatacaggatcaaagcaagttggagaaacatcagcacctggagacaccttagatggcacacctcgtactctcaatactgtctttgatttcccaccacctccattagaccaagtgcaggaggaggaatgtgaagtagaaagggtgactgaacatgggacaccaaagccctttcgaaagtttgacagtgtagcttttggagaaagtcaaagtgaggatgaacaatttgaaaatgacttagagacagacccacccaactggcagcagcttgttagtcgagaagtgttactgggactaaaaccttgtgaaatcaaaagacaggaagtgattaatgaattgttctacactgaaagagctcatgttcgaacactgaaggttcttgatcaagtgttctatcagcgagtatccagagaaggaattctgtcaccctcagagctacggaaaattttttcaaacttggaagatattcttcaacttcatattggattgaatgaacaaatgaaggctgttcgaaagagaaatgagacctctgttatcgatcagattggggaagatttgctgacatggttcagcggaccaggagaggagaaattgaaacatgctgctgctaccttttgcagtaaccaacctttcgccctggaaatgatcaaatctcgtcagaaaaaggattctcgatttcagacttttgtgcaagatgctgaaagtaatccactgtgtcgtcgtcttcaactgaaggatattattcccactcaaatgcaaaggcttactaagtacccacttctgttggataatattgccaaatacacagaatggccaacagaaagggagaaggtgaagaaagctgcagatcactgtcgtcagatcttaaattatgtaaatcaggctgtcaaggaggcagaaaacaagcagcgcctagaagattatcagcgtcgccttgatacctccagcctgaagttgtcagagtacccaaatgttgaagagctcaggaatttggatttaacaaaaaggaagatgattcatgaagggccattggtttggaaggtgaatagagataaaactattgatttatacacgttgctgctggaagacattcttgtattgttacaaaagcaggatgatagactggttttaaggtgtcatagtaagattctggcatctacagctgatagcaaacacacgtttagccctgtcattaagttgagtacagtgttggttcgacaagtggcaacagataacaaagctttattcgtcatttccatgtcagacaatggcgctcagatttatgaactggtggcacagacagtttctgaaaagactgtctggcaggacctaatctgtcggatggctgcatcagtgaaggagcaatccacaaagccaattccattaccacagtcaacacctggcgaaggagataatgatgaagaagatccttcaaaattaaaagaggagcagcatggcatttcagtcactggtttgcagagtccagacagagatttgggattagaatctaccttaatatcgtcaaaacctcagtctcattcactgagtacctctgggaaatcagaggtacgtgatctgtttgtggctgagagacagtttgcaaaggaacaacatacagatgggacactaaaggaagttggagaagattatcaaatcgcaatcccagattcacacctgcctgtctcagaagaacggtgggcattggatgcactaagaaatttgggtttgttgaagcagttgctggtgcaacagctaggtttgactgagaagagcgttcaggaagactggcaacatttcccaagatacagaacagcctctcaggggccgcagacagacagtgtcatccagaactctgaaaatattaaggcctatcattctggtgaaggacatatgccctttagaactggaactggtgacattgcaacttgttacagtccacggacttcaactgaatcttttgctccacgggattcagtgggactggcaccccaggatagccaggcaagtaacattttagtaatggaccacatgattatgaccccagagatgcctaccatggagccagaagggggtcttgatgacagtggagagcacttttttgatgcccgtgaagcacatagtgatgagaatccatcagaaggtgatggagcagttaacaaggaagagaaggatgttaatttacgcatctcaggaaactatttgatccttgatggctatgacccagtgcaggagagttccacagatgaggaggttgcttcctcacttaccctgcagcccatgacaggcatccctgctgtggaatccacccaccagcagcaacattctcctcagaatactcactccgatggggcaatttcaccattcacccccgaatttctggtccagcagcgctggggagctatggagtattcctgttttgagatccagagtccctcctcttgtgcagattcacagagccagatcatggagtacattcataagatagaggctgaccttgaacacttaaagaaggtggaggaaagttacaccattctttgccaaaggctggctggatcagccctcacagacaagcactcagataaaagttagagccgcatgtcctggaggtgactgcaggttgttggatttggagtatcggccgtgtctcaccacatcctggctccagtgtggatgcagagagagtgtgacagaggatctgcctgtgaaccacctgggattagtcaagtcccaaggtgcccagagtgggactagttcttcacagtgtggcagctgcactaatctgtttgtgagggaatatccattccctcactctactctcctcactatcggaaattcattttgattcagaataaaaaccaaatgtatagagctttgggtgtaggatatgaaattgtacttagatttaagaaaaagagaaaatcagatgtatttatttgacttcattccgtatttgaaagcacattttaatttttatttgccttgttttgttttaattgagtagtgagagttttagacctttgtctttagtacacccaaggatcaactgctcctgaagcaaagaggtcaggatggagtatgcagaagttgggtagagaggttaagaagaggaggaagtgagacggggaagggaggagcaccttgcttcactatacagtattccaagctctctgctgtccagtaggctgcttctctgagggtcacctcaaaggtatgctatgccgtgtggctcttatgtgcccaggtggtgtggtcagagagtggatgggcttcctcccgccctgaggcaagcacctcttctctgtagctgggatcaaccacaattaataggaatcctcaacatactaaatagcaggcacttgaaaatgggtgtgttttcttccattgtcgtcttttctattgagggttgggatttgggtgggagaggaaagcaaattttattttcttgactataaatttgttattcttggtatcatttcatttttataattatacattagacattggcacttgtgtaaaactgtccctgcagattgagcaggaagtaaaaacaaatggaaatgcttcggatagtggcaggggtgggggttgctaaggaaagggtgggatgggagtgggtaaagagtttgggaaggttatctaactgaatcactactgagttgaatcatggctatcattagccacaggtactgctgattataaggccagtaaaattttagtacctggaggtttgactctaatttttgcactgatggtgccaaagggccctgagtcaaaaggatagccaagggtggagtggaaaaagatatggtgaaggcagaactgctcacaccagctccagaagcacgtcctctgacttcactgccgcagctctttccacacggggccgtgattgaccctaaaaattgcagaccagcacatacactggacactgcaggcaaggtgttggtaactgcctgctctaggatgaatagtagcgttagcagcaccctacagagggtaagtttcagaattgtaatttgagaactccttcaattatattgactttctttggttttccttgtgcattaggtatatattttttgaagtatttttgccaactaaaatgaagtctgtaaattctgttaataaacaaggagttcatccgttgctcacatctttcattggtgccctctgaactctgtgggttgctaggatgtaattttaatgcttccctgcagtccaaagatgattttttcaccacaaatggtaagggatgcccacctacttttataaacaccactgcaacttaacaagtttatttatctatgtccagatttctgtttctgtcctaaattgatctgtgtttttaggtggatcaacttggatctttagacctcatctataaattgaaattatatttttagtcataagccaagtacaatctaactcagaatgggattaaaaattttagaagcagaagctaatatataaatgaagtttgggatttggaactttctgtatctcttaggaggaacaagtaaaaaccaaatggttacattgtgctgctagaaataatgtcattctcaattaaaagggttacacctgtagccacttgacactaacaccatcgagggcaattaatcaggagaaaagtaaatataaaaactttgctcttaacgtcacacactacagggtaattatgtaattctctagcactcaattaagaagcttgtaggttagcaaaatttcagtttctctagttcagccagtgtcttgtccttagtaattatttgctttccctgcagttcaatttctccttggaactctaacaggactaactggaaaaatactttgaccatagctctagtacttccaaataaattcatatctagattttcaaacaaagccccaagatgaagtctaattctgaaaatatctcacaatttttgaatgttctttttatcttaccgacctaacttctcttttccctcccaacttggcctcccacacgttccatttcattttggccattatagtcacatccgtttgactttggttgtgacatcttcctttcaggatgatggaattagatgcagtctgtctttgagtgagactggtcaccatcagaggagttttttctaagtgacgtgactagaagttgaaatctacttccctgctaaagggcacaggggtggtgtacaaagaaagctaccttcccagagcaagcaggctgcattttagctatggaagtgacctgctgtgacactgtgctctcttctgtgggcttaatggttcctttgctatgaagtggcaaattacatgtagagtgtctccttccttttcagagaacagttaatcaaggcaaatcagcaagcccccaaagtgctgtaatttaacatcatgattaccaccttcgaagctatatattttgcatactttaaaatcacctaacttggactgcttgaattacattggcttttagaaccgaaattgtaactatgtattgtatttcatgggaggtatattttatgagctttttggctttcttttttcccacagcaactgccaatgaaggatgaatcccctttttaaaaagttgttgttgttgttgtttatttgattttgagttaggagggataatagagaagtccatttaaaaattatttttagaagctaaagaaagtaattatgcttcctgtgaattgtcttttactggcatctttgttttcctctttgatgttagtaaatttggtgtaatacgtggggcttccatatttcaaagtggaagctttcttctctgaagtcgatatatggttttgaattactagagctttggtcagtatttccttccctatatgtcacagagggcaccactgagaactgcgtgcataggacctcaaaatacaaaattagcagggcctcacagtcagcttcctcatggctagtttttcccccttatattacaatttttgttttataagtcatttttttcctgatatttccaccacttttcagagtcatctacaaaatttttctttcctcaagaaaagagttccttttgccttattccttatgccttccccactggtattgagggttttgataataaattggtaggaaaaaaaagtacctcctagaaggaagccttccccaccatttccaggtgccaactgctaagcagatatattccaaaaatggtaactgtcatgtgcacactgttggttatttttaataagcctcttcctactagaacattttattttccttgttcaccatacaatcatgtactctttaacagaaattgcttttaaaaaatatctggaactatctttaaaaaaactttattaataatcatgtatttttactgatcacattttgaaatgcctaaaagactttattgttctaattatccagatgtacctttgtaaaatagctcttttatgaattagctgataaggctgtatgtttctggaacaaaatattggtcatctaaaaactttctgttttctggggtctgggaaaatagaaaataagatttcaaatattaaataagcttaaaggaaccaagcatgtgacttttactttgtattctggttgatttgtcttgtccaagttatattagaaaagttgaggagtcgaggagcctgtaattaattttcctgtcagtgactgtcagacatcttcctgcttattagagcatccctagcaacaaggctaaaccttcatgacagtgctggcaggtgggcttgccctagcatgtggggcaggtttgttgtttttttaatagctttattgagatattcacatatcatataattcatccatttaaagtgtataatcagatgggttttggtatattattgatttttaattgtggtgaaatatatatataacaaaatttgctattgtaactatttttaagtataaagttcagtgaggtaggccagcttttatgacgcacctgaagataactttggttttaatcctaccctaaatgaagcatatgcctctatttttcctgtccccagtgctgggcttcttcacataccaacatttctgtgcttttaccaacagcattttagctcagaaggctcgcttactttgggcatttgctgtattttggttttgaaatacttgtaatttgacttattcttgggataatattttagttttcagtcattcaagggcacatttggctgacggagctaataagcgtaataaaatgcttagtagtttataccatcttttagttaaacattttaaagattaagactattcaaatgtactttgcggaaattaacctgtttgtatgcctggctttgtttacaaacatatatctatatctatatatatagatacagatacagatacatatctggtggaacaaagaaatacctgtaccattcccacttgctctttgatagccacctcctaggaatggagacaataaaactctgtatttgcatgtg

SEQ ID NO: 195 - protein, 1544 aa, Homo sapien
MSGTQSTITDRFPLKKPIRHGSILNRESPTDKKQKVERIASHDFDPTDSSSKKTKSSSEESRSEIYGLVQRCVIIQKDDNGFGLTVSGDNPVFVQSVKEDGAAMRAGVQTGDRIIKVNGTLVTHSNHLEVVKLIKSGSYVALTVQGRPPGSPQIPLADSEVEPSVIGHMSPIMTSPHSPGASGNMERITSPVLMGEENNVVHNQKVEILRKMLQKEQERLQLLQEDYNRTPAQRLLKEIQEAKKHIPQLQEQLSKATGSAQDGAVVTPSRPLGDTLTVSEAETDPGDVLGRTDCSSGDASRPSSDNADSPKSGPKERIYLEENPEKSETIQDTDTQSLVGSPSTRIAPHIIGAEDDDFGTEHEQINGQCSCFQSIELLKSRPAHLAVFLHHVVSQFDPATLLCYLYSDLYKHTNSKETRRIFLEFHQFFLDRSAHLKVSVPDEMSADLEKRRPELIPEDLHRHYIQTMQERVHPEVQRHLEDFRQKRSMGLTLAESELTKLDAERDKDRLTLEKERTCAEQIVAKIEEVLMTAQAVEEDKSSTMQYVILMYMKHLGVKVKEPRNLEHKRGRIGFLPKIKQSMKKDKEGEEKGKRRGFPSILGPPRRPSRHDNSAIGRAMELQKARHPKHLSTPSSVSPEPQDSAKLRQSGLANEGTDAGYLPANSMSSVASGASFSQEGGKENDTGSKQVGETSAPGDTLDGTPRTLNTVFDFPPPPLDQVQEEECEVERVTEHGTPKPFRKFDSVAFGESQSEDEQFENDLETDPPNWQQLVSREVLLGLKPCEIKRQEVINELFYTERAHVRTLKVLDQVFYQRVSREGILSPSELRKIFSNLEDILQLHIGLNEQMKAVRKRNETSVIDQIGEDLLTWFSGPGEEKLKHAAATFCSNQPFALEMIKSRQKKDSRFQTFVQDAESNPLCRRLQLKDIIPTQMQRLTKYPLLLDNIAKYTEWPTEREKVKKAADHCRQILNYVNQAVKEAENKQRLEDYQRRLDTSSLKLSEYPNVEELRNLDLTKRKMIHEGPLVWKVNRDKTIDLYTLLLEDILVLLQKQDDRLVLRCHSKILASTADSKHTFSPVIKLSTVLVRQVATDNKALFVISMSDNGAQIYELVAQTVSEKTVWQDLICRMAASVKEQSTKPIPLPQSTPGEGDNDEEDPSKLKEEQHGISVTGLQSPDRDLGLESTLISSKPQSHSLSTSGKSEVRDLFVAERQFAKEQHTDGTLKEVGEDYQIAIPDSHLPVSEERWALDALRNLGLLKQLLVQQLGLTEKSVQEDWQHFPRYRTASQGPQTDSVIQNSENIKAYHSGEGHMPFRTGTGDIATCYSPRTSTESFAPRDSVGLAPQDSQASNILVMDHMIMTPEMPTMEPEGGLDDSGEHFFDAREAHSDENPSEGDGAVNKEEKDVNLRISGNYLILDGYDPVQESSTDEEVASSLTLQPMTGIPAVESTHQQQHSPQNTHSDGAISPFTPEFLVQQRWGAMEYSCFEIQSPSSCADSQSQIMEYIHKIEADLEHLKKVEESYTILCQRLAGSALTDKHSDKS

SEQ ID NO: 196 - DNA, 2528 bp, Homo sapien
gagttccagcagtccgcgagctgccgtcggctccgcggggggggcgggccgggcaccccggggcgcggaggagcgctcctcgcttctctccttcccccctgccgcactccgccggaccctcccgccggcccgcgccgctgcactcgccctctcctctcgccccccggcaaactttcggcccctccccgcccctcgcccgttattcgtcgtggctcaagcccggccacgccgccccaagggctcctcccgacctcccggcctgccgctccggccactgcgggatccagaaacatgtcgaccacacttctgtccgccttctacgatgtcgacttcttgtgcaagacagagaaatccctggccaacctcaacctgaacaacatgctggacaagaaggcggtggggacgcctgtggccgccgcccccagctcgggcttcgcgccgggattcctccgacggcactcggccagcaacctgcatgcactcgcccaccccgcgcccagccccggcagctgctcgcccaagttcccgggcgccgctaacggcagcagctgcggcagcgcggcggccggcggtccgacctcctacggcacccttaaggagccgtcggggggcggcggcacagccctgctcaacaaggagaacaaattccgggaccgctcgtttagcgagaacggcgatcgcagccagcacctcctgcacctgcagcagcagcagaaggggggcggcggctcccagatcaactccacgcgctacaagaccgagctgtgccggcccttcgaggagagcggcacgtgcaagtacggcgaaaagtgccagttcgcgcatggcttccacgagctgcgcagcctgactcgccatccgaagtacaagaccgagctgtgccgcacctttcataccatcggcttctgcccctatgggccgcgctgccacttcatccacaacgcggacgagcggcggcccgcgccgtcggggggcgcctccggggacctgcgtgcctttggcacgcgcgatgcgttgcacctgggcttcccgcgggagccgcggcccaagttgcaccacagcctcagcttctcgggcttcccgtcgggccaccatcagcccccgggcggcctcgagtcgccgctgctgctcgacagccccacgtcgcgcacgccgccgccgccctcctgctcttcggcctcgtcctgctcctcctccgcctcctcctgttcctcggcctccgcggcctccacgccctcgggcgccccgacatgctgcgcctccgcggcggccgcggctgcggccgctctgctgtacggcaccgggggcgccgaggacctgctggcgccgggggccccgtgcgcggcctgctcgtcggcctcgtgcgccaacaacgccttcgccttcggtccggagctcagcagcctcatcacgccgctcgccatccagacccacaactttgccgccgtggccgccgccgcctactaccgcagtcagcagcagcagcagcagcagggcctggcgccccccgcgcagccgccggcgccgcccagcgcgaccctccccgccggggccgccgcacctccctcgccgcccttcagcttccagctgccgcgccgcctgtccgactcgcccgtgttcgacgcgccccccagccccccggactcgctgtcggaccgcgacagctacctaagcggctccctgagctccggcagcctcagcggctctgagtctcccagcctcgaccctggccgccgcctgccaatcttcagccgcctctccatctccgacgactgaggcaagagggcgccagtgaggaggaagggaaggcggttcagagatgttggaggacacccctcgccatctcgcccttgctgggggcacgggagtggggggggtgacatgggccctaggcagactgcaagcccgaccgagcacttggactcgaactctgtgccgggaggggcccccacccctcctttttcggtttcctcttgtctttttttttttatttttattacgaagtttcattctttttgagcaaaaaagtcgaactttttctgttgaacaaaatattcacaacagggcagttgtgatacgaatagaacaaaaaaaaaaaaaaaacacttaaactttgttaggactccgatgagtttgggacttcaggaaaaatcaacccagcaccagcagctaccaaccaccattccatctcttcacttgaacagcattagttaagtccagatgtgggaacccttctcttggaagaagttcctaattgtgtctcagaccggtgtaaacaaaccagccagccgccaccttgctaaacctataagctttttaaaatccaatatattctgccaagaatatgccttgatagttagccctcagcccataggtgttttttgttttttaacagaattatatatgtctgggggtgaaaaaacccttgcattccaaaggtccatactggttacttggtttcattgccaccacttagtggatgttcagtttagaaccattttgtctgctccctctggaagccttgcgca

SEQ ID NO: 197 - protein, 494 aa, Homo sapien
MSTTLLSAFYDVDFLCKTEKSLANLNLNNMLDKKAVGTPVAAAPSSGFAPGFLRRHSASNLHALAHPAPSPGSCSPKFPGAANGSSCGSAAAGGPTSYGTLKEPSGGGGTALLNKENKFRDRSFSENGDRSQHLLHLQQQQKGGGGSQINSTRYKTELCRPFEESGTCKYGEKCQFAHGFHELRSLTRHPKYKTELCRTFHTIGFCPYGPRCHFIHNADERRPAPSGGASGDLRAFGTRDALHLGFPREPRPKLHHSLSFSGFPSGHHQPPGGLESPLLLDSPTSRTPPPPSCSSASSCSSSASSCSSASAASTPSGAPTCCASAAAAAAAALLYGTGGAEDLLAPGAPCAACSSASCANNAFAFGPELSSLITPLAIQTHNFAAVAAAAYYRSQQQQQQQGLAPPAQPPAPPSATLPAGAAAPPSPPFSFQLPRRLSDSPVFDAPPSPPDSLSDRDSYLSGSLSSGSLSGSESPSLDPGRRLPIFSRLSISDD

SEQ ID NO: 198 - DNA, 5533 bp, Homo sapien
  Unsure 95: Unknown base
  Unsure 99: Unknown base
  Unsure 108: Unknown base
cagatttacgaggttctgttctagtgccaaaggctcttggtagtaaatagtgagcaaaatagatacctgtctcctgatggatcttgccagccccntccntattttttnttaagttatttattaaaaccacacacaccttgcaaagaaaaagggaaactggcagtctctgtagaggaagccggtggcatcgctcagagccacaaactgtatttctaaacagccctttccctggttccctctctcctgccccactttttttaaaatccagactgtaaaaaacacatctactgacactcactttactttaaaaaaagaagagaaaaagtaaagcgttacaagactttcctcctggaaactataaactgaaaaaaaaatccataaaagattaaatcctggcgggttgtggggtggcgggggccggcggggagggggcgcggagtggagattggctctctgaggtggtcaggggccctgtgacagcttgggactttcagcacctggtttggggtcatttatctgctcaactgtcaggaccccccacccccaaaccccagccaccaacacaaccatcgtagaagggaacacaacacagagggtcttttttcatttttttaaaaaatcggtttggttgtgtttttgttttccatgggggagctttaaaactcattattgcaacactagttccatttttcgccagggttccaataacacggcatcataaaggcaacgcaacccacagttctcaagacatttaccacggtcactacatccggcagcggggtggcccctagctcctgctgcccccccgccctttctccccgcccgcccccggagctcagccgatttctgaggctccaactctacccactccctccccgggccgccgccgccgcgccttcccccattcttactccctcgaggagagccacaggttgcaaatccaaccaacctcgcaatctatttttgcaaaatcactcacaaagatctccctttcgcgcccgcgcccgctcctcccgcgccgggtcccctcagccacggccacaaagtgcccttctctcctcctgagtcttgcacataaggaacgcgggctggggctctgttcgtctttctcctcgcccaaggtaaggacctcgggaatctgaagcctggcgtccactacgctcaggcccgcagttccctttttacagagcttgcaccatgggaaaaaataaaataaaatttaggaaagggaggcaacagccattgggagccaacacagagtcacgcagcgcccaaaatacaaacaccgcagcggccagaaatcccgccacctttctcgttctcccaggctgtcctgtcgaggttccctgagtccccccgcacactgaaaggcatcgcaggtgcagtgcgcacccctttcccacccaccccaagaagccctgtcccgccatcagtctctctcctcgggatgagcagggagagcgcgcggaggttcccgactccctcgactacaaccaagaaagaataattttcaaagtgttcaacatccccgcccccaagctccccaaaacacaggggcagggaacaccaaaacactcggctctcgttaggaagatcacggctctgaaaggaaatagtagacacgatacttcatctcatctggatttatgaccaaaaaaacaaaaacaaaaacccaaagagttcgcttgcattttttccttccaaatctcggttcggctcgaaggcagggaatctaaaagaccgaggccgatggaagagagccagcggggcgagcgagcgggcagcctccctttttgcctcccggagtcacccgttattcgtcgtggctcaagcccggccacgccgccccaagggctcctcccgacctcccggcctgccgctccggccactgcgggatccagaaacatgtcgaccacacttctgtccgccttctacgatgtcgacttcttgtgcaagacagagaaatccctggccaacctcaacctgaacaacatgctggacaagaaggcggtggggacgcctgtggccgccgcccccagctcgggcttcgcgccgggattcctccgacggcactcggccagcaacctgcatgcactcgcccaccccgcgcccagccccggcagctgctcgcccaagttcccgggcgccgctaacggcagcagctgcggcagcgcggcggccggcggtccgacctcctacggcacccttaaggagccgtcggggggcggcggcacagccctgctcaacaaggagaacaaattccgggaccgctcgtttagcgagaacggcgatcgcagccagcacctcctgcacctgcagcagcagcagaaggggggcggcggctcccagatcaactccacgcgctacaagaccgagctgtgccggcccttcgaggagagcggcacgtgcaagtacggcgaaaagtgccagttcgcgcatggcttccacgagctgcgcagcctgactcgccatccgaagtacaagaccgagctgtgccgcacctttcataccatcggcttctgcccctatgggccgcgctgccacttcatccacaacgcggacgagcggcggcccgcgccgtcggggggcgcctccggggacctgcgtgcctttggcacgcgcgatgcgttgcacctgggcttcccgcgggagccgcggcccaagttgcaccacagcctcagcttctcgggcttcccgtcgggccaccatcagcccccgggcggcctcgagtcgccgctgctgctcgacagccccacgtcgcgcacgccgccgccgccctcctgctcttcggcctcgtcctgctcctcctccgcctcctcctgttcctcggcctccgcggcctccacgccctcgggcgccccgacatgctgcgcctccgcggcggccgcggctgcggccgctctgctgtacggcaccgggggcgccgaggacctgctggcgccgggggccccgtgcgcggcctgctcgtcggcctcgtgcgccaacaacgccttcgccttcggtccggagctcagcagcctcatcacgccgctcgccatccagacccacaactttgccgccgtggccgccgccgcctactaccgcagtcagcagcagcagcagcagcagggcctggcgccccccgcgcagccgccggcgccgcccagcgcgaccctccccgccggggccgccgcacctccctcgccgcccttcagcttccagctgccgcgccgcctgtccgactcgcccgtgttcgacgcgccccccagccccccggactcgctgtcggaccgcgacagctacctaagcggctccctgagctccggcagcctcagcggctctgagtctcccagcctcgaccctggccgccgcctgccaatcttcagccgcctctccatctccgacgactgaggcaagagggcgccagtgaggaggaagggaaggcggttcagagatgttggaggacacccctcgccatctcgcccttgctgggggcacgggagtggggggggtgacatgggccctaggcagactgcaagcccgaccgagcacttggactcgaactctgtgccgggaggggcccccacccctcctttttcggtttcctcttgtctctttttttttatttttattacgaagtttcattctttttgagcaaaaaagtcgaactttttctgttgaacaaaatattcacaacagggcagttgtgatacgaatagaacaaaaaagaaaaaaaaaacacttaaactttgttaggactccgatgagtttgggacttcaggaaaaatcaacccagcaccagcagctaccaaccaccattccatctcttcacttgaacagcattagttaagtccagatgtgggaacccttctcttggaagaagttcctaattgtgtctcagaccggtgtaaacaaaccagccagccgccaccttgctaaacctataagctttttaaaatccaatatattctgccaagaatatgccttgatagttagccctcagcccataggtgttttttgttttttaacagaattatatatgtctgggggtgaaaaaacccttgcattccaaaggtccatactggttacttggtttcattgccaccacttagtggatgttcagtttagaaccattttgtctgctccctctggaagccttgcgcagagcttactttgtaattgttggagaataactgctgaatttttagctgttttgagttgattcgcaccactgcaccacaactcaatatgaaaactatttaacttatttattatcttgtgaaaagtatacaatgaaaattttgttcatactgtatttatcaagtatgatgaaaagcaatagatatatattcttttattatgttaaattatgattgccattattaatcggcaaaatgtggagtgtatgttcttttcacagtaatatatgccttttgtaacttcacttggttattttattgtaaatgagtacaaaattcttaatttaagagattgtatgtaatatttatttcattaatttctttccttgtttacgtaaattttgaaagattgcatgatttcttgacagaaatcgatcttgatgctgtggaagtagtttgaggaacatcctatgagttttcttagaatgtataaaggttgtagcccatccaacttcaaagaaaaaaatgaccacatactttgcaatcaggctgaaatgtggcatgcttttctaattccaactttataaactagcaaaaaagtgtttgcttattccaccagttctactgtgacatactcgagtataaagacatgtagcaataacggggagtggggggggagtctcacagtgcctttggaagggcccgaacttgccttaaatcttcctcaaccaaataagtattttattagtgcttgagagaatctgaatgtaggatgggttcaactgcacaaaaggaaaagatttttaccactttttttatatagatataaagtgaagcaaccgccttagtgctgaaatatgtagtacatgaatatgccttgtttaattacagaaaattccaaaacttgtactattttttttttccatgtagaaaggcaggaatgtctcctaagctttcctggacagcagatgaatgagcggtagctttagtttgtacgtaggtacagttggagcactatatgtactctctggactactttggacagaagtaggtttttgaatgtaacaagataagtcaacttgagttgtaatatattttggggaatcagctcactacaaattgtgactgtaaacattgtactgtaaatgttttgtagttttcccccaataaaatttttgggaaaaaaaggtattaacatgtaagagctttctttttaaacaggaatgtcttagctttctagcttcccagctaaccatgtctgccattccccaggtcttggcatggtgggggaggacttggagagctggcagagccagagttcagaagagcctgcgtcctctcagcccgtatatattttataagcaagttcttctaatgaaagaaagtaattatttggactgtcaagggcattagtt

SEQ ID NO: 199 - protein, 546 aa, Homo sapien
MEESQRGERAGSLPFCLPESPVIRRGSSPATPPQGLLPTSRPAAPATAGSRNMSTTLLSAFYDVDFLCKTEKSLANLNLNNMLDKKAVGTPVAAAPSSGFAPGFLRRHSASNLHALAHPAPSPGSCSPKFPGAANGSSCGSAAAGGPTSYGTLKEPSGGGGTALLNKENKFRDRSFSENGDRSQHLLHLQQQQKGGGGSQINSTRYKTELCRPFEESGTCKYGEKCQFAHGFHELRSLTRHPKYKTELCRTFHTIGFCPYGPRCHFIHNADERRPAPSGGASGDLRAFGTRDALHLGFPREPRPKLHHSLSFSGFPSGHHQPPGGLESPLLLDSPTSRTPPPPSCSSASSCSSSASSCSSASAASTPSGAPTCCASAAAAAAAALLYGTGGAEDLLAPGAPCAACSSASCANNAFAFGPELSSLITPLAIQTHNFAAVAAAAYYRSQQQQQQQGLAPPAQPPAPPSATLPAGAAAPPSPPFSFQLPRRLSDSPVFDAPPSPPDSLSDRDSYLSGSLSSGSLSGSESPSLDPGRRLPIFSRLSISDD

SEQ ID NO: 200 - DNA, 2591 bp, Homo sapien
gtcgtggaagcaggactgcgccgcgtcttcctcaaggtggggttcggggggccaccgaatcgctgtcacgccggcaggttgagaacaaaaacatgcacctggagtttccccggagccctctgcgtggttgagcttcggtggaatttcggggctcttggctgccagccgcgcttgcctggtagcaacagaaaccagtcctgctctcctccgtggacatttcattaccatccagaagtgtctcccactgaaggcatccgtggttgtttttaagccacaaaaaagccacacccaagatcacctgacacccaccctgacaagtgtccatgatgctgggccctgagggaggtgaaggctttgtggtcaagctccgtggcctgccctggtcctgctctgttgaggacgtgcagaacttcctctctgactgcacgattcatgatggggccgcaggtgtccatttcatctacactagagagggcaggcagagtggtgaggcttttgttgaacttggatcagaagatgatgtaaaaatggccctgaaaaaagacagggaaagcatgggacaccggtacattgaggtgttcaagtcccacagaaccgagatggattgggtgttgaagcacagtggtcccaacagtgccgacagcgccaacgatggcttcgtgcggcttcgaggactcccatttggatgcacaaaggaagaaattgttcagttcttctcagggttggaaattgtgccaaacgggatcacattgcctgtggaccccgaaggcaagattacaggggaagcgttcgtgcagtttgcctcgcaggagttagctgagaaggctctagggaaacacaaggagaggatagggcacaggtacattgaggtgtttaagagcagccaggaggaagttaggtcatactcagatccccctctgaagttcatgtccgtgcagcggccagggccctatgaccggcccgggactgccaggaggtacattggcatcgtgaagcaggcaggcctggaaaggatgaggcctggtgcctacagcacaggctacgggggctacgaggagtacagtggcctcagtgatggctacggcttcaccaccgacctgttcgggagagacctcagctactgtctctccgggatgtatgaccacagatacggcgacagtgagttcacagtgcagagcaccacaggccactgtgtccacatgaggggcctgccgtacaaagcgaccgagaacgacatttacaacttcttctctcctctcaaccctgtgagagtccatattgagattggcccagatggaagagtgacgggtgaagcagatgttgagtttgctactcatgaagaagctgtggcagctatgtccaaagacagggccaatatgcagcacagatatatagaactcttcttgaattcaacaacaggggccagcaatggggcgtatagcagccaggtgatgcaaggcatgggggtgtctgctgcccaggccacttacagtggcctggagagccagtcagtgagtggctgttacggggccggctacagtgggcagaacagcatgggtggctatgactagttttgttaggaacatttgagttacttcaatcattttcacaggcagccaacaagcaattaagagcagttataatagaggaagctgggggacccattttgcaccatgagtttgtgaaaaatctggattaaaaaattacctcttcagtgttttctcatgcaaaattttcttctagcatgtgataatgagtaaactaaaactattttcagcttttctcaattaacattttggtagtatacttcagagtgatgttatctaagtttaagtagtttaagtatgttaaatgtggatcttttacaccacatcacagtgaacacactggggagacgtgcttttttggaaaactcaaaggtgctagctccctgattcaaagaaatatttctcatgtttgttcattctagtttatattttcatttaaaatcctttaggttaagtttaagctttttaaaagttagttttgagaattgagacacaatactaatactgtaggaattggtgaggccttgacttaaaactttctttgtactgtgatttccttttgggtgtattttgctaagtgaaacttgttaaattttttgttaactaaatttttttcttaaaataaagactttttcacaatgactggcacagattactcagcaaaagatagcaaaacgggtggttgaagataattcattttaatcgtaatgtattttagtgtgaatttaaaaatttcatacatcaaatctatgatctcccttatattcttatgatgaggctaaataaaagtctaataaaaatgttaaatatgtgaatggtggaaatggtgactagcagcacacattctgggaagcatcaaatagacacacggccccagccacctgcaacttatgtgcactgttgtaaaccattcagaattttcctgctaggcccttgatgctggagtcacatctgttgatagctggagaactttagtttcaagtactacattgtgaaagcaattattttgtttctcgtttttataaaatgctgacttaaactttt

SEQ ID NO: 201 - protein, 415 aa, Homo sapien
MMLGPEGGEGFVVKLRGLPWSCSVEDVQNFLSDCTIHDGAAGVHFIYTREGRQSGEAFVELGSEDDVKMALKKDRESMGHRYIEVFKSHRTEMDWVLKHSGPNSADSANDGFVRLRGLPFGCTKEEIVQFFSGLEIVPNGITLPVDPEGKITGEAFVQFASQELAEKALGKHKERIGHRYIEVFKSSQEEVRSYSDPPLKFMSVQRPGPYDRPGTARRYIGIVKQAGLERMRPGAYSTGYGGYEEYSGLSDGYGFTTDLFGRDLSYCLSGMYDHRYGDSEFTVQSTTGHCVHMRGLPYKATENDIYNFFSPLNPVRVHIEIGPDGRVTGEADVEFATHEEAVAAMSKDRANMQHRYIELFLNSTTGASNGAYSSQVMQGMGVSAAQATYSGLESQSVSGCYGAGYSGQNSMGGYD

SEQ ID NO: 202 - DNA, 2307 bp, Homo sapien
ggcacgaggcgatggagccggggcgccggggggccgcggcgctgctagcgctgctgtgcgtggcctgcgcgctgcgcgccgggcgcgcccaatacgaacgctacagcttccgcagcttcccacgggacgagctgatgccgctcgagtcggcctaccggcacgcgctggacaagtacagcggcgagcactgggccgagagcgtgggctacctggagatcagcctgcggctgcaccgcttgctgcgcgacagcgaggccttctgccaccgcaactgcagcgccgcgccgcagcccgagcccgccgccggcctcgccagctatcccgagctgcgcctcttcgggggcctgctgcgccgcgcgcactgcctcaagcgctgcaagcagggcctgccagccttccgccagtcccagcccagccgcgaggtgctggcggacttccagcgccgcgagccctacaagttcctgcagttcgcttacttcaaggcaaataatctccccaaagccatcgccgctgctcacacctttctactgaagcatcctgatgacgaaatgatgaagaggaacatggcatattataagagcctgcctggtgccgaggactacattaaagacctggaaaccaagtcatatgaaagcctgttcatccgagcagtgcgggcatacaacggtgagaactggagaacatccatcacagacatggagctggcccttcccgacttcttcaaagccttttacgagtgtctcgcagcctgcgagggttccagggagatcaaggacttcaaggatttctacctttccatagcagatcattatgtagaagttctggaatgcaaaatacagtgtgaagagaacctcaccccagttataggaggctatccggttgagaaatttgtggctaccatgtatcattacttgcagtttgcctattataagttgaacgacctgaagaatgcagccccctgtgcagtcagctatctgctctttgatcagaatgacaaggtcatgcagcagaacctggtgtattaccagtaccacagggacacttggggcctctcggatgagcacttccagcccagacctgaagcagttcagttctttaatgtgaccacactccagaaggagctgtatgactttgctaaggaaaatataatggatgatgatgagggagaagttgtggaatatgtggatgacctcttggaactggaggagaccagctagcccacagcaaccaaagagacttcctcttggcgttcaggaaacacagattctttgtccttttcccaacagcccaggctgttgatacctcagagccttctctttactctccaaagtgaaagggaagcccccgtctctctaactgcatgtcatcaggggtgagcctgcctttcctatcttcacacctgccacctcatgttcacacctatctttctcaccttttttttgagatggagtctcgctctcttgcccaggctggagtgcaatggcacgttctcagctcactgcaacctccgcctcttgggttcaagcaattctgctgcatcagcctcccgagtacctgggattacaggcatgtgccaccacgcccggctaattttgtatttttaagtaagagacggggttttgccatgttggccaggctggtctcgaactcttgacttcagatgatccatctgccttgggcctcccacagtgctgggattacaggcgtgagccaccatgcccggcctctttctcacctttacacctgtcttcttatcctcacatctgttttcacaccttcatccctgtcttcctcatgttcacacttgtcttccccatgttcatagctgcctttcttaccattttggtttgaagggcagtcttctctggcttgtttttttgtttttcccagaaaatcagtattattttttaaataagaaaaacattcctagaagatgataattgtgaaaacctcctttggcttatttgcttttccagattttagtctcctttctccccatccgggaaagatggtggaagacataggctaaatttctccagcctcacaatggtcttcacttggtctgacttgtaccaattctagcacccactgaaaaacaagttgagtagagagtgtagagtgcagaaatgtggcttttgccccactttgcatctccaaaattacaacggttggccgatcccatttgaggacaatgcttagttataagtctccgagttggaaaaggaagaaagccagagctgtctagtttcattcattctttcagtaaatatttattgagtaaaaaaaaaaaaaaaaaaaaaaaaaaaa

SEQ ID NO: 203 - protein, 401 aa, Homo sapien
MEPGRRGAAALLALLCVACALRAGRAQYERYSFRSFPRDELMPLESAYRHALDKYSGEHWAESVGYLEISLRLHRLLRDSEAFCHRNCSAAPQPEPAAGLASYPELRLFGGLLRRAHCLKRCKQGLPAFRQSQPSREVLADFQRREPYKFLQFAYFKANNLPKAIAAAHTFLLKHPDDEMMKRNMAYYKSLPGAEDYIKDLETKSYESLFIRAVRAYNGENWRTSITDMELALPDFFKAFYECLAACEGSREIKDFKDFYLSIADHYVEVLECKIQCEENLTPVIGGYPVEKFVATMYHYLQFAYYKLNDLKNAAPCAVSYLLFDQNDKVMQQNLVYYQYHRDTWGLSDEHFQPRPEAVQFFNVTTLQKELYDFAKENIMDDDEGEVVEYVDDLLELEETS

SEQ ID NO: 204 - DNA, 3028 bp, Homo sapien
ctcgtcgccgccgccattttagctgttggttccggccgcaccgtgtgggctgtagtagcgggaggggtgggggtcctccagagttaagtggctgtcctcgactgtgcccatacagcagccagctttcttccttaataactgcccgttcgaagagtgcgaggatgtccaagcggcaccggttggacctaggggaggattacccctctggcaagaagcgtgcggggaccgatgggaaggatcgagatcgagaccgggatcgtgaagatcggtctaaagatcgagaccgagaacgtgatagaggagatagagagcgagagagggagaaagaaaaggagaaggagttgcgagcttcaacaaatgctatgcttatcagtgctggattaccacccctgaaagcttcccattcagctcactcaacccactcagcacattcaacgcattctacacattctgctcattcaacgcatgccggacatgcaggtcacacgtcacttccacagtgcattaatccgttcaccaacttaccccatactcctcgatactatgatattctaaagaaacgtcttcagctccctgtttgggaatacaaggataggtttacagatattctgggtagacatcagtcctttgtactggttggtgagactgggtctggtaaaacaacacaaattccacaccggtgtgtggagtacatgcgatcattaccaggacccaagagaggagttgcctgtacccaacccaggagagtggctgcaatgagtgtggctcagagagttgctgatgagatggatgtgatgttgggccaggaagttggttactccattcgatttgaagactgcagtagtgcaaaaacattttttatgtatatgactgatgggatgttacttcgtgaagctatgaatgatcccctcctggagcgttatggtgtaataattcttgatgaggctcatgagaggacactggctacagatattctaatgggtgttctgaaggaagttgtaagacagagatcagatttaaaggttatagttatgagcgctactctagatgcaggaaaattccagatttactttgataactgtcctctcctaactattcctgggcgtacacatcctgttgagatcttctatactccagaaccagagagagattatcttgaagcagcaattcgaacagttatccagattcatatgtgtgaagaggaagagggagatcttcttcttttcttaactggtcaagaggaaattgatgaagcctgtaagagaataaagcgtgaagttgatgatttgggccctgaagttggtgacattaaaatcattccattgtattctacacttccacctcagcagcagcaacgcatttttgagcctccacctcccaaaaaacagaatggagcaattggaagaaaggtagttgtgtcaactaacatagcagagacgtctttgacaatagatggtgtggtgtttgtgattgatcctggatttgcgaaacagaaggtctacaatcctcgaatcagagttgagtcccttttggtgacagctattagtaaagcttcagctcagcaaagggctggtcgagctggacgtaccagacctggaaaatgcttcagactttacacagagaaagcttataaaacagaaatgcaggataacacctatcctgagattttgcgttctaatttaggatcagttgtgttacaattgaagaaacttggtattgatgacttggtacattttgattttatggatccaccagctcctgaaactctgatgagagccctggaacttttgaattacctggctgctttaaatgatgatggagatctgactgaattgggatccatgatggcagagtttcctctagatccacagctcgcaaaaatggttattgcaagttgtgactacaactgttctaatgaggtcctatctattactgctatgttgtcagtcccacagtgttttgttcgccccacggaggccaagaaagccgcagatgaggccaagatgagatttgcccacatagatggagatcatctgacactgctgaacgtctaccatgcttttaaacaaaatcatgaatcggttcagtggtgttatgacaacttcattaactacaggtccctgatgtccgcggacaatgtacgccagcagctatctcgaattatggacagatttaatttgcctcgtcgaagtactgactttacaagcagggactattatattaatataagaaaagctttggttactgggtattttatgcaggtggcacatttagaacgaacagggcattacttaactgtgaaagataaccaggtggttcagttgcatccctctactgttcttgaccacaaacctgaatgggtgctttataatgagtttgttctaacaacaaagaattacatccggacatgtacagacatcaagccagaatggttggtgaaaattgcccctcaatattatgacatgagcaatttcccacagtgtgaagcaaagagacagttggaccgcatcattgcccaaacttcaatccaaggaatattcacagtactgaattcagtgcttagaactgaagttattgagaggacagctttaaaagatgaatgaactcaaaagttcgagttgtgctcttcacgttggttcgataatggcctttatttgaaagctttttaatttttctttacagtaaatattccattctgatttcataaattaaacatttatgcctcccttttgtgttgacactgtagctcatactggaaaagtcgatcaatgttttgcagtttattgaaagtagttctatatataacaatgttataagcatttctttagaaatggttgaaaatgcttctaaaatgtgattatcgaccatggtatgcatgatcgttgtaattgttgacattccttttagaagttgtgaaatgttacaacttgtgcttatgtagacacaattttttgtttcagtaccagaggcactgacttcaataaagtttatttatacggaaaaaaaaaaaaaaaaaaaaaaaaaaaaa

SEQ ID NO: 205 - protein, 813 aa, Homo sapien
MSKRHRLDLGEDYPSGKKRAGTDGKDRDRDRDREDRSKDRDRERDRGDREREREKEKEKELRASTNAMLISAGLPPLKASHSAHSTHSAHSTHSTHSAHSTHAGHAGHTSLPQCINPFTNLPHTPRYYDILKKRLQLPVWEYKDRFTDILGRHQSFVLVGETGSGKTTQIPHRCVEYMRSLPGPKRGVACTQPRRVAAMSVAQRVADEMDVMLGQEVGYSIRFEDCSSAKTFFMYMTDGMLLREAMNDPLLERYGVIILDEAHERTLATDILMGVLKEVVRQRSDLKVIVMSATLDAGKFQIYFDNCPLLTIPGRTHPVEIFYTPEPERDYLEAAIRTVIQIHMCEEEEGDLLLFLTGQEEIDEACKRIKREVDDLGPEVGDIKIIPLYSTLPPQQQQRIFEPPPPKKQNGAIGRKVVVSTNIAETSLTIDGVVFVIDPGFAKQKVYNPRIRVESLLVTAISKASAQQRAGRAGRTRPGKCFRLYTEKAYKTEMQDNTYPEILRSNLGSVVLQLKKLGIDDLVHFDFMDPPAPETLMRALELLNYLAALNDDGDLTELGSMMAEFPLDPQLAKMVIASCDYNCSNEVLSITAMLSVPQCFVRPTEAKKAADEAKMRFAHIDGDHLTLLNVYHAFKQNHESVQWCYDNFINYRSLMSADNVRQQLSRIMDRFNLPRRSTDFTSRDYYINIRKALVTGYFMQVAHLERTGHYLTVKDNQVVQLHPSTVLDHKPEWVLYNEFVLTTKNYIRTCTDIKPEWLVKIAPQYYDMSNFPQCEAKRQLDRIIAQTSIQGIFTVLNSVLRTEVIERTALKDE

SEQ ID NO: 206 - DNA, 2177 bp, Homo sapien
gaattcgcggccgctggtttgcagctgctccgtcatcgtgcggcccgacgctatctcgcgctcgtgtgcaggcccggctcggctcctggtccccggtgcgagggttaacgcgaggccccggcctcggtccccggactaggccgtgaccccgggtgccatgaagcaggagggctcggcgcggcgccgcggcgcggacaaggcgaaaccgccgcccggcggaggagaacaagaacccccaccgccgccggccccccaggatgtggagatgaaagaggaggcagcgacgggtggcgggtcaacgggggaggcagacggcaagacggcggcggcagcggttgagcactcccagcgagagctggacacagtcaccttggaggacatcaaggagcacgtgaaacagctagagaaagcggtttcaggcaaggagccgagattcgtgctgcgggccctgcggatgctgccttccacatcacgccgcctcaaccactatgttctgtataaggctgtgcagggcttcttcacttcaaataatgccactcgagactttttgctccccttcctggaagagcccatggacacagaggctgatttacagttccgtccccgcacgggaaaagctgcgtcgacacccctcctgcctgaagtggaagcctatctccaactcctcgtggtcatcttcatgatgaacagcaagcgctacaaagaggcacagaagatctctgatgatctgatgcagaagatcagtactcagaaccgccgggccctagaccttgtagccgcaaagtgttactattatcacgcccgggtctatgagttcctggacaagctggatgtggtgcgcagcttcttgcatgctcggctccggacagctacgcttcggcatgacgcagacgggcaggccaccctgttgaacctcctgctgcggaattacctacactacagcttgtacgaccaggctgagaagctggtgtccaagtctgtgttcccagagcaggccaacaacaatgagtgggccaggtacctctactacacagggcgaatcaaagccatccagctggagtactcagaggcccggagaacgatgaccaacgcccttcgcaaggcccctcagcacacagctgtcggcttcaaacagacggtgcacaagcttctcatcgtggtggagctgttgctgggggagatccctgaccggctgcagttccgccagccctccctcaagcgctcactcatgccctatttccttctgactcaagctgtcaggacaggaaacctagccaagttcaaccaggtcctggatcagtttggggagaagtttcaagcagatgggacctacaccctaattatccggctgcggcacaacgtgattaagacaggtgtacgcatgatcagcctctcctattcccgaatctccttggctgacatcgcccagaagctgcagttggatagccccgaagatgcagagttcattgttgccaaggccatccgggatggtgtcattgaggccagcatcaaccacgagaagggctatgtccaatccaaggagatgattgacatctattccacccgagagccccagctagccttccaccagcgcatctccttctgcctagatatccacaacatgtctgtcaaggccatgaggtttcctcccaaatcgtacaacaaggacttggagtctgcagaggaacggcgtgagcgagaacagcaggacttggagtttgccaaggagatggcagaagatgatgatgacagcttcccttgagctggggggctggggaggggtagggggaatggggacaggctctttcccccttgggggtcccctgcccagggcactgtccccattttcccacacacagctcatatgctgcattcgtgcagggggtgggggtgctgggagccagccaccctgacctcccccagggctcctccccagccggtgacttactgtacagcaggcaggagggtgggcaggcaacctccccgggcagggtcctggccagcagtgtgggagcaggaggggaaggatagttctgtgtactcctttagggagtgggggactagaactgggatgtcttggcttgtatgttttttgaagcttcgattatgatttttaaacaataaaaagttctcccaaaaaaaaaaaaaaaaaaaaaaaaaaaagcggccgcgaattc

SEQ ID NO: 207 - protein, 534 aa, Homo sapien [sequence omitted]

SEQ ID NO: 208 - DNA, 4204 bp, Homo sapien
caggacagggaagagcgggcgctatggggagccggacgccagagtcccctctccacgccgtgcagctgcgctggggcccccggcgccgacccccgctcgtgccgctgctgttgctgctcgtgccgccgccacccagggtcgggggcttcaacttagacgcggaggccccagcagtactctcggggcccccgggctccttcttcggattctcagtggagttttaccggccgggaacagacggggtcagtgtgctggtgggagcacccaaggctaataccagccagccaggagtgctgcagggtggtgctgtctacctctgtccttggggtgccagccccacacagtgcacccccattgaatttgacagcaaaggctctcggctcctggagtcctcactgtccagctcagagggagaggagcctgtggagtacaagtccttgcagtggttcggggcaacagttcgagcccatggctcctccatcttggcatgcgctccactgtacagctggcgcacagagaaggagccactgagcgaccccgtgggcacctgctacctctccacagataacttcacccgaattctggagtatgcaccctgccgctcagatttcagctgggcagcaggacagggttactgccaaggaggcttcagtgccgagttcaccaagactggccgtgtggttttaggtggaccaggaagctatttctggcaaggccagatcctgtctgccactcaggagcagattgcagaatcttattaccccgagtacctgatcaacctggttcaggggcagctgcagactcgccaggccagttccatctatgatgacagctacctaggatactctgtggctgttggtgaattcagtggtgatgacacagaagactttgttgctggtgtgcccaaagggaacctcacttacggctatgtcaccatccttaatggctcagacattcgatccctctacaacttctcaggggaacagatggcctcctactttggctatgcagtggccgccacagacgtcaatggggacgggctggatgacttgctggtgggggcacccctgctcatggatcggacccctgacgggcggcctcaggaggtgggcagggtctacgtctacctgcagcacccagccggcatagagcccacgcccacccttaccctcactggccatgatgagtttggccgatttggcagctccttgacccccctgggggacctggaccaggatggctacaatgatgtggccatcggggctccctttggtggggagacccagcagggagtagtgtttgtatttcctgggggcccaggagggctgggctctaagccttcccaggttctgcagcccctgtgggcagccagccacaccccagacttctttggctctgcccttcgaggaggccgagacctggatggcaatggatatcctgatctgattgtggggtcctttggtgtggacaaggctgtggtatacaggggccgccccatcgtgtccgctagtgcctccctcaccatcttccccgccatgttcaacccagaggagcggagctgcagcttagaggggaaccctgtggcctgcatcaaccttagcttctgcctcaatgcttctggaaaacacgttgctgactccattggtttcacagtggaacttcagctggactggcagaagcagaagggaggggtacggcgggcactgttcctggcctccaggcaggcaaccctgacccagaccctgctcatccagaatggggctcgagaggattgcagagagatgaagatctacctcaggaacgagtcagaatttcgagacaaactctcgccgattcacatcgctctcaacttctccttggacccccaagccccagtggacagccacggcctcaggccagccctacattatcagagcaagagccggatagaggacaaggctcagatcttgctggactgtggagaagacaacatctgtgtgcctgacctgcagctggaagtgtttggggagcagaaccatgtgtacctgggtgacaagaatgccctgaacctcactttccatgcccagaatgtgggtgagggtggcgcctatgaggctgagcttcgggtcaccgcccctccagaggctgagtactcaggactcgtcagacacccagggaacttctccagcctgagctgtgactactttgccgtgaaccagagccgcctgctggtgtgtgacctgggcaaccccatgaaggcaggagccagtctgtggggtggccttcggtttacagtccctcatctccgggacactaagaaaaccatccagtttgacttccagatcctcagcaagaatctcaacaactcgcaaagcgacgtggtttcctttcggctctccgtggaggctcaggcccaggtcaccctgaacggtgtctccaagcctgaggcagtgctattcccagtaagcgactggcatccccgagaccagcctcagaaggaggaggacctgggacctgctgtccaccatgtctatgagctcatcaaccaaggccccagctccattagccagggtgtgctggaactcagctgtccccaggctctggaaggtcagcagctcctatatgtgaccagagttacgggactcaactgcaccaccaatcaccccattaacccaaagggcctggagttggatcccgagggttccctgcaccaccagcaaaaacgggaagctccaagccgcagctctgcttcctcgggacctcagatcctgaaatgcccggaggctgagtgtttcaggctgcgctgtgagctcgggcccctgcaccaacaagagagccaaagtctgcagttgcatttccgagtctgggccaagactttcttgcagcgggagcaccagccatttagcctgcagtgtgaggctgtgtacaaagccctgaagatgccctaccgaatcctgcctcggcagctgccccaaaaagagcgtcaggtggccacagctgtgcaatggaccaaggcagaaggcagctatggcgtcccactgtggatcatcatcctagccatcctgtttggcctcctgctcctaggtctactcatctacatcctctacaagcttggattcttcaaacgctccctcccatatggcaccgccatggaaaaagctcagctcaagcctccagccacctctgatgcctgagtcctcccaatttcagactcccattcctgaagaaccagtccccccaccctcattctactgaaaaggaggggtctgggtacttcttgaaggtgctgacggccagggagaagctcctctccccagcccagagacatacttgaagggccagagccaggggggtgaggagctggggatccctcccccccatgcactgtgaaggacccttgtttacacataccctcttcatggatgggggaactcagatccagggacagaggcccagcctccctgaagcctttgcattttggagagtttcctgaaacaactggaaagataactaggaaatccattcacagttctttgggccagacatgccacaaggacttcctgtccagctccaacctgcaaagatctgtcctcagccttgccagagatccaaaagaagcccccagtaagaacctggaacttggggagttaagacctggcagctctggacagccccaccctggtgggccaacaaagaacactaactatgcatggtgccccaggaccagctcaggacagatgccacaaggatagatgctggcccagggccagagcccagctccaaggggaatcagaactcaaatggggccagatccagcctggggtctggagttgatctggaacccagactcagacattggcaccaatccaggcagatccaggactatatttgggcctgctccagacctgatcctggaggcccagttcaccctgatttaggagaagccaggaatttcccaggacctgaaggggccatgatggcaacagatctggaacctcagcctggccagacacaggccctccctgttccccagagaaaggggagcccactgtcctgggcctgcagaatttgggttctgcctgccagctgcactgatgctgcccctcatctctctgcccaacccttccctcaccttggcaccagacacccaggacttatttaaactctgttgcaagtgcaataaatctgacccagtgcccccactgaccagaactagaaaaaaaaa

SEQ ID NO: 209 - protein, 1049 aa, Homo sapien
MGSRTPESPLHAVQLRWGPRRRPPLVPLLLLLVPPPPRVGGFNLDAEAPAVLSGPPGSFFGFSVEFYRPGTDGVSVLVGAPKANTSQPGVLQGGAVYLCPWGASPTQCTPIEFDSKGSRLLESSLSSSEGEEPVEYKSLQWFGATVRAHGSSILACAPLYSWRTEKEPLSDPVGTCYLSTDNFTRILEYAPCRSDFSWAAGQGYCQGGFSAEFTKTGRVVLGGPGSYFWQGQILSATQEQIAESYYPEYLINLVQGQLQTRQASSIYDDSYLGYSVAVGEFSGDDTEDFVAGVPKGNLTYGYVTILNGSDIRSLYNFSGEQMASYFGYAVAATDVNGDGLDDLLVGAPLLMDRTPDGRPQEVGRVYVYLQHPAGIEPTPTLTLTGHDEFGRFGSSLTPLGDLDQDGYNDVAIGAPFGGETQQGVVFVFPGGPGGLGSKPSQVLQPLWAASHTPDFFGSALRGGRDLDGNGYPDLIVGSFGVDKAVVYRGRPIVSASASLTIFPAMFNPEERSCSLEGNPVACINLSFCLNASGKHVADSIGFTVELQLDWQKQKGGVRRALFLASRQATLTQTLLIQNGAREDCREMKIYLRNESEFRDKLSPIHIALNFSLDPQAPVDSHGLRPALHYQSKSRIEDKAQILLDCGEDNICVPDLQLEVFGEQNHVYLGDKNALNLTFHAQNVGEGGAYEAELRVTAPPEAEYSGLVRHPGNFSSLSCDYFAVNQSRLLVCDLGNPMKAGASLWGGLRFTVPHLRDTKKTIQFDFQILSKNLNNSQSDVVSFRLSVEAQAQVTLNGVSKPEAVLFPVSDWHPRDQPQKEEDLGPAVHHVYELINQGPSSISQGVLELSCPQALEGQQLLYVTRVTGLNCTTNHPINPKGLELDPEGSLHHQQKREAPSRSSASSGPQILKCPEAECFRLRCELGPLHQQESQSLQLHFRVWAKTFLQREHQPFSLQCEAVYKALKMPYRILPRQLPQKERQVATAVQWTKAEGSYGVPLWIIILAILFGLLLLGLLIYILYKLGFFKRSLPYGTAMEKAQLKPPATSDA

SEQ ID NO: 210 - DNA, 1851 bp, Homo sapien
gggcgcgccagagacgcagccgcgctcccaccacccacacccaccgcgccctcgttcgcctcttctccgggagccagtccgcgccaccgccgccgcccaggccatcgccaccctccgcagccatgtccaccaggtccgtgtcctcgtcctcctaccgcaggatgttcggcggcccgggcaccgcgagccggccgagctccagccggagctacgtgactacgtccacccgcacctacagcctgggcagcgcgctgcgccccagcaccagccgcagcctctacgcctcgtccccgggcggcgtgtatgccacgcgctcctctgccgtgcgcctgcggagcagcgtgcccggggtgcggctcctgcaggactcggtggacttctcgctggccgacgccatcaacaccgagttcaagaacacccgcaccaacgagaaggtggagctgcaggagctgaatgaccgcttcgccaactacatcgacaaggtgcgcttcctggagcagcagaataagatcctgctggccgagctcgagcagctcaagggccaaggcaagtcgcgcctaggggacctctacgaggaggagatgcgggagctgcgccggcaggtggaccagctaaccaacgacaaagcccgcgtcgaggtggagcgcgacaacctggccgaggacatcatgcgcctccgggagaaattgcaggaggagatgcttcagagagaggaagccgaaaacaccctgcaatctttcagacaggatgttgacaatgcgtctctggcacgtcttgaccttgaacgcaaagtggaatctttgcaagaagagattgcctttttgaagaaactccacgaagaggaaatccaggagctgcaggctcagattcaggaacagcatgtccaaatcgatgtggatgtttccaagcctgacctcacggctgccctgcgtgacgtacgtcagcaatatgaaagtgtggctgccaagaacctgcaggaggcagaagaatggtacaaatccaagtttgctgacctctctgaggctgccaaccggaacaatgacgccctgcgccaggcaaagcaggagtccactgagtaccggagacaggtgcagtccctcacctgtgaagtggatgcccttaaaggaaccaatgagtccctggaacgccagatgcgtgaaatggaagagaactttgccgttgaagctgctaactaccaagacactattggccgcctgcaggatgagattcagaatatgaaggaggaaatggctcgtcaccttcgtgaataccaagacctgctcaatgttaagatggcccttgacattgagattgccacctacaggaagctgctggaaggcgaggagagcaggatttctctgcctcttccaaacttttcctccctgaacctgagggaaactaatctggattcactccctctggttgatacccactcaaaaaggacattcctgattaagacggttgaaactagagatggacaggttatcaacgaaacttctcagcatcacgatgaccttgaataaaaattgcacacactcagtggcaggcgatatattacccaggcaagaataaaaaagaaatcccatatcttaaagaaacagctttcaagtgcctttctgcagtttttcaggagcgcaagatagatttggaataggaataagctctagttcttaacaaccgacactcctacaagatttagaaaaaagtttacaacataatctagtttacagaaaaatcttgtgctagaatactttttaaaaggtattttgaataccattaaaactgcttttttttttccagcaagtatccaaccaacttggttctgcttcaataaatctttggaaaactcca

SEQ ID NO: 211 - protein, 466 aa, Homo sapien
MSTRSVSSSSYRRMFGGPGTASRPSSSRSYVTTSTRTYSLGSALRPSTSRSLYASSPGGVYATRSSAVRLRSSVPGVRLLQDSVDFSLADAINTEFKNTRTNEKVELQELNDRFANYIDKVRFLEQQNKILLAELEQLKGQGKSRLGDLYEEEMRELRRQVDQLTNDKARVEVERDNLAEDIMRLREKLQEEMLQREEAENTLQSFRQDVDNASLARLDLERKVESLQEEIAFLKKLHEEEIQELQAQIQEQHVQIDVDVSKPDLTAALRDVRQQYESVAAKNLQEAEEWYKSKFADLSEAANRNNDALRQAKQESTEYRRQVQSLTCEVDALKGTNESLERQMREMEENFAVEAANYQDTIGRLQDEIQNMKEEMARHLREYQDLLNVKMALDIEIATYRKLLEGEESRISLPLPNFSSLNLRETNLDSLPLVDTHSKRTFLIKTVETRDGQVINETSQHHDDLE

SEQ ID NO: 212 - DNA, 10057 bp, Homo sapien
cagtttggagctcagtcttccaccaaaggccgttcagttctcctgggctccagcctcctgcaaggactgcaagagttttcctccgcagctctgagtctccacttttttggtggagaaaggctgcaaaaagaaaaagagacgcagtgagtgggaaaagtatgcatcctattcaaacctaattgaatcgaggagcccagggacacacgccttcaggtttgctcaggggttcatatttggtgcttagacaaattcaaaatgaggaaacatcggcacttgcccttagtggccgtcttttgcctctttctctcaggctttcctacaactcatgcccagcagcagcaagcagatgtcaaaaatggtgcggctgctgatataatatttctagtggattcctcttggaccattggagaggaacatttccaacttgttcgagagtttctatatgatgttgtaaaatccttagctgtgggagaaaatgatttccattttgctctggtccagttcaacggaaacccacataccgagttcctgttaaatacgtatcgtactaaacaagaagtcctttctcatatttccaacatgtcttatattgggggaaccaatcagactggaaaaggattagaatacataatgcaaagccacctcaccaaggctgctggaagccgggccggtgacggagtccctcaggttatcgtagtgttaactgatggacactcgaaggatggccttgctctgccctcagcggaacttaagtctgctgatgttaacgtgtttgcaattggagttgaggatgcagatgaaggagcgttaaaagaaatagcaagtgaaccgctcaatatgcatatgttcaacctagagaattttacctcacttcatgacatagtaggaaacttagtgtcctgtgtgcattcatccgtgagtccagaaagggctggggacacggaaacccttaaagacatcacagcacaagactctgctgacattattttccttattgatggatcaaacaacaccggaagtgtcaatttcgcagtcattctcgacttccttgtaaatctccttgagaaactcccaattggaactcagcagatccgagtgggggtggtccagtttagcgatgagcccagaaccatgttttccttggacacctactccaccaaggcccaggttctgggtgcagtgaaagccctcgggtttgctggtggggagttggccaatatcggcctcgcccttgatttcgtggtggagaaccacttcacccgggcagggggcagccgcgtggaggaaggggttccccaggtgctggtcctcataagtgccgggccttctagtgacgagattcgctacggggtggtagcactgaagcaggctagcgtgttctcattcggccttggagcccaggccgcctccagggcagagcttcagcacatagctaccgatgacaacttggtgtttactgtcccggaattccgtagctttggggacctccaggagaaattactgccgtacattgttggcgtggcccaaaggcacattgtcttgaaaccgccaaccattgtcacacaagtcattgaagtcaacaagagagacatagtcttcctggtggatggctcatctgcactgggactggccaacttcaatgccatccgagacttcattgctaaagtcatccagaggctggaaatcggacaggatcttatccaggtggcagtggcccagtatgcagacactgtgaggcctgaattttatttcaatacccatccaacaaaaagggaagtcataaccgctgtgcggaaaatgaagcccctggacggctcggccctgtacacgggctctgctctagactttgttcgtaacaacctattcacgagttcagccggctaccgggctgccgaggggattcctaagcttttggtgctgatcacaggtggtaagtccctagatgaaatcagccagcctgcccaggagctgaagagaagcagcataatggcctttgccattgggaacaagggtgccgatcaggctgagctggaagagatcgctttcgactcctccctggtgttcatcccagctgagttccgagccgccccattgcaaggcatgctgcctggcttgctggcacctctcaggaccctctctggaacccctgaagttcactcaaacaaaagagatatcatctttcttttggatggatcagccaacgttggaaaaaccaatttcccttatgtgcgcgactttgtaatgaacctagttaacagccttgatattggaaatgacaatattcgtgttggtttagtgcaatttagtgacactcctgtaacggagttctctttaaacacataccagaccaagtcagatatccttggtcatctgaggcagctgcagctccagggaggttcgggcctgaacacaggctcagccctaagctatgtctatgccaaccacttcacggaagctggcggcagcaggatccgtgaacacgtgccgcagctcctgcttctgctcacagctgggcagtctgaggactcctatttgcaagctgccaacgccttgacacgcgcgggcatcctgactttttgtgtgggagctagccaggcgaataaggcagagcttgagcagattgcttttaacccaagcctggtgtatctcatggatgatttcagctccctgccagctttgcctcagcagctgattcagcccctaaccacatatgttagtggaggtgtggaggaagtaccactcgctcagccagagagcaagcgagacattctgttcctctttgacggctcagccaatcttgtgggccagttccctgttgtccgtgactttctctacaagattatcgatgagctcaatgtgaagccagaggggacccgaattgcggtggctcagtacagcgatgatgtcaaggtggagtcccgttttgatgagcaccagagtaagcctgagatcctgaatcttgtgaagagaatgaagatcaagacgggcaaagccctcaacctgggctacgcgctggactatgcacagaggtacatttttgtgaagtctgctggcagccggatcgaggatggagtgcttcagttcctggtgctgctggtcgcaggaaggtcatctgaccgtgtggatgggccagcaagtaacctgaagcagagtggggttgtgcctttcatcttccaagccaagaacgcagaccctgctgagttagagcagatcgtgctgtctccagcgtttatcctggctgcagagtcgcttcccaagattggagatcttcatccacagatagtgaatctcttaaaatcagtgcacaacggagcaccagcaccagtttcaggtgaaaaggacgtggtgtttctgcttgatggctctgagggcgtcaggagcggcttccctctgttgaaagagtttgtccagagagtggtggaaagcctggatgtgggccaggaccgggtccgcgtggccgtggtgcagtacagcgaccggaccaggcccgagttctacctgaattcatacatgaacaagcaggacgtcgtcaacgctgtccgccagctgaccctgctgggagggccgacccccaacaccggggccgccctggagtttgtcctgaggaacatcctggtcagctctgcgggaagcaggataacagaaggtgtgccccagctgctgatcgtcctcacggccgacaggtctggggatgatgtgcggaacccctccgtggtcgtgaagaggggtggggctgtgcccattggcattggcatcgggaacgctgacatcacagagatgcagaccatctccttcatcccggactttgccgtggccattcccacctttcgccagctggggaccgtccaacaggtcatctctgagagggtgacccagctcacccgcgaggagctgagcaggctgcagccggtgttgcagcctctaccgagcccaggtgttggtggcaagagggacgtggtctttctcatcgatgggtcccaaagtgccgggcctgagttccagtacgttcgcaccctcatagagaggctggttgactacctggacgtgggctttgacaccacccgggtggctgtcatccagttcagcgatgaccccaaggcggagttcctgctgaacgcccattccagcaaggatgaagtgcagaacgcggtgcagcggctgaggcccaagggagggcggcagatcaacgtgggcaatgccctggagtacgtgtccaggaacatcttcaagaggcccctggggagccgcattgaagagggcgtcccacagttcctggtcctcatctcgtctggaaagtctgacgatgaggtggtcgtcccggcggtggagctcaagcagtttggcgtggcccctttcacgatcgccaggaacgcagaccaggaggagctggtgaagatctcgctgagccccgaatatgtgttctcggtgagcaccttccgggagctgcccagcctggagcagaaactgctgacgcccatcacgaccctgacctcagagcagatccagaagctcttagccagcactcgctatccacctccagtgcgagagttcagagagcttcccaacatagaagaaagaatcatgaactcgtttggaccctccgcagccactcctgcacctccaggggtggacacccctcctccttcacggccagagaagaagaaagcagacattgtgttcctgttggatggttccatcaacttcaggagggacagtttccaggaagtgcttcgttttgtgtctgaaatagtggacacagtttatgaagatggcgactccatccaagtggggcttgtccagtacaactctgaccccactgacgaattcttcctgaaggacttctctaccaagaggcagattattgacgccatcaacaaagtggtctacaaagggggaagacacgccaacactaaggtgggccttgagcacctgcgggtaaaccactttgtgcctgaggcaggcagccgcctggaccagcgggtccctcagattgcctttgtgatcacgggaggaaagtcggtggaagatgcacaggatgtgagcctggccctcacccagaggggggtcaaagtgtttgctgttggagtgaggaatatcgactcggaggaggttggaaagatagcgtccaacagcgccacagcgttccgcgtgggcaacgtccaggagctgtccgaactgagcgagcaagttttggaaactttgcatgatgcgatgcatgaaaccctttgccctggtgtaactgatgctgccaaagcttgtaatctggatgtgattctggggtttgatggttctagagaccagaatgtttttgtggcccagaagggcttcgagtccaaggtggacgccatcttgaacagaatcagccagatgcacagggtcagctgcagcggtggccgctcgcccaccgtgcgtgtgtcagtggtggccaacacgccctcgggcccggtggaggcctttgactttgacgagtaccagccagagatgctcgagaagttccggaacatgcgcagccagcacccctacgtcctcacggaggacaccctgaaggtctacctgaacaagttcagacagtcctcgccggacagcgtgaaggtggtcattcattttactgatggagcagacggagatctggctgatttacacagagcatctgagaacctccgccaagaaggagtccgtgccttgatcctggtgggccttgaacgagtggtcaacttggagcggctaatgcatctggagtttgggcgagggtttatgtatgacaggcccctgaggcttaacttgctggacttggattatgaactagcggagcagcttgacaacattgccgagaaagcttgctgtggggttccctgcaagtgctctgggcagaggggagaccgcgggcccatcggcagcatcgggccaaagggtattcctggagaagacggctaccgaggctatcctggtgatgagggtggacccggtgagcgtggtccgcctggtgtgaacggcactcaaggtttccagggctgcccgggccagagaggagtaaagggctctcggggattcccaggagagaagggcgaagtaggagaaattggactggatggtctggatggtgaagatggagacaaaggattgcctggttcttctggagagaaagggaatcctggaagaaggggtgataaaggacctcgaggagagaaaggagaaagaggagatgttgggattcgaggggacccgggtaacccaggacaagacagccaggagagaggacccaaaggagaaaccggtgacctcggccccatgggtgtcccagggagagatggagtacctggaggacctggagaaactgggaagaatggtggctttggccgaaggggaccccccggagctaagggcaacaagggcggtcctggccagccgggctttgagggagagcaggggaccagaggtgcacagggcccagctggtcctgctggtcctccagggctgataggagaacaaggcatttctggacctaggggaagcggaggtgcccgtggcgctcctggagaacgaggcagaaccggtccactgggaagaaagggtgagcccggagagccaggaccaaaaggaggaatcgggaacccgggccctcgtggggagacgggagatgacgggagagacggagttggcagtgaaggacgcagaggcaaaaaaggagaaagaggatttcctggatacccaggaccaaagggtaacccaggtgaacctgggctaaatggaacaacaggacccaaaggcatcagaggccgaaggggaaattcgggacctccagggatagttggacagaaggggagacctggctacccaggaccagctggtccaaggggcaacaggggcgactccatcgatcaatgtgccctcatccaaagcatcaaagataaatgcccttgctgttacgggcccctggagtgccccgtcttcccaacagaactagcctttgctttagacacctctgagggagtcaaccaagacactttcggccggatgcgagatgtggtcttgagtattgtgaatgtcctgaccattgctgagagcaactgcccgacgggggcccgggtggctgtggtcacctacaacaacgaggtgaccacggagatccggtttgctgactccaagaggaagtcggtcctcctggacaagattaagaaccttcaggtggctctgacatccaaacagcagagtctggagactgccatgtcgtttgtggccaggaacacatttaagcgtgtgaggaacggattcctaatgaggaaagtggctgttttcttcagcaacacacccacaagagcatccccacagctcagagaggctgtgctcaaactctcagatgcggggatcacccccttgttccttacaaggcaggaagaccggcagctcatcaacgctttgcagatcaataacacagcagtggggcatgcgcttgtcctgcctgcagggagagacctcacagacttcctggagaatgtcctcacgtgtcatgtttgcttggacatctgcaacatcgacccatcctgtggatttggcagttggaggccttccttcagggacaggagagcggcagggagtgatgtggacatcgacatggctttcatcttagacagcgctgagaccaccaccctgttccagttcaatgagatgaagaagtacatagcgtacctggtcagacaactggacatgagcccagatcccaaggcctcccagcacttcgccagagtggcagttgtgcagcacgcgccctctgagtccgtggacaatgccagcatgccacctgtgaaggtggaattctccctgactgactatggctccaaggagaagctggtggacttcctcagcaggggaatgacacagttgcagggaaccagggccttaggcagtgccattgaatacaccatagagaatgtctttgaaagtgccccaaacccacgggacctgaaaattgtggtcctgatgctgacgggcgaggtgccggagcagcagctggaggaggcccagagagtcatcctgcaggccaaatgcaagggctacttcttcgtggtcctgggcattggcaggaaggtgaacatcaaggaggtatacaccttcgccagtgagccaaacgacgtcttcttcaaattagtggacaagtccaccgagctcaacgaggagcctttgatgcgcttcgggaggctgttgccgtccttcgtcagcagtgaaaatgctttttacttgtccccagatatcaggaaacagtgtgattggttccaaggggaccaacccacaaagaaccttgtgaagtttggtcacaaacaagtaaatgttccgaataacgttacttcaagtcctacatccaacccagtgacgacaacgaagccggtgactacgacgaagccggtgaccaccacaacaaagcctgtaaccaccacaacaaagcctgtgactattataaatcagccatctgtgaagccagccgctgcaaagccggcccctgcgaaacctgtggctgccaagcctgtggccacaaagacggccactgttagacccccagtggcggtgaagccagcaacagcagcgaagcctgtagcagcaaagccagcagctgtaagaccccccgctgctgctgcaaaaccagtggcgaccaagcctgaggtccctaggccacaggcagccaaaccagctgccaccaagccagccaccactaagcccgtggttaagatgctccgtgaagtccaggtgtttgagataacagagaacagcgccaaactccactgggagaggcctgagccccccggtccttatttttatgacctcaccgtcacctcagcccatgatcagtccctggttctgaagcagaacctcacggtcacggaccgcgtcattggaggcctgctcgctgggcagacataccatgtggctgtggtctgctacctgaggtctcaggtcagagccacctaccacggaagtttcagtacaaagaaatctcagcccccacctccacagccagcaaggtcagcttctagttcaaccatcaatctaatggtgagcacagaaccattggctctcactgaaacagatatatgcaagttgccgaaagacgaaggaacttgcagggatttcatattaaaatggtactatgatccaaacaccaaaagctgtgcaagattctggtatggaggttgtggtggaaacgaaaacaaatttggatcacagaaagaatgtgaaaaggtttgcgctcctgtgctcgccaaacccggagtcatcagtgtgatgggaacctaagcgtgggtggccaacatcatatacctcttgaagaagaaggagtcagccatcgccaacttgtctctgtagaagctccgggtgtagattcccttgcactgtatcatttcatgctttgatttacactcgaactcgggagggaacatcctgctgcatgacctatcagtatggtgctaatgtgtctgtggaccctcgctctctgtctccagcagttctctcgaatactttgaatgttgtgtaacagttagccactgctggtgtttatgtgaacattcctatcaatccaaattccctctggagtttcatgttatgcctgttgcaggcaaatgtaaagtctagaaaataatgcaaatgtcacggctactctatatacttttgcttggttcattttttttcccttttagttaagcatgactttagatgggaagcctgtgtatcgtggagaaacaagagaccaactttttcattccctgcccccaatttcccagactagatttcaagctaattttctttttctgaagcctctaacaaatgatctagttcagaaggaagcaaaatcccttaatctatgtgcaccgttgggaccaatgccttaattaaagaatttaaaaaagttgtaatagagaatatttttggcattcctctcaatgttgtgtgttttttttttttgtgtgctggagggaggggatttaattttaattttaaaatgtttaggaaatttatacaaagaaactttttaataaagtatattgaaagtttaaaaaaaaaaaaaaaa

SEQ ID NO: 213 - protein, 2000 aa, Homo sapien
MRKHRHLPLVAVFCLFLSGFPTTHAQQQQADVKNGAAADIIFLVDSSWTIGEEHFQLVREFLYDVVKSLAVGENDFHFALVQFNGNPHTEFLLNTYRTKQEVLSHISNMSYIGGTNQTGKGLEYIMQSHLTKAAGSRAGDGVPQVIVVLTDGHSKDGLALPSAELKSADVNVFAIGVEDADEGALKEIASEPLNMHMFNLENFTSLHDIVGNLVSCVHSSVSPERAGDTETLKDITAQDSADIIFLIDGSNNTGSVNFAVILDFLVNLLEKLPIGTQQIRVGVVQFSDEPRTMFSLDTYSTKAQVLGAVKALGFAGGELANIGLALDFVVENHFTRAGGSRVEEGVPQVLVLISAGPSSDEIRYGVVALKQASVFSFGLGAQAASRAELQHIATDDNLVFTVPEFRSFGDLQEKLLPYIVGVAQRHIVLKPPTIVTQVIEVNKRDIVFLVDGSSALGLANFNAIRDFIAKVIQRLEIGQDLIQVAVAQYADTVRPEFYFNTHPTKREVITAVRKMKPLDGSALYTGSALDFVRNNLFTSSAGYRAAEGIPKLLVLITGGKSLDEISQPAQELKRSSIMAFAIGNKGADQAELEEIAFDSSLVFIPAEFRAAPLQGMLPGLLAPLRTLSGTPEVHSNKRDIIFLLDGSANVGKTNFPYVRDFVMNLVNSLDIGNDNIRVGLVQFSDTPVTEFSLNTYQTKSDILGHLRQLQLQGGSGLNTGSALSYVYANHFTEAGGSRIREHVPQLLLLLTAGQSEDSYLQAANALTRAGILTFCVGASQANKAELEQIAFNPSLVYLMDDFSSLPALPQQLIQPLTTYVSGGVEEVPLAQPESKRDILFLFDGSANLVGQFPVVRDFLYKIIDELNVKPEGTRIAVAQYSDDVKVESRFDEHQSKPEILNLVKRMKIKTGKALNLGYALDYAQRYIFVKSAGSRIEDGVLQFLVLLVAGRSSDRVDGPASNLKQSGVVPFIFQAKNADPAELEQIVLSPAFILAAESLPKIGDLHPQIVNLLKSVHNGAPAPVSGEKDVVFLLDGSEGVRSGFPLLKEFVQRVVESLDVGQDRVRVAVVQYSDRTRPEFYLNSYMNKQDVVNAVRQLTLLGGPTPNTGAALEFVLRNILVSSAGSRITEGVPQLLIVLTADRSGDDVRNPSVVVKRGGAVPIGIGIGNADITEMQTISFIPDFAVAIPTFRQLGTVQQVISERVTQLTREELSRLQPVLQPLPSPGVGGKRDVVFLIDGSQSAGPEFQYVRTLIERLVDYLDVGFDTTRVAVIQFSDDPKAEFLLNAHSSKDEVQNAVQRLRPKGGRQINVGNALEYVSRNIFKRPLGSRIEEGVPQFLVLISSGKSDDEVVVPAVELKQFGVAPFTIARNADQEELVKISLSPEYVFSVSTFRELPSLEQKLLTPITTLTSEQIQKLLASTRYPPPVREFRELPNIEERIMNSFGPSAATPAPPGVDTPPPSRPEKKKADIVFLLDGSINFRRDSFQEVLRFVSEIVDTVYEDGDSIQVGLVQYNSDPTDEFFLKDFSTKRQIIDAINKVVYKGGRHANTKVGLEHLRVNHFVPEAGSRLDQRVPQIAFVITGGKSVEDAQDVSLALTQRGVKVFAVGVRNIDSEEVGKIASNSATAFRVGNVQELSELSEQVLETLHDAMHETLCPGVTDAAKACNLDVILGFDGSRDQNVFVAQKGFESKVDAILNRISQMHRVSCSGGRSPTVRVSVVANTPSGPVEAFDFDEYQPEMLEKFRNMRSQHPYVLTEDTLKVYLNKFRQSSPDSVKVVIHFTDGADGDLADLHRASENLRQEGVRALILVGLERVVNLERLMHLEFGRGFMYDRPLRLNLLDLDYELAEQLDNIAEKACCGVPCKCSGQRGDRGPIGSIGPKGIPGEDGYRGYPGDEGGPGERGPPGVNGTQGFQGCPGQRGVKGSRGFPGEKGEVGEIGLDGLDGEDGDKGLPGSSGEKGNPGRRGDKGPRGEKGERGDVGIRGDPGNPGQDSQER

SEQ ID NO: 214 - DNA, 1488 bp, Homo sapien
gttggtgagcatcatggcaaccgttacagccacaaccaaagtcccggagatccgtgatgtaacaaggattgagcgaatcggtgcccactcccacatccggggactggggctggacgatgccttggagcctcggcaggcttcgcaaggcatggtgggtcagctggcggcacggcgggcggctggcgtggtgctggagatgatccgggaagggaagattgccggtcgggcagtccttattgctggccagccgggcacggggaagacggccatcgccatgggcatggcgcaggccctgggccctgacacgccattcacagccatcgccggcagtgaaatcttctccctggagatgagcaagaccgaggcgctgacgcaggccttccggcggtccatcggcgttcgcatcaaggaggagacggagatcatcgaaggggaggtggtggagatccagattgatcgaccagcaacagggacgggctccaaggtgggcaaactgaccctcaagaccacagagatggagaccatctacgacctgggcaccaagatgattgagtccctgaccaaggacaaggtccaggccggggacgtgatcaccatcgacaaggcgacgggcaagatctccaagctgggccgctccttcacacgcgcccgcgactacgacgctatgggctcccagaccaagttcgtgcagtgcccagatggggagctccagaaacgcaaggaggtggtgcacaccgtgtccctgcacgagatcgacgtcatcaactctcgcacccagggcttcctggcgctcttctcaggtgacacaggggagatcaagtcagaagtccgtgagcagatcaatgccaaggtggctgagtggcgcgaggagggcaaggcggagatcatccctggagtgctgttcatcgacgaggtccacatgctggacatcgagagcttctccttcctcaaccgggccctggagagtgacatggcgcctgtcctgatcatggccaccaaccgtggcatcacgcgaatccggggcaccagctaccagagccctcacggcatccccatagacctgctggaccggctgcttatcgtctccaccaccccctacagcgagaaagacacgaagcagatcctccgcatccggtgcgaggaagaagatgtggagatgagtgaggacgcctacacggtgctgacccgcatcgggctggagacgtcactgcgctacgccatccagctcatcacagctgccagcttggtgtgccggaaacgcaagggtacagaagtgcaggtggatgacatcaagcgggtctactcactcttcctggacgagtcccgctccacgcagtacatgaaggagtaccaggacgccttcctcttcaacgaactcaaaggcgagaccatggacacctcctgagttggatgtcatcccccgaccccaccctgttttccaccagagttctgacactgtgactctgtataaaatggttgggaagctgc

SEQ ID NO: 215 - protein, 463 aa, Homo sapien
MATVTATTKVPEIRDVTRIERIGAHSHIRGLGLDDALEPRQASQGMVGQLAARRAAGVVLEMIREGKIAGRAVLIAGQPGTGKTAIAMGMAQALGPDTPFTAIAGSEIFSLEMSKTEALTQAFRRSIGVRIKEETEIIEGEVVEIQIDRPATGTGSKVGKLTLKTTEMETIYDLGTKMIESLTKDKVQAGDVITIDKATGKISKLGRSFTRARDYDAMGSQTKFVQCPDGELQKRKEVVHTVSLHEIDVINSRTQGFLALFSGDTGEIKSEVREQINAKVAEWREEGKAEIIPGVLFIDEVHMLDIESFSFLNRALESDMAPVLIMATNRGITRIRGTSYQSPHGIPIDLLDRLLIVSTTPYSEKDTKQILRIRCEEEDVEMSEDAYTVLTRIGLETSLRYAIQLITAASLVCRKRKGTEVQVDDIKRVYSLFLDESRSTQYMKEYQDAFLFNELKGETMDTS

SEQ ID NO: 216 - DNA, 2465 bp, Homo sapien
gagcagcgcggcctgacgggaccaaggcggcgggagtctgcggtcgttccctcggctgtggaccgggcggcacgcacgcggtgcagggtaacatggcggatgcggaagtaattattttgccaaagaaacataagaagaaaaaggagcggaagtcattgccagaagaagatgtagccgaaatacaacacgctgaagaatttcttatcaaacctgaatccaaagttgctaagttggacacgtctcagtggccccttttgctaaagaattttgataagctgaatgtaaggacaacacactatacacctcttgcatgtggttcaaatcctctgaagagagagattggggactatatcaggacaggtttcattaatcttgacaagccctctaacccctcttcccatgaggtggtagcctggattcgacggatacttcgggtggagaagacagggcacagtggtactctggatcccaaggtgactggttgtttaatcgtgtgcatagaacgagccactcgcttggtgaagtcacaacagagtgcaggcaaagagtatgtggggattgtccggctgcacaatgctattgaaggggggacccagctttctagggccctagaaactctgacaggtgccttattccagcgacccccacttattgctgcagtaaagaggcagctccgagtgaggaccatctacgagagcaaaatgattgaatacgatcctgaaagaagattaggaatcttttgggtgagttgtgaggctggcacctacattcggacattatgtgtgcaccttggtttgttattgggagttggtggtcagatgcaggagcttcggagggttcgttctggagtcatgagtgaaaaggaccacatggtgacaatgcatgatgtgcttgatgctcagtggctgtatgataaccacaaggatgagagttacctgcggcgagttgtttaccctttggaaaagctgttgacatctcataaacggctggttatgaaagacagtgcagtaaatgccatctgctatggggccaagattatgcttccaggtgttcttcgatatgaggacggcattgaggtcaatcaggagattgtggttatcaccaccaaaggagaagcaatctgcatggctattgcattaatgaccacagcggtcatctctacctgcgaccatggtatagtagccaagatcaagagagtgatcatggagagagacacttaccctcggaagtggggtttaggtccaaaggcaagtcagaagaagctgatgatcaagcagggccttctggacaagcatgggaagcccacagacagcacacctgccacctggaagcaggagtatgttgactacagtgagtctgccaaaaaagaggtggttgctgaagtggtaaaagccccgcaggtagttgccgaagcagcaaaaactgcgaagcggaagcgagagagtgagagtgaaagtgacgagactcctccagcagctcctcagttgatcaagaaggaaaagaagaagagtaagaaggacaagaaggccaaagctggtctggagagcggggccgagcctggagatggggacagtgataccaccaagaagaagaagaagaagaagaaagcaaaagaggtagaattggtttctgagtagtgaaggccacttgaagctggaggagaaactaaagccttattgagaaaacatgttatagatccttttgttgctgagagagtggaacataggtcctagacagggtgaagagttctggcacattttagctgctactttgagacctcggtgatgttacctggtgtggtcatcccatcttgtcctgttttaaggatatgggtggtgaaagatgaaagaggcagagtttatcccaatgacttctctgtttgagttgggaagcctcaccttcagacccagtaactgtccgcagctgtctgctagtggttgtcttaacatcgtagtcctagtttgcattttttaaatcccctctgtttaaaaggtttgtaaaacaaaaacaaaaaactaagtctgctcagtgaaatgctgtagaaccctaaataagtggtagaagagtgtcactgaattttgtctctgaattcagtataactgagttttgtccatgctggtgtctgggttataggcctgatgggcctggtagttttccatcttgttctggcctagaggtcagtcctttgcacttcctcaaagcttgtgtacagtgctcacctaaatccatctgactacttgttcctgtgccctcttgttttaggcctcgtttacttttaaaaaatgaaattgttcattgctgggagaagaatgttgtaatttttacttattaaagtcaacttgttaagttttttatgtattcctgttgggttttcttgttgatctcatgctagcagagcaaaaattgtaaaatattttgattaaaaatctagggacctttatgtcctatttggaattcgatatcaa

SEQ ID NO: 217 - protein, 514 aa, Homo sapien
MADAEVIILPKKHKKKKERKSLPEEDVAEIQHAEEFLIKPESKVAKLDTSQWPLLLKNFDKLNVRTTHYTPLACGSNPLKREIGDYIRTGFINLDKPSNPSSHEVVAWIRRILRVEKTGHSGTLDPKVTGCLIVCIERATRLVKSQQSAGKEYVGIVRLHNAIEGGTQLSRALETLTGALFQRPPLIAAVKRQLRVRTIYESKMIEYDPERRLGIFWVSCEAGTYIRTLCVHLGLLLGVGGQMQELRRVRSGVMSEKDHMVTMHDVLDAQWLYDNHKDESYLRRVVYPLEKLLTSHKRLVMKDSAVNAICYGAKIMLPGVLRYEDGIEVNQEIVVITTKGEAICMAIALMTTAVISTCDHGIVAKIKRVIMERDTYPRKWGLGPKASQKKLMIKQGLLDKHGKPTDSTPATWKQEYVDYSESAKKEVVAEVVKAPQVVAEAAKTAKRKRESESESDETPPAAPQLIKKEKKKSKKDKKAKAGLESGAEPGDGDSDTTKKKKKKKKAKEVELVSE

SEQ ID NO: 218 - DNA, 1591 bp, Homo sapien
tctgggcgcgcgcgacgtcagtttgagttctgtgttctccccgcccgtgtcccgcccgacccgcgcccgcgatgctggcgctgcgctgcggctcccgctggctcggcctgctctccgtcccgcgctccgtgccgctgcgcctccccgcggcccgcgcctgcagcaagggctccggcgacccgtcctcttcctcctcctccgggaacccgctcgtgtacctggacgtggacgccaacgggaagccgctcggccgcgtggtgctggagctgaaggcagatgtcgtcccaaagacagctgagaacttcagagccctgtgcactggtgagaagggcttcggctacaaaggctccaccttccacagggtgatcccttccttcatgtgccaggcgggcgacttcaccaaccacaatggcacaggcgggaagtccatctacggaagccgctttcctgacgagaactttacactgaagcacgtggggccaggtgtcctgtccatggctaatgctggtcctaacaccaacggctcccagttcttcatctgcaccataaagacagactggttggatggcaagcatgttgtgttcggtcacgtcaaagagggcatggacgtcgtgaagaaaatagaatctttcggctctaagagtgggaggacatccaagaagattgtcatcacagactgtggccagttgagctaatctgtggccagggtgctggcatggtggcagctgcaaatgtccatgcacccaggtggccgcgttgggctgtcagccaaggtgcctgaaacgatacgtgtgcccactccactgtcacagtgtgcctgaggaaggctgctagggatgttagacctcggccaggacccaccacattgcttcctaatacccacccttcctcacgacctcatttctgggcatctttgtggacatgatgtcacccaccccttgtcaagcattgcctgtgattgcccagcccagattcatctgtgccttggacatggtgatggtgatgggttgccatccaagtgaaagtcttttccttgaccaagggggacagtcagttttgcaaaaggactctaatacctgtttaatattgtcttcctaattgggataatttaattaacaagattgactagaagtgaaactgcaacactaacttccccgtgctgtggtgtgacctgagttggtgacacaggccacagaccccagagcttggcttttgaaacacaactcagggcttttgtgaaggttcccccgctgagatctttcctcctggttactgtgaagcctgttggtttgctgctgtcgtttttgaggagggcccatgggggtaggagcagttgaacctgggaacaaacctcacttgagctgtgcctagacaatgtgaattcctgtgttgctaacagaagtggcctgtaagctcctgtgctccggagggaagcatttcctggtaggctttgatttttctgtgtgttaaagaaattcaatctactcatgatgtgttatgcataaaacatttctggaacatggatttgtgttcaccttaaatgtgaaaataaatcctattttctatggaaaaaaaaaaaaaaaaaaaaaaa

SEQ ID NO: 219 - protein, 207 aa, Homo sapien
MLALRCGSRWLGLLSVPRSVPLRLPAARACSKGSGDPSSSSSSGNPLVYLDVDANGKPLGRVVLELKADVVPKTAENFRALCTGEKGFGYKGSTFHRVIPSFMCQAGDFTNHNGTGGKSIYGSRFPDENFTLKHVGPGVLSMANAGPNTNGSQFFICTIKTDWLDGKHVVFGHVKEGMDVVKKIESFGSKSGRTSKKIVITDCGQLS

SEQ ID NO: 220 - DNA, 1591 bp, Homo sapien; identical to SEQ ID NO: 218

SEQ ID NO: 221 - protein, 207 aa, Homo sapien; identical to SEQ ID NO: 219

SEQ ID NO: 222 - DNA, 1550 bp, Homo sapien
tgccgccgtcccgcccgccagcgccccagcgaggaagcagcgcgcagcccgcggcccagcgcacccgcagcagcgcccgcagctcgtccgcgccatgttccaggcggccgagcgcccccaggagtgggccatggagggcccccgcgacgggctgaagaaggagcggctactggacgaccgccacgacagcggcctggactccatgaaagacgaggagtacgagcagatggtcaaggagctgcaggagatccgcctcgagccgcaggaggtgccgcgcggctcggagccctggaagcagcagctcaccgaggacggggactcgttcctgcacttggccatcatccatgaagaaaaggcactgaccatggaagtgatccgccaggtgaagggagacctggctttcctcaacttccagaacaacctgcagcagactccactccacttggctgtgatcaccaaccagccagaaattgctgaggcacttctgggagctggctgtgatcctgagctccgagactttcgaggaaatacccccctacaccttgcctgtgagcagggctgcctggccagcgtgggagtcctgactcagtcctgcaccaccccgcacctccactccatcctgaaggctaccaactacaatggccacacgtgtctacacttagcctctatccatggctacctgggcatcgtggagcttttggtgtccttgggtgctgatgtcaatgctcaggagccctgtaatggccggactgcccttcacctcgcagtggacctgcaaaatcctgacctggtgtcactcctgttgaagtgtggggctgatgtcaacagagttacctaccagggctattctccctaccagctcacctggggccgcccaagcacccggatacagcagcagctgggccagctgacactagaaaaccttcagatgctgccagagagtgaggatgaggagagctatgacacagagtcagagttcacggagttcacagaggacgagctgccctatgatgactgtgtgtttggaggccagcgtctgacgttatgagtgcaaaggggctgaaagaacatggacttgtatatttgtacaaaaaaaaagttttatttttctaaaaaaagaaaaaagaagaaaaaatttaaagggtgtacttatatccacactgcacactgcctagcccaaaacgtcttattgtggtaggatcagccctcattttgttgcttttgtgaactttttgtaggggacgagaaagatcattgaaattctgagaaaacttcttttaaacctcacctttgtggggtttttggagaaggttatcaaaaatttcatggaaggaccacattttatatttattgtgcttcgagtgactgaccccagtggtatcctgtgacatgtaacagccaggagtgttaagcgttcagtgatgtggggtgaaaagttactacctgtcaaggtttgtgttaccctcctgtaaatggtgtacataatgtattgttggtaattattttggtacttttatgatgtatatttattaaagagatttttacaaatg

SEQ ID NO: 223 - protein, 317 aa, Homo sapien
MFQAAERPQEWAMEGPRDGLKKERLLDDRHDSGLDSMKDEEYEQMVKELQEIRLEPQEVPRGSEPWKQQLTEDGDSFLHLAIIHEEKALTMEVIRQVKGDLAFLNFQNNLQQTPLHLAVITNQPEIAEALLGAGCDPELRDFRGNTPLHLACEQGCLASVGVLTQSCTTPHLHSILKATNYNGHTCLHLASIHGYLGIVELLVSLGADVNAQEPCNGRTALHLAVDLQNPDLVSLLLKCGADVNRVTYQGYSPYQLTWGRPSTRIQQQLGQLTLENLQMLPESEDEESYDTESEFTEFTEDELPYDDCVFGGQRLTL

SEQ ID NO: 224 - DNA, 1238 bp, Homo sapien
cggcggagctggtcccgttgtgctgcggcgccgcgcggcctgcagtcccgggcccgcgccccgcgccgcccgcccgcccgccatggagcccggccccgacggccccgccgcctccggccccgccgccatccgcgagggctggttccgcgagacctgcagcctgtggcccggccaggccctgtcgctgcaggtggagcagctgctccaccaccggcgctcgcgctaccaggacatcctcgtcttccgcagtaagacctatggcaacgtgctggtgttggacggtgtcatccagtgcacggagagagacgagttctcctaccaggagatgatcgccaacctgcctctctgcagccaccccaacccgcgaaaggtgctgatcatcgggggcggagatggaggtgtcctgcgggaggtggtgaagcacccctccgtggagtccgtggtccagtgtgagatcgacgaggatgtcatccaagtctccaagaagttcctgccaggcatggccattggctactctagctcgaaggtgaccctacatgtgggtgacggttttgagttcatgaaacagaatcaggatgccttcgacgtgatcatcactgactcctcagaccccatgggccccgccgaaagtctcttcaaggagtcctattaccagctcatgaagacagccctcaaggaagatggtgtcctctgctgccagggcgagtgcgagtggctgcacctggacctcatcaaggagatgcggcagttctgccagtccctgttccccgtggtggcctatgcctactgcaccatccccacctaccccagcggccagatcggcttcatgctgtgcagcaagaacccgagcacgaacttccaggagccggtgcagccgctgacacagcagcaggtggcgcagatgcagctgaagtactacaactccgacgtgcaccgcgccgcctttgtgctgcccgagtttgcccgcaaggccctgaatgatgtgagctgagcccaggcgccaccactgatgccacccaggacctcggaccttggagcctgcggggtgcctcggcccctccagccccgggccggacctcctgctggctctcgcccaccaaccaagtgttacaagccccagaatgctgcccggcctgccctgctgggcggactgtctgtgtgtctgtctctctggcgttccacctccaagcctataccagctgtgtacagcgccatctctctgccttctgttgcccccg

SEQ ID NO: 225 - protein, 302 aa, Homo sapien
MEPGPDGPAASGPAAIREGWFRETCSLWPGQALSLQVEQLLHHRRSRYQDILVFRSKTYGNVLVLDGVIQCTERDEFSYQEMIANLPLCSHPNPRKVLIIGGGDGGVLREVVKHPSVESVVQCEIDEDVIQVSKKFLPGMAIGYSSSKVTLHVGDGFEFMKQNQDAFDVIITDSSDPMGPAESLFKESYYQLMKTALKEDGVLCCQGECEWLHLDLIKEMRQFCQSLFPVVAYAYCTIPTYPSGQIGFMLCSKNPSTNFQEPVQPLTQQQVAQMQLKYYNSDVHRAAFVLPEFARKALNDVS

SEQ ID NO: 226 - DNA, 1203 bp, Homo sapien
actcgtgcgtgaggcgagaggagccggagacgagaccagaggccgaactcgggttctgacaagatggccgggctgccccgcaggatcatcaaggaaacccagcgtttgctggcagaaccagttcctggcatcaaagccgaaccagatgagagcaacgcccgttattttcatgtggtcattgctggccctcaggattccccctttgagggagggacttttaaacttgaactattccttccagaagaatacccaatggcagcccctaaagtacgtttcatgaccaaaatttatcatcctaatgtagacaagttgggaagaatatgtttagatattttgaaagataagtggtccccagcactgcagatccgcacagttctgctatcgatccaggccttgttaagtgctcccaatccagatgatccattagcaaatgatgtagcggagcagtggaagaccaacgaagcccaagccatagaaacagctagagcatggactaggctatatgccatgaataatatttaaattgatacgatcatcaagtgtgcatcacttctcctgttctgccaagacttcctcctctttgtttgcatttaatggacacagtcttagaaacattacagaataaaaaagcccagacatcttcagtcctttggtgattaaatgcacattagcaaatctatgtcttgtcctgattcactgtcataaagcatgagcagaggctagaagtatcatctggattgttgtgaaacgtttaaaagcagtggcccctccctgcttttattcatttcccccatcctggtttaagtataaagcactgtgaatgaaggtagttgtcaggttagctgcaggggtgtgggtgtttttattttattttattttattttatttttgaggggggaggtagtttaattttatgggctcctttcccccttttttggtgatctaattgcattggttaaaagcagctaaccaggtctttagaatatgctctagccaagtctaactttatttagacgctgtagatggacaagcttgattgttggaaccaaaatgggaacattaaacaaacatcacagccctcactaataacattgctgtcaagtgtagattccccccttcaaaaaaagcttgtgaccattttgtatggcttgtctggaaacttctgtaaatcttatgttttagtaaaatattttttgttattct

SEQ ID NO: 227 - protein, 152 aa, Homo sapien
MAGLPRRIIKETQRLLAEPVPGIKAEPDESNARYFHVVIAGPQDSPFEGGTFKLELFLPEEYPMAAPKVRFMTKIYHPNVDKLGRICLDILKDKWSPALQIRTVLLSIQALLSAPNPDDPLANDVAEQWKTNEAQAIETARAWTRLYAMNNI

SEQ ID NO: 228 - DNA, 1383 bp, Homo sapien
ctagtttctaaggatcatgtctgcgagccaggattcccgatccagagacaatggccccgatgggatggagcccgaaggcgtcatcgagagtaactggaatgagattgttgacagctttgatgacatgaacctctcggagtcccttctccgtggcatctacgcctatggttttgagaagccctctgccatccagcagcgagccattctaccttgtatcaagggttatgatgtgattgctcaagcccaatctgggactgggaaaacggccacatttgccatatcgattctgcagcagattgaattagatctaaaagccacccaggccttggtcctagcacccactcgagaattggctcagcagatacagaaggtggtcatggcactaggagactacatgggcgcctcctgtcacgcctgtatcgggggcaccaacgtgcgtgctgaggtgcagaaactgcagatggaagctccccacatcatcgtgggtacccctggccgtgtgtttgatatgcttaaccggagatacctgtcccccaaatacatcaagatgtttgtactggatgaagctgacgaaatgttaagccgtggattcaaggaccagatctatgacatattccaaaagctcaacagcaacacccaggtagttttgctgtcagccacaatgccttctgatgtgcttgaggtgaccaagaagttcatgagggaccccattcggattcttgtcaagaaggaagagttgaccctggagggtatccgccagttctacatcaacgtggaacgagaggagtggaagctggacacactatgtgacttgtatgaaaccctgaccatcacccaggcagtcatcttcatcaacacccggaggaaggtggactggctcaccgagaagatgcatgctcgagatttcactgtatccgccatgcatggagatatggaccaaaaggaacgagacgtgattatgagggagtttcgttctggctctagcagagttttgattaccactgacctgctggccagaggcattgatgtgcagcaggtttctttagtcatcaactatgaccttcccaccaacagggaaaactatatccacagaatcggtcgaggtggacggtttggccgtaaaggtgtggctattaacatggtgacagaagaagacaagaggactcttcgagacattgagaccttctacaacacctccattgaggaaatgcccctcaatgttgctgacctcatctgaggggctgtcctgccacccagccccagccagggctcaatctctgggggctgaggagcagcaggaggggggagggaagggagccaagggatggacatcttgtcattttttttctttgaataaatgtcactttttgaggcaaaagaagg

SEQ ID NO: 229 - protein, 406 aa, Homo sapien
MSASQDSRSRDNGPDGMEPEGVIESNWNEIVDSFDDMNLSESLLRGIYAYGFEKPSAIQQRAILPCIKGYDVIAQAQSGTGKTATFAISILQQIELDLKATQALVLAPTRELAQQIQKVVMALGDYMGASCHACIGGTNVRAEVQKLQMEAPHIIVGTPGRVFDMLNRRYLSPKYIKMFVLDEADEMLSRGFKDQIYDIFQKLNSNTQVVLLSATMPSDVLEVTKKFMRDPIRILVKKEELTLEGIRQFYINVEREEWKLDTLCDLYETLTITQAVIFINTRRKVDWLTEKMHARDFTVSAMHGDMDQKERDVIMREFRSGSSRVLITTDLLARGIDVQQVSLVINYDLPTNRENYIHRIGRGGRFGRKGVAINMVTEEDKRTLRDIETFYNTSIEEMPLNVADLI

SEQ ID NO: 230 - DNA, 838 bp, Homo sapien
gcacgatgagctcaatcggcactgggtatgacctgtcagcctctacattctctcctgacggaagagtttttcaagttgaatatgctatgaaggctgtggaaaatagtagtacagctattggaatcagatgcaaagatggtgttgtctttggggtagaaaaattagtcctttctaaactttatgaagaaggttccaacaaaagactttttaatgttgatcggcatgttggaatggcagtagcaggtttgttggcagatgctcgttctttagcagacatagcaagagaagaagcttccaacttcagatctaactttggctacaacattccactaaaacatcttgcagacagagtggccatgtatgtgcatgcatatacactctacagtgctgttagaccttttggctgcagtttcatgttagggtcttacagtgtgaatgacggtgcgcaactctacatgattgacccatcaggtgtttcatacggttattggggctgtgccatcggcaaagccaggcaagctgcaaagacggaaatagagaagcttcagatgaaagaaatgacctgccgtgatatcgttaaagaagttgcaaaaataatttacatagtacatgacgaagttaaggataaagcttttgaactagaactcagctgggttggtgaattaactaatggaagacatgaaattgttccaaaagatataagagaagaagcagagaaatatgctaaggaatctctgaaggaagaagatgaatcagatgatgataatatgtaacatttactccagcatctattgtattttaaatttctactccagtccaatgtaactatttagccctg

SEQ ID NO: 231 - protein, 255 aa, Homo sapien
MSSIGTGYDLSASTFSPDGRVFQVEYAMKAVENSSTAIGIRCKDGVVFGVEKLVLSKLYEEGSNKRLFNVDRHVGMAVAGLLADARSLADIAREEASNFRSNFGYNIPLKHLADRVAMYVHAYTLYSAVRPFGCSFMLGSYSVNDGAQLYMIDPSGVSYGYWGCAIGKARQAAKTEIEKLQMKEMTCRDIVKEVAKIIYIVHDEVKDKAFELELSWVGELTNGRHEIVPKDIREEAEKYAKESLKEEDESDDDNM

SEQ ID NO: 232 - DNA, 640 bp, Homo sapien
attctgagccgagcccggtgccaagcgcagctagctcagcaggcggcagcggcggcctgagcttcagggcagccagctcctcccggtctcgccttcctcgcggtcagcatgaaagccttcagtcccgtgaggtccgttaggaaaaacagcctgtcggaccacagcctgggcatctcccggagcaaaacccctgtggacgacccgatgagcctgctatacaacatgaacgactgctactccaagctcaaggagctggtgcccagcatcccccagaacaagaaggtgagcaagatggaaatcctgcagcacctcatcgactacatcttggacctgcagatcgccctggactcgcatcccactattgtcagcctgcatcaccagagacccgggcagaaccagcgctccaggacgccgctgaccaccctcaacacggatatcagcatcctgtccttgcaggcttctgaattcccttctgagttaatgtcaaatgacagcaaagcactgtgtggctgaataagcggtgttcatgatttcttttattctttgcacaacaacaacaacaacaaattcacggaatcttttaagtgctgaacttatttttcaaccatttcacaaggaggacaagttgaatggacctttt

SEQ ID NO: 233 - protein, 134 aa, Homo sapien
MKAFSPVRSVRKNSLSDHSLGISRSKTPVDDPMSLLYNMNDCYSKLKELVPSIPQNKKVSKMEILQHLIDYILDLQIALDSHPTIVSLHHQRPGQNQRSRTPLTTLNTDISILSLQASEFPSELMSNDSKALCG

SEQ ID NO: 234 - DNA, 3653 bp, Homo sapien
attgcaacacatgcagctgcctggagagagggagccggtgtcctacgtcagagccgccgccgccgcgagccgccgccggggaggagcagccgctgccgcccaggactgggcccttagggaggaggaggcgagaagatggcggacgaccccagtgctgccgacaggaacgtggagatctggaagatcaagaagctcattaagagcttggaggcggcccgcggcaatggcaccagcatgatatcattgatcattcctcccaaagaccagatttcacgagtggcaaaaatgttagcggatgagtttggaactgcatctaacattaagtcacgagtaaaccgcctttcagtcctgggagccattacatctgtacaacaaagactcaaactttataacaaagtacctccaaatggtctggttgtatactgtggaacaattgtaacagaagaaggaaaggaaaagaaagtcaacattgactttgaacctttcaaaccaattaatacgtcattgtatttgtgtgacaacaaattccatacagaggctcttacagcactactttcagatgatagcaagtttggattcattgtaatagatggtagtggtgcactttttggcacactccaaggaaacacaagagaagtcctgcacaaattcactgtggatctcccaaagaaacacggtagaggaggtcagtcagccttgcgttttgcccgtttaagaatggaaaagcgacataactatgttcggaaagtagcagagactgctgtgcagctgtttatttctggggacaaagtgaatgtggctggtctagttttagctggatccgctgactttaaaactgaactaagtcaatctgatatgtttgatcagaggttacaatcaaaagttttaaaattagttgatatatcctatggtggtgaaaatggattcaaccaagctattgagttatctactgaagtcctctccaacgtgaaattcattcaagagaagaaattaataggacgatactttgatgaaatcagccaggacacgggcaagtactgttttggcgttgaagatacactaaaggctttggaaatgggagctgtagaaattctaatagtctatgaaaatctggatataatgagatatgttcttcattgccaaggcacagaagaggagaaaattctctatctaactccagagcaagaaaaggataaatctcatttcacagacaaagagaccggacaggaacatgagcttatcgagagcatgcccctgttggaatggtttgctaacaactataaaaaatttggagctacgttggaaattgtcacagataaatcacaagaagggtctcagtttgtgaaaggatttggtggaattggaggtatcttgcggtaccgagtagatttccagggaatggaataccaaggaggagacgatgaattttttgaccttgatgactactaggtagtcgacatgggtccggcaaaacgtgcctcaccctccagcatccaacccaaggagcatacccatggtggaatccaaacagatccctgccttacaattggaacatttccagaacttaatccatgagcattggatattgaaaagaaaaccgaaacaaaaccagacccagccctacactttggtttgtcatggtgtcagcgcagcagcctacaactaagttcctaaacgccactttggactaatttaaaaaagaatcccagtttttacttttactggatggtgaaattggttgctcttgtattttatgaaaaaaaatgatttttttaaccttcatacatagaagcaaaaatactttaactgctgtaaaccttcaaaagttaatagaagtgagatcatactggtttgtttcttattttgattggagaaaaattaaattgctgcatttcgcagtgacccatttacatggcattctcagcttagactgcgtaagaagaaatatatgtggtgaaatgttggaaccatttctctcttggtctctgtttaatgttgaaagggtgagctaataggaggcactttcaacttcactccctcacgctaccccgtccccctccagactggcagtttcaaggatgcaaattgcattgcaaaatcaaactgactcatgaagcatttgggccagtgcactgtttacttccatctgtttgcagacacatttgtgcccggcgtttgggagccctttgtatcaatgttctgacaagggtccctataaccttaacctactcgaaaccggtttgggatggatatgatggggcttctgtgctattgctgggattgggagaaataaaacatgcaatttaagtggaagcgaagaaatttaaagaggattttattttgcttgggtcaatccttgttaaaagggaggtggatgtgtttccttgtgttggatggcatgagattatgtgaatgttttgatttattaaaatgaactgcaaggtttttcacaggaacgacagacatgtatgactgcatgtaattataaactcctgacctcctggtggggttggagcatctgtttcaaatgtgggacttacaagcacttctcacatgagaaattaggggcgggtgggaagggatgggacacagcttctggcaccatggatttaagaccatgttggatccaaaagttggcctgaaaccctgaagctgatgcttcacagctgggctgtaagtcagacttgaacccagctgatatgcaaggtcatggcgtgccagggtggtgacagttgaacaaagtgtatagtacgtgcccagtggtagcgatggaaaaaagtataccaaatggactttgaaggaccaaaggttttaaaagtcaattggtatcacctccacactgactagggtagtggggtgcatttggttttcaaattgggtacttttaacactttagtgcctgactgctgttctttactgacttgattcagtcactcgtagctttattggtctgaaccagctccttgttcccaggttacagacctgcctatcgttccaataatcctgtttcacttgaatgaagggagtatgtcttaaatgtaaagtttctggttctcacactgtactctgaggtccaaatactgtctgtcaatgtgtaacctgatgtctcaaccccctgtgagaagagtccattatttggtgttcaccaacgtgggagacttcaccggaacaggcttttttgctttgggctctgctatttgtttgcagaacacccaagagcgagcaaacacgctctcttcacagcagtaccttagggttttgccattgtaaatgggtctgatgtgatatgacaagaccagagaaattggatgtaaatttacatttttgaatatgcttgttgtttcacatgatacatttagggtatgcagctccttttgtagtttttatttttactatttaagtttggaaatgatgccaaatttttgtatttctttaatcaatgtgttctcttcggtgatatatattgcattatatattgatgtgtgtatcaatatatattgatatgtattacacttacacatacaaacacatataagagggggtgaaaaccgtagcctttgcattctctatagcctctgcagagagatactaagcagcaaaatcttggtgttgtgatgtacagaaatggagaagagtattaaaccatatttaag

SEQ ID NO: 235 - protein, 437 aa, Homo sapien
MADDPSAADRNVEIWKIKKLIKSLEAARGNGTSMISLIIPPKDQISRVAKMLADEFGTASNIKSRVNRLSVLGAITSVQQRLKLYNKVPPNGLVVYCGTIVTEEGKEKKVNIDFEPFKPINTSLYLCDNKFHTEALTALLSDDSKFGFIVIDGSGALFGTLQGNTREVLHKFTVDLPKKHGRGGQSALRFARLRMEKRHNYVRKVAETAVQLFISGDKVNVAGLVLAGSADFKTELSQSDMFDQRLQSKVLKLVDISYGGENGFNQAIELSTEVLSNVKFIQEKKLIGRYFDEISQDTGKYCFGVEDTLKALEMGAVEILIVYENLDIMRYVLHCQGTEEEKILYLTPEQEKDKSHFTDKETGQEHELIESMPLLEWFANNYKKFGATLEIVTDKSQEGSQFVKGFGGIGGILRYRVDFQGMEYQGGDDEFFDLDDY

SEQ ID NO: 236 - DNA, 732 bp, Homo sapien
tgctgcgaaccacgtgggtcccgggcgcgtttcgggtgctggcggctgcagccggagttcaaacctaagcagctggaaggaaccatggccaactgtgagcgtaccttcattgcgatcaaaccagatggggtccagcggggtcttgtgggagagattatcaagcgttttgagcagaaaggattccgccttgttggtctgaaattcatgcaagcttccgaagatcttctcaaggaacactacgttgacctgaaggaccgtccattctttgccggcctggtgaaatacatgcactcagggccggtagttgccatggtctgggaggggctgaatgtggtgaagacgggccgagtcatgctcggggagaccaaccctgcagactccaagcctgggaccatccgtggagacttctgcatacaagttggcaggaacattatacatggcagtgattctgtggagagtgcagagaaggagatcggcttgtggtttcaccctgaggaactggtagattacacgagctgtgctcagaactggatctatgaatgacaggagggcagaccacattgcttttcacatccatttcccctccttcccatgggcagaggaccaggctgtaggaaatctagttatttacaggaacttcatcataatttggagggaagctcttggagctgtgagttctccctgtacagtgttaccatccccgaccatctgattaaaatgcttcctcccagc

SEQ ID NO: 237 - protein, 152 aa, Homo sapien
MANCERTFIAIKPDGVQRGLVGEIIKRFEQKGFRLVGLKFMQASEDLLKEHYVDLKDRPFFAGLVKYMHSGPVVAMVWEGLNVVKTGRVMLGETNPADSKPGTIRGDFCIQVGRNIIHGSDSVESAEKEIGLWFHPEELVDYTSCAQNWIYE

SEQ ID NO: 238 - DNA, 3071 bp, Homo sapien
ccgccattttgtgagaagcaaggtggcctccacgtttcctgagcgtcttcttcgcttttgcctcgaccgccccttgaccacagacatgtctcgggatcggttccggagtcgtggcggtggcggtggtggcttccacaggcgtggaggaggcggcggccgcggcggcctccacgacttccgttctccgccgcccggcatgggcctcaatcagaatcgcggccccatgggtcctggcccgggccagagcggccctaagcctccgatcccgccaccgcctccacaccaacagcagcaacagccaccaccgcagcagccaccgccgcagcagccgccaccgcatcagccgccgccgcatccacagccgcatcagcagcagcagccgccgccaccgccgcaggactcttccaagcccgtcgttgctcagggacccggccccgctcccggagtaggcagcgcaccaccagcctccagctcggccccgcccgccactccaccaacctcgggggccccgccagggtccgggccaggcccgactccgaccccgccgcctgcagtcacctcggcccctcccggggcgccgccacccaccccgccaagcagcggggtccctaccacacctcctcaggccggaggcccgccgcctccgcccgcggcagtcccgggcccgggtccagggcctaagcagggcccaggtccgggtggtcccaaaggcggcaaaatgcctggcgggccgaagccaggtggcggcccgggcctaagtacgcctggcggccaccccaagccgccgcatcgaggcggcggggagccccgcgggggccgccagcaccacccgccctaccaccagcagcatcaccaggggcccccgcccggcgggcccggcggccgcagcgaggagaagatctcggactcggaggggtttaaagccaatttgtctctcttgaggaggcctggagagaaaacttacacacagcgatgtcggttgtttgttgggaatctacctgctgatatcacggaggatgaattcaaaagactatttgctaaatatggagaaccaggagaagtttttatcaacaaaggcaaaggattcggatttattaagcttgaatctagagctttggctgaaattgccaaagccgaactggatgatacacccatgagaggtagacagcttcgagttcgctttgccacacatgctgctgccctttctgttcgtaatctttcaccttatgtttccaatgaactgttggaagaagcctttagccaatttggtcctattgaaagggctgttgtaatagtggatgatcgtggaagatctacagggaaaggcattgttgaatttgcttctaagccagcagcaagaaaggcatttgaacgatgcagtgaaggtgttttcttactgacgacaactcctcgtccagtcattgtggaaccacttgaacaactagatgatgaagatggtcttcctgaaaaacttgcccagaagaatccaatgtatcaaaaggagagagaaacccctcctcgttttgcccagcatggcacgtttgagtacgaatattctcagcgatggaagtctttggatgaaatggaaaaacagcaaagggaacaagttgaaaaaaacatgaaagatgcaaaagacaaattggaaagtgaaatggaagatgcctatcatgaacatcaggcaaatcttttgcgccaagatctgatgagacgacaggaagaattaagacgcatggaagaacttcacaatcaagaaatgcagaaacgtaaagaaatgcaattgaggcaagaggaggaacgacgtagaagagaggaagagatgatgattcgtcaacgtgagatggaagaacaaatgaggcgccaaagagaggaaagttacagccgaatgggctacatggatccacgggaaagagacatgcgaatgggtggcggaggagcaatgaacatgggagatccctatggttcaggaggccagaaatttccacctctaggaggtggtggtggcataggttatgaagctaatcctggcgttccaccagcaaccatgagtggttccatgatgggaagtgacatgcgtactgagcgctttgggcagggaggtgcggggcctgtgggtggacagggtcctagaggaatggggcctggaactccagcaggatatggtagagggagagaagagtacgaaggcccaaacaaaaaaccccgattttagatgtgatatttaggctttcattccagtttgttttgtttttttgtttagataccaatcttttaaattcttgcattttagtaagaaagctatctttttatggatgttagcagtttattgacctaatatttgtaaatggtctgtttgggcaggtaaaattatgtaatgcagtgtttggaacaggagaatttttttttcctttttatttctttattttttcttttttactgtataatgtccctcaagtttatggcagtgtaccttgtgccactgaatttccaaagtgtaccaatttttttttttttactgtgcttcaaataaatagaaaaatagttataatattggatcttcaactttgccattcatgcttctatgcatattaggctacgtattccacattgaaagcatgagagtgtctaggcctttgaatggcatatgccatttctgggaaatgcatctggaggctaagtattgctttctacaaataattgccccctttgttttaaaaagaagaaatgcatattgaagtagtttgatgatttgtttggcatataggaagcacgctggtgctaagtattttttaaatggttatgtaagcaaagctgaactgtaaatcttcaggaatatgtattaagattgtggaatgggtgtaagacaattggtagggggtgaaagtgggtttgattaaatggatcttttatggccctatgatctatcctttacttgaaagcttttgaaaagtggaaaggtcattttgttgcatttccccatttcttgtttttaaaagaccaacaaatctcaagccctataaatggcttgtattgaacttttacatttgaattaaagatgttaaacatgaaaaaaa

SEQ ID NO: 239 - protein, 707 aa, Homo sapien
MSRDRFRSRGGGGGGFHRRGGGGGRGGLHDFRSPPPGMGLNQNRGPMGPGPGQSGPKPPIPPPPPHQQQQQPPPQQPPPQQPPPHQPPPHPQPHQQQQPPPPPQDSSKPVVAQGPGPAPGVGSAPPASSSAPPATPPTSGAPPGSGPGPTPTPPPAVTSAPPGAPPPTPPSSGVPTTPPQAGGPPPPPAAVPGPGPGPKQGPGPGGPKGGKMPGGPKPGGGPGLSTPGGHPKPPHRGGGEPRGGRQHHPPYHQQHHQGPPPGGPGGRSEEKISDSEGFKANLSLLRRPGEKTYTQRCRLFVGNLPADITEDEFKRLFAKYGEPGEVFINKGKGFGFIKLESRALAEIAKAELDDTPMRGRQLRVRFATHAAALSVRNLSPYVSNELLEEAFSQFGPIERAVVIVDDRGRSTGKGIVEFASKPAARKAFERCSEGVFLLTTTPRPVIVEPLEQLDDEDGLPEKLAQKNPMYQKERETPPRFAQHGTFEYEYSQRWKSLDEMEKQQREQVEKNMKDAKDKLESEMEDAYHEHQANLLRQDLMRRQEELRRMEELHNQEMQKRKEMQLRQEEERRRREEEMMIRQREMEEQMRRQREESYSRMGYMDPRERDMRMGGGGAMNMGDPYGSGGQKFPPLGGGGGIGYEANPGVPPATMSGSMMGSDMRTERFGQGGAGPVGGQGPRGMGPGTPAGYGRGREEYEGPNKKPRF

SEQ ID NO: 240 - DNA, 2122 bp, Homo sapien
gcccgtcccgccgcccgcccgccagccatgagctccacgcagttcaacaagggcccctcgtacgggctgtcggccgaggtcaagaaccggctcctgtccaaatatgacccccagaaggaggcagagctccgcacctggatcgagggactcaccggcctctccatcggccccgacttccagaagggcctgaaggatggaactatcttatgcacactcatgaacaagctacagccgggctccgtccccaagatcaaccgctccatgcagaactggcaccagctagaaaacctgtccaacttcatcaaggccatggtcagctacggcatgaaccctgtggacctgttcgaggccaacgacctgtttgagagtgggaacatgacgcaggtgcaggtgtctcttctcgccctggcggggaaggccaagactaaggggctgcagagcggggtggacattggcgtcaagtactcggagaagcaggagcggaatttcgacgatgccaccatgaaggctggccagtgcgtcatcgggctgcagatgggcaccaacaaatgcgccagccagtcgggcatgactgcctacggcacgagaaggcatctctatgaccccaagaaccatatcctgccccccatggaccactcgaccatcagcctccagatgggcacgaacaagtgcgccagccaggtgggcatgacggctcccgggacccggcggcacatctatgataccaagctgggaaccgacaagtgtgacaactcctccatgtccctgcagatgggctacacgcagggcgccaaccagagcggccaggtcttcggcctgggccggcagatatatgaccccaagtactgcccgcaaggcacagtggccgatggggctccctcgggcaccggcgactgcccggacccgggggaggtccctgaatatcccccttactaccaggaggaggccggctactgaggctcccagcacgctctctccccacatcgtcttcccatctgggtttttgggtttttctgtgttttcatctttttttttttttttcttgacccgttcagtgctgccagtcaaccaagggtctgtgagtgtcagcgtgggatcaggcagcagagcttttttcccctttgccttgatccttcgcaaggctgagccactgggctgtgggggaaggggtcaaggccatatcccaatacgtgtagggcgagggtccctgctggcacattcaggctgtgctgggaagaagagacctgggcttggaaggaaccggtccccgacggtttctggttgcctcgcctcttcccccttttgtcagctgagcagtttgtggtttctatgcccgcaagtttcaggaagtattcacaaaagaaaaatacattttttcccccaggggtggggcaaggacagtggagagagtgctaggaaatgagtcccctgggaaaggggaccgggccgtgatgttaaatatctccggctcccaagtgactggatttgcctaggaccttcagatcaacagacttcagaccctcagacctgccccggggccaggtggagaaagtgagggccgtacaaggaagtgaaattctgagttgttggggctaagcctgaccccctctccatgctccccgccccaactcactctggcctcagtagatttttttttcagttgtggttgttgcccaggctggagtgcagtggcgccatcttggctcactgcacctccaccttccgggctcaagcgattctccagcctcagcctcctgagtagctaggactgcaggtgctccaccacgcccggctaatttttgtatttttagtagagatggggtttccccatgttggccaggctggtctcgaactcctggcctcaggtgtgatccgcccgcctccgcctccccaagcgctgagattacaggtgtgagccaccgtgcccaggccctcagtaggttttaaggagtccccagccctcctcccttctgggcccgaccagcttatactgctccatcttccccggccacatgccccgccaagtactgcacagggaccccccacccaggggccctgctccgtgagataatgtgaaatacgactgtggaccaaacgcaataaaacctttgtttgtaggaag

SEQ ID NO: 241 - protein, 309 aa, Homo sapien
MSSTQFNKGPSYGLSAEVKNRLLSKYDPQKEAELRTWIEGLTGLSIGPDFQKGLKDGTILCTLMNKLQPGSVPKINRSMQNWHQLENLSNFIKAMVSYGMNPVDLFEANDLFESGNMTQVQVSLLALAGKAKTKGLQSGVDIGVKYSEKQERNFDDATMKAGQCVIGLQMGTNKCASQSGMTAYGTRRHLYDPKNHILPPMDHSTISLQMGTNKCASQVGMTAPGTRRHIYDTKLGTDKCDNSSMSLQMGYTQGANQSGQVFGLGRQIYDPKYCPQGTVADGAPSGTGDCPDPGEVPEYPPYYQEEAGY

SEQ ID NO: 242 - DNA, 1542 bp, Homo sapien
ctgaagatggcggctgctgtaggacggttgctccgagcgtcggttgcccgacatgtgagtgccattccttggggcatttctgccactgcagccctcaggcctgctgcatgtggaagaacgagcttgacaaatttattgtgttctggttccagtcaagcaaaattattcagcaccagttcctcatgccatgcacctgctgtcacccagcatgcaccctattttaagggtacagccgttgtcaatggagagttcaaagacctaagccttgatgactttaaggggaaatatttggtgcttttcttctatcctttggatttcacctttgtgtgtcctacagaaattgttgcttttagtgacaaagctaacgaatttcacgatgtgaactgtgaagttgtcgcagtctcagtggattcccactttagccatcttgcctggataaatacaccaagaaagaatggtggtttgggccacatgaacatcgcactcttgtcagacttaactaagcagatttcccgagactacggtgtgctgttagaaggttctggtcttgcactaagaggtctcttcataattgaccccaatggagtcatcaagcatttgagcgtcaacgatctcccagtgggccgaagcgtggaagaaaccctccgcttggtgaaggcgttccagtatgtagaaacacatggagaagtctgcccagcgaactggacaccggattctcctacgatcaagccaagtccagctgcttccaaagagtactttcagaaggtaaatcagtagatcacccatgtgtatctgcaccttctcaactgagagaagaaccacagttgaaacctgcttttatcattttcaagatggttatttgtagaaggcaaggaaccaattatgcttgtattcataagtattactctaaatgttttgtttttgtaattctggctaggaccttttaaacatggttagttgctagtacaggaatcgtttattggtaacatcttggtggctggctagctagtttctacagaacataatttgcctctatagaaggctattcttagatcatgtctcaatggaaacactcttctttcttagccttacttgaatcttgcctataataaagtagagcaacacacattgaaagcttctgatcaacggtcctgaaattttcatcttgaatgtctttgtattaaactgaattttcttttaagctaacaaagatcataattttcaatgattagccgtgtaactcctgcaatgaatgtttatgtgattgaagcaaatgtgaatcgtattattttaaaaagtggcagagtgacttaactgatcatgcatgatccctcatccctgaaattgagtttatgtagtcattttacttattttattcattagctaactttgtctatgtatatttctagatattgattagtgtaatcgattataaaggatatttatcaaatccagggattgcattttgaaattataattattttctttgctgaagtattcattgtaaaacatacaaataacatatttaaacaaaaaaaaaaa

SEQ ID NO: 243 - protein, 256 aa, Homo sapien
MAAAVGRLLRASVARHVSAIPWGISATAALRPAACGRTSLTNLLCSGSSQAKLFSTSSSCHAPAVTQHAPYFKGTAVVNGEFKDLSLDDFKGKYLVLFFYPLDFTFVCPTEIVAFSDKANEFHDVNCEVVAVSVDSHFSHLAWINTPRKNGGLGHMNIALLSDLTKQISRDYGVLLEGSGLALRGLFIIDPNGVIKHLSVNDLPVGRSVEETLRLVKAFQYVETHGEVCPANWTPDSPTIKPSPAASKEYFQKVNQ

SEQ ID NO: 244 - DNA, 2271 bp, Homo sapien
tggccggaattccggggagggagaagcccctttggcctgccttacggaagcctgcgagggagggtggtgtccactgcccagttccgtgtcccgatgcccagcgccacgcagcgcaagagtcaggagaagccgcgggagatcatggacgcggcggaagattatgctaaagagagatatggaatatcttcaatgatacaatcacaagaaaaaccagatcgagttttggttcgggttagagacttgacaatacaaaaagctgatgaagttgtttgggtacgtgcaagagttcatacaagcagagctaaagggaaacagtgcttcttagtcctacgtcagcagcagtttaatgtccaggctcttgtggcggtgggagaccatgcaagcaagcagatggttaaatttgctgccaacatcaacaaagagagcattgtggatgtagaaggtgttgtgagaaaagtgaatcagaaaattggaagctgtacacagcaagacgttgagttacatgttcagaagatttatgtgatcagtttggctgaaccccgtctgcccctgcagctggatgatgctgttcggcctgagcaagaaggagaagaggaaggaagagctactgttaaccaggatacaagattagacaacagagtcattgatcttaggacatcaactagtcaggcagtcttccgtctccagtctggcatctgccatctcttccgagaaactttaattaacaaaggttttgtggaaatccaaactcctaaaattatttcagctgccagtgaaggaggagccaatgtttttactgtgtcatattttaaaaataatgcatacctggctcagtccccacagctatataagcaaatgtgcatttgtgctgattttgagaaggttttctctattggaccagtattcagagcggaagactctaatacccatagacatctaactgagtttgttggtttggacattgaaatggcttttaattaccattaccacgaagttatggaagaaattgctgacaccatggtacaaatattcaaaggacttcaagaaaggtttcagactgaaattcaaacagtgaataaacagttcccatgtgagccattcaaatttttggagccaactctaagactagaatattgtgaagcattggctatgcttagggaagctggagtcgaaatgggagatgaagacgatctgagcacaccaaatgaaaagctgttgggtcatttggtaaaggaaaagtatgatacagatttttatattcttgataaatatccattggctgtaagacctttctataccatgcctgacccaagaaatcccaaacagtccaagtcttacgatatgttcatgagaggagaagaaatattgtcaggagctcaaagaatacatgatcctcaactgctaacagagagagctttacatcatggaaatgatttggagaaaattaaggcttacattgattccttccgctttggagcccctcctcatgctggtggaggcattggattggaacgagttactatgctgtttctgggattgcataatgttcgtcagacctccatgttccctcgtgatcccaaacgactcactccttaaattcacactttgccacttaactccagtgtggatgacagagcgagaccctgcctcaaaaaaaaaaaaaaaaaaaaaaaaaaaaaaaaaaaaaaaaaaaaaaaaaaaaaaaaaaaaaagaaagccacacttattcttttcagtaacctgctagtgcacaggctgtactttaggtacttaaaatatgcactagaataaatttgcaaggccctaaaatatcactgttatttttggagtaattcagtataggttcgtttaaaagagatttttataacttcagacatgcatcagtaggaaataacttgagaaattcatatggttatgttacaaattcatattctgttactacagtaaacgttaagagttttaaacagttaagattgtacaatttttcttcttttctatattacaagggccccagtgttaatgtcttagattttcagtatttgaacttatttttttaaattctgtcattgagataagaataattcaggtagcatctgaaattttaatgaatgtataattggcatatcatggaaaattaaccagaaagtatcagttcttaaaagttatgcctagaaattatgtaaagctaaactactggttagaaagtattcagtgtaatattgtattaatttgttaaattctaaacttgaatttcaataaaattttaaagct

SEQ ID NO: 245 - protein, 500 aa, Homo sapien
MPSATQRKSQEKPREIMDAAEDYAKERYGISSMIQSQEKPDRVLVRVRDLTIQKADEVVWVRARVHTSRAKGKQCFLVLRQQQFNVQALVAVGDHASKQMVKFAANINKESIVDVEGVVRKVNQKIGSCTQQDVELHVQKIYVISLAEPRLPLQLDDAVRPEQEGEEEGRATVNQDTRLDNRVIDLRTSTSQAVFRLQSGICHLFRETLINKGFVEIQTPKIISAASEGGANVFTVSYFKNNAYLAQSPQLYKQMCICADFEKVFSIGPVFRAEDSNTHRHLTEFVGLDIEMAFNYHYHEVMEEIADTMVQIFKGLQERFQTEIQTVNKQFPCEPFKFLEPTLRLEYCEALAMLREAGVEMGDEDDLSTPNEKLLGHLVKEKYDTDFYILDKYPLAVRPFYTMPDPRNPKQSKSYDMFMRGEEILSGAQRIHDPQLLTERALHHGNDLEKIKAYIDSFRFGAPPHAGGGIGLERVTMLFLGLHNVRQTSMFPRDPKRLTP

SEQ ID NO: 246 - DNA, 1345 bp, Homo sapien
acttggccttacactccgctcggctcaccatgtgtcactctcgcagctgccacccgaccatgaccatcctgcaggccccgaccccggccccctccaccatcccgggaccccggcggggctccggtcctgagatcttcaccttcgaccctctcccggagcccgcagcggcccctgccgggcgccccagcgcctctcgcgggcaccgaaagcgcagccgcagggtctctctaccctcgagtggtgagtatcgccgaagtgggcattcgcggtgtgcgctgccctggagtcactggggaacgacccgactccagagcctcgacctgacctgtctcctgttttgtctccccttagtccggcgccagctgccagtcgaggaaccgaacccagccaaaaggcttctctttctgctgctcaccatcgtcttctgccagatcctgatggctgaagagggtgtgccggcgcccctgcctccagaggacgcccctaacgccgcatccctggcgcccacccctgtgtcccccgtcctcgagccctttaatctgacttcggagccctcggactacgctctggacctcagcactttcctccagcaacacccggccgccttctaactgtgactccccgcactccccaaaaagaatccgaaaaaccacaaagaaacaccaggcgtacctggtgcgcgagagcgtatccccaactgggacttccgaggcaacttgaactcagaacactacagcggagacgccacccggtgcttgaggcgggaccgaggcgcacagagaccgaggcgcatagagaccgaggcacagcccagctgggctaggccggtgggaaggagagcgtcgttaatttatttcttattgctcctaattaatatttatatgtatttatgtacgtcctcctaggtgatggagatgtgtacgtaatatttattttaacttatgcaagggtgtgagatgttccctctgctgtaaatgcaggtctcttggtatttattgagctttgtgggactggtggaagcaggacacctggaactgcggcaaagtaggagaagaaatggggaggactcgggtgggggaggacgtcccggctgggatgaagtctggtggtgggtcgtaagtttaggaggtgactgcatcctccagcatctcaactccgtctgtctactgtgtgagacttcggcggaccattaggaatgagatccgtgagatccttccatcttcttgaagtcgcctttagggtggctgcgaggtagagggttgggggttggtgggctgtcacggagcgactgtcgagatcgcctagtatgttctgtgaacacaaataaaattgatttactgtctgc

SEQ ID NO: 247 - protein, 193 aa, Homo sapien
MCHSRSCHPTMTILQAPTPAPSTIPGPRRGSGPEIFTFDPLPEPAAAPAGRPSASRGHRKRSRRVSLPSSGEYRRSGHSRCALPWSHWGTTRLQSLDLTCLLFCLPLVRRQLPVEEPNPAKRLLFLLLTIVFCQILMAEEGVPAPLPPEDAPNAASLAPTPVSPVLEPFNLTSEPSDYALDLSTFLQQHPAAF

SEQ ID NO: 248 - DNA, 5611 bp, Homo sapien
gcgcgaccgtcccgggggtggggccgggcgcagcggcgagaggaggcgaaggtggctgcggtagcagcagcgcggcagcctcggacccagcccggagcgcagggcggccgctgcaggtccccgctcccctccccgtgcgtccgcccatggccgccgccgggcagctgtgcttgctctacctgtcggcggggctcctgtcccggctcggcgcagccttcaacttggacactcgggaggacaacgtgatccggaaatatggagaccccgggagcctcttcggcttctcgctggccatgcactggcaactgcagcccgaggacaagcggctgttgctcgtgggggccccgcgcggagaagcgcttccactgcagagagccaacagaacgggagggctgtacagctgcgacatcaccgcccgggggccatgcacgcggatcgagtttgataacgatgctgaccccacgtcagaaagcaaggaagatcagtggatgggggtcaccgtccagagccaaggtccagggggcaaggtcgtgacatgtgctcaccgatatgaaaaaaggcagcatgttaatacgaagcaggaatcccgagacatctttgggcggtgttatgtcctgagtcagaatctcaggattgaagacgatatggatgggggagattggagcttttgtgatgggcgattgagaggccatgagaaatttggctcttgccagcaaggtgtagcagctacttttactaaagactttcattacattgtatttggagccccgggtacttataactggaaagggattgttcgtgtagagcaaaagaataacactttttttgacatgaacatctttgaagatgggccttatgaagttggtggagagactgagcatgatgaaagtctcgttcctgttcctgctaacagttacttaggtttttctttggactcagggaaaggtattgtttctaaagatgagatcacttttgtatctggtgctcccagagccaatcacagtggagccgtggttttgctgaagagagacatgaagtctgcacatctcctccctgagcacatattcgatggagaaggtctggcctcttcatttggctatgatgtggcggtggtggacctcaacaaggatgggtggcaagatatagttattggagccccacagtattttgatagagatggagaagttggaggtgcagtgtatgtctacatgaaccagcaaggcagatggaataatgtgaagccaattcgtcttaatggaaccaaagattctatgtttggcattgcagtaaaaaatattggagatattaatcaagatggctacccagatattgcagttggagctccgtatgatgacttgggaaaggtttttatctatcatggatctgcaaatggaataaataccaaaccaacacaggttctcaagggtatatcaccttattttggatattcaattgctggaaacatggaccttgatcgaaattcctaccctgatgttgctgttggttccctctcagattcagtaactattttcagatcccggcctgtgattaatattcagaaaaccatcacagtaactcctaacagaattgacctccgccagaaaacagcgtgtggggcgcctagtgggatatgcctccaggttaaatcctgttttgaatatactgctaaccccgctggttataatccttcaatatcaattgtgggcacacttgaagctgaaaaagaaagaagaaaatctgggctatcctcaagagttcagtttcgaaaccaaggttctgagcccaaatatactcaagaactaactctgaagaggcagaaacagaaagtgtgcatggaggaaaccctgtggctacaggataatatcagagataaactgcgtcccattcccataactgcctcagtggagatccaagagccaagctctcgtaggcgagtgaattcacttccagaagttcttccaattctgaattcagatgaacccaagacagctcatattgatgttcacttcttaaaagagggatgtggagacgacaatgtatgtaacagcaaccttaaactagaatataaattttgcacccgagaaggaaatcaagacaaattttcttatttaccaattcaaaaaggtgtaccagaactagttctaaaagatcagaaggatattgctttagaaataacagtgacaaacagcccttccaacccaaggaatcccacaaaagatggcgatgacgcccatgaggctaaactgattgcaacgtttccagacactttaacctattctgcatatagagaactgagggctttccctgagaaacagttgagttgtgttgccaaccagaatggctcgcaagctgactgtgagctcggaaatccttttaaaagaaattcaaatgtcactttttatttggttttaagtacaactgaagtcacctttgacaccccatatctggatattaatctgaagttagaaacaacaagcaatcaagataatttggctccaattacagctaaagcaaaagtggttattgaactgcttttatcggtctcgggagttgctaaaccttcccaggtgtattttggaggtacagttgttggcgagcaagctatgaaatctgaagatgaagtgggaagtttaatagagtatgaattcagggtaataaacttaggtaaacctcttacaaacctcggcacagcaaccttgaacattcagtggccaaaagaaattagcaatgggaaatggttgctttatttggtgaaagtagaatccaaaggattggaaaaggtaacttgtgagccacaaaaggagataaactccctgaacctaacggagtctcacaactcaagaaagaaacgggaaattactgaaaaacagatagatgataacagaaaattttctttatttgctgaaagaaaataccagactcttaactgtagcgtgaacgtgaactgtgtgaacatcagatgcccgctgcgggggctggacagcaaggcgtctcttattttgcgctcgaggttatggaacagcacatttctagaggaatattccaaactgaactacttggacattctcatgcgagccttcattgatgtgactgctgctgccgaaaatatcaggctgccaaatgcaggcactcaggttcgagtgactgtgtttccctcaaagactgtagctcagtattcgggagtaccttggtggatcatcctagtggctattctcgctgggatcttgatgcttgctttattagtgtttatactatggaagtgtggtttcttcaagagaaataagaaagatcattatgatgccacatatcacaaggctgagatccatgctcagccatctgataaagagaggcttacttctgatgcatagtattgatctacttctgtaattgtgtggattctttaaacgctctaggtacgatgacagtgttccccgataccatgctgtaaggatccggaaagaagagcgagagatcaaagatgaaaagtatattgataaccttgaaaaaaaacagtggatcacaaagtggaacagaaatgaaagctactcatagcgggggcctaaaaaaaaaaaagcttcacagtacccaaactgctttttccaactcagaaattcaatttggatttaaaagcctgctcaatccctgaggactgatttcagagtgactacacacagtacgaacctacagttttaactgtggatattgttacgtagcctaaggctcctgttttgcacagccaaatttaaaactgttggaatggatttttctttaactgccgtaatttaactttctgggttgcctttgtttttggcgtggctgacttacatcatgtgttggggaagggcctgcccagttgcactcaggtgacatcctccagatagtgtagctgaggaggcacctacactcacctgcactaacagagtggccgtcctaacctcgggcctgctgcgcagacgtccatcacgttagctgtcccacatcacaagactatgccattggggtagttgtgtttcaacggaaagtgctgtcttaaactaaatgtgcaatagaaggtgatgttgccatcctaccgtcttttcctgtttcctagctgtgtgaatacctgctcacgtcaaatgcatacaagtttcattctccctttcactaaaaacacacaggtgcaacagacttgaatgctagttatacttatttgtatatggtatttattttttcttttctttacaaaccattttgttattgactaacaggccaaagagtctccagtttacccttcaggttggtttaatcaatcagaattagaattagagcatgggagggtcatcactatgacctaaattatttactgcaaaaagaaaatctttataaatgtaccagagagagttgttttaataacttatctataaactataacctctccttcatgacagcctccaccccacaacccaaaaggtttaagaaatagaattataactgtaaagatgtttatttcaggcattggatattttttactttagaagcctgcataatgtttctggatttacatactgtaacattcaggaattcttggagaagatgggtttattcactgaactctagtgcggtttactcactgctgcaaatactgtatattcaggacttgaaagaaatggtgaatgcctatggaactagtggatccaaactgatccagtataagactactgaatctgctaccaaaacagttaatcagtgagtcgagtgttctattttttgttttgtttcctcccctatctgtattcccaaaaattactttggggctaatttaacaagaactttaaattgtgttttaattgtaaaaatggcagggggtggaattattactctatacattcaacagagactgaatagatatgaaagctgattttttttaattaccatgcttcacaatgttaagttatatggggagcaacagcaaacaggtgctaatttgttttggatatagtataagcagtgtctgtgttttgaaagaatagaacacagtttgtagtgccactgttgttttggggggggctttttttctttttccggaaaatccttaaaccttaagatactaaggacgttgttttggttgtacttggaattcttagtcacaaaatatattttgtttacaaaaatttctgtaaaacaggttataacagtgtttaaagtctcagtttcttgcttggggaacttgtgtccctaatgtgttagattgctagattgctaaggagctgatacttgacagttttttagacctgtgttactaaaaaaaagatgaatgtcggaaaagggtgttgggagggtggtcaacaaagaaacaaagatgttatggtgtttagacttatggttgttaaaaatgtcatctcaagtcaagtcactggtctgtttgcatttgatacatttttgtactaactagcattgtaaaattatttcatgattagaaattacctgtggatatttgtataaaagtgtgaaataaattttttataaaagtgttcattgtttcgtaacacagcattgtatatgtgaagcaaactctaaaattataaatgacaacctgaattatctatttcatcaaaaaaaaaaaaaaaaaaaa

SEQ ID NO: 249 - protein, 1073 aa, Homo sapien
MAAAGQLCLLYLSAGLLSRLGAAFNLDTREDNVIRKYGDPGSLFGFSLAMHWQLQPEDKRLLLVGAPRGEALPLQRANRTGGLYSCDITARGPCTRIEFDNDADPTSESKEDQWMGVTVQSQGPGGKVVTCAHRYEKRQHVNTKQESRDIFGRCYVLSQNLRIEDDMDGGDWSFCDGRLRGHEKFGSCQQGVAATFTKDFHYIVFGAPGTYNWKGIVRVEQKNNTFFDMNIFEDGPYEVGGETEHDESLVPVPANSYLGFSLDSGKGIVSKDEITFVSGAPRANHSGAVVLLKRDMKSAHLLPEHIFDGEGLASSFGYDVAVVDLNKDGWQDIVIGAPQYFDRDGEVGGAVYVYMNQQGRWNNVKPIRLNGTKDSMFGIAVKNIGDINQDGYPDIAVGAPYDDLGKVFIYHGSANGINTKPTQVLKGISPYFGYSIAGNMDLDRNSYPDVAVGSLSDSVTIFRSRPVINIQKTITVTPNRIDLRQKTACGAPSGICLQVKSCFEYTANPAGYNPSISIVGTLEAEKERRKSGLSSRVQFRNQGSEPKYTQELTLKRQKQKVCMEETLWLQDNIRDKLRPIPITASVEIQEPSSRRRVNSLPEVLPILNSDEPKTAHIDVHFLKEGCGDDNVCNSNLKLEYKFCTREGNQDKFSYLPIQKGVPELVLKDQKDIALEITVTNSPSNPRNPTKDGDDAHEAKLIATFPDTLTYSAYRELRAFPEKQLSCVANQNGSQADCELGNPFKRNSNVTFYLVLSTTEVTFDTPYLDINLKLETTSNQDNLAPITAKAKVVIELLLSVSGVAKPSQVYFGGTVVGEQAMKSEDEVGSLIEYEFRVINLGKPLTNLGTATLNIQWPKEISNGKWLLYLVKVESKGLEKVTCEPQKEINSLNLTESHNSRKKREITEKQIDDNRKFSLFAERKYQTLNCSVNVNCVNIRCPLRGLDSKASLILRSRLWNSTFLEEYSKLNYLDILMRAFIDVTAAAENIRLPNAGTQVRVTVFPSKTVAQYSGVPWWIILVAILAGILMLALLVFILWKCGFFKRNKKDHYDATYHKAEIHAQPSDKERLTSDA

SEQ ID NO: 250 - DNA, 1244 bp, Homo sapien
ggaaactcccgcagacttctctgtagatcgctgagcgatactttcggcagcacctccttgattctcagttttgctggaggccgcaaccaggcccgcgccgccaccatgtttcgaaatcagtatgacaatgatgtcactgtttggagcccccagggcaggattcatcaaattgaatatgcaatggaagctgttaaacaaggttcagccacagttggtctgaaatcaaaaactcatgcagttttggttgcattgaaaagggcgcaatcagagcttgcagctcatcagaaaaaaattctccatgttgacaaccacattggtatctcaattgcggggcttactgctgatgctagactgttatgtaattttatgcgtcaggagtgtttggattccagatttgtattcgatagaccactgcctgtgtctcgtcttgtatctctaattggaagcaagacccagataccaacacaacgatatggccggagaccatatggtgttggtctccttattgctggttatgatgatatgggccctcacattttccaaacctgtccatctgctaactattttgactgcagagccatgtccattggagcccgttcccaatcagctcgtacttacttggagagacatatgtctgaatttatggagtgtaatttaaatgaactagttaaacatggtctgcgtgccttaagagagacgcttcctgcagaacaggacctgactacaaagaatgtttccattggaattgttggtaaagacttggagtttacaatctatgatgatgatgatgtgtctccattcctggaaggtcttgaagaaagaccacagagaaaggcacagcctgctcaacctgctgatgaacctgcagaaaaggctgatgaaccaatggaacattaagtgataagccagtctatatatgtattatcaaatatgtaagaatacaggcaccacatactgatgacaataatctatactttgaaccaaaagttgcagagtggtggaatgctatgctatgttttaggaatcagtccagatgtgagttttttccaagcaacctcactgaaacctatataatggaatacatttttctttgaaagggtctgtataatcattttctagaagtatgggtatctatactaatgttttttatataagaacataggtgtctttgtggttttaaagacaactgtgaaataaaattgtttcaccgcctggtaaaaaaaaaaaaaaaaaaaaaaaaaaaa

SEQ ID NO: 251 - protein, 263 aa, Homo sapien
MFRNQYDNDVTVWSPQGRIHQIEYAMEAVKQGSATVGLKSKTHAVLVALKRAQSELAAHQKKILHVDNHIGISIAGLTADARLLCNFMRQECLDSRFVFDRPLPVSRLVSLIGSKTQIPTQRYGRRPYGVGLLIAGYDDMGPHIFQTCPSANYFDCRAMSIGARSQSARTYLERHMSEFMECNLNELVKHGLRALRETLPAEQDLTTKNVSIGIVGKDLEFTIYDDDDVSPFLEGLEERPQRKAQPAQPADEPAEKADEPMEH

SEQ ID NO: 252 - DNA, 2981 bp, Homo sapien
ggggtgacgcaggcgcagcgcgggctgcgcgcgctactgcccatccccggttgtcccacttttgttcgcctctcttcggtcctctactcaagagctccgtctccgtctcgccctcctcgaagtcctcgtcgcgcgcccgcgacccaggtcgccctgaaatctagcccgtccgagcgcgagtccaacggccgcggccgcaccaaggccccctcagaccgtgccatgggtgacagtgatgacgagtacgatcgaaggcgcagggacaagttcagaagagagcgcagcgactacgaccgttcccgcgagagagatgaaagacgtcgaggggacgattggaatgacagagagtgggaccgtggccgtgagcgccgtagtcggggtgaatatcgggactatgaccggaatcggcgagagcgcttctcgccacctcgccacgaactcagcccgccacagaagcgcatgaggagagactgggatgagcacagctctgacccataccacagtggctatgagatgccctatgctgggggggggtgggggcccaacttatggcccccctcagccctggggccaccctgacgtccacatcatgcagcaccatgtcctgcctatccaggccaggctgggcagcattgcagagattgacctgggtgtgccgccgcccgtgatgaagaccttcaaggagtttctcctctccctggatgactcggtggatgagacggaggccgtcaagcgctataatgactacaagctggatttccggaggcaacagatgcaggatttcttcctggcgcacaaagatgaggagtggtttcggtctaagtaccacccagatgaggtggggaagcgtcggcaggaggcccggggggccctgcaaaaccgactgagggtcttcctgtccctcatggagactggctggtttgataaccttctcctggacatagacaaagctgatgccattgtcaagatgctggatgcagccgtgattaagatggaaggaggcacggagaatgatctccgcatcctggagcaggaggaggaggaggagcaggcaggaaagcctggggagcccagcaagaaagaagaaggacgggctggagcaggcctaggggacggggagcgcaaaaccaacgacaaggatgagaagaaggaagacggcaagcaggctgagaatgacagttctaatgatgacaaaacaaagaagtcggagggtgatggggacaaggaagagaagaaagaagactccgagaaggaagccaaaaagagtagcaagaagcggaaccggaagcacagtggtgacgacagctttgacgagggcagcgtgtcagagtctgagtcggagtcagagagcggccaggctgaggaggagaaggaggaggccgaagcgctcaaggagaaggagaagcccaaggaagaagaatgggagaagcccaaggacgccgcggggctggagtgcaagccgcggccgctgcataagacctgctccctcttcatgcgcaacatcgcgcccaacatctcccgggccgagatcatctccctttgtaaaaggtacccaggctttatgcgggtggcgctctcagagccccagccagagaggaggtttttccgtcgtggctgggtgaccttcgaccgcagtgttaacattaaagagatctgttggaacctgcagaacatccgtctccggtgtgagctgagccctggtgtgaactgggacctgacccggcgcgttcgcaacatcaacggcatcacccagcacaagcagattgtgcgcaacgacatcaagctggcggccaagctgatccacacgctggatgacaggacacagctttgggcctcagaaccagggacgcctcccctgcccacgagcctgccctcgcaaaacccgatcttgaagaatatcaccgactacctgatcgaggaagtaagcgccgaggaggaggagctgctggggagcagcgggggcgctcctcctgaggagcctcctaaggaagggaacccggcagagatcaacgtggagcgggatgagaagttgattaaggtcttggacaagctcctcctttacctgcgcatcgtgcattccttggattattacaacacctgtgagtaccccaacgaggacgagatgcccaatcgctgtgggatcatccacgttcgggggcccatgccacccaaccgcatcagtcacggggaagtgctggagtggcagaagacttttgaggagaagctcacgccgttgctgagtgtgcgggagtcactctcagaggaagaggcccagaagatggggcgcaaagacccagagcaggaagtggagaagttcgtcacctccaacacgcaggaactgggcaaggataagtggctgtgtcctctcagtggcaagaaattcaagggtcctgagtttgcgcgcaaacatatcttcaacaagcatgcagagaaaattgaggaagtgagaaaggaagtcgcgttttttaacaacttcctcactgatgctaagcgcccagctctgcctgagatcaagccagcccagccacctggccccgcccagatactccccccaggtttgaccccaggactcccctacccacaccagactccccagggcctgatgccctatggtcagccccggcccccgatcttgggctatggagctggtgctgtccgccctgcagtccccacaggaggccctccatacccccatgccccgtatggtgctggtcgagggaactatgatgccttccgaggccagggaggctatcctgggaaacctcgcaacaggatggttcgtggagacccaagggccattgtggaatatcgggacctggatgccccagacgatgttgatttcttttgagccgtcccccgttcctcagtcctgtatcatccatacttgtactaccttgtcctatgaagctctgagaattttttgtacgatcagccttactgctaataaaagcacttccacagggaaaaaaaaaaaaaaaaaa

SEQ ID NO: 253 - DNA, 3132 bp, Homo sapien
ccgcagaacttggggagccgccgccgccatccgccgccgcagccagcttccgccgccgcaggaccggcccctgccccagcctccgcagccgcggcgcgtccacgcccgcccgcgcccagggcgagtcggggtcgccgcctgcacgcttctcagtgttccccgcgccccgcatgtaacccggccaggcccccgcaacggtgtcccctgcagctccagccccgggctgcacccccccgccccgacaccagctctccagcctgctcgtccaggatggccgcggccaaggccgagatgcagctgatgtccccgctgcagatctctgacccgttcggatcctttcctcactcgcccaccatggacaactaccctaagctggaggagatgatgctgctgagcaacggggctccccagttcctcggcgccgccggggccccagagggcagcggcagcaacagcagcagcagcagcagcgggggcggtggaggcggcgggggcggcagcaacagcagcagcagcagcagcaccttcaaccctcaggcggacacgggcgagcagccctacgagcacctgaccgcagagtcttttcctgacatctctctgaacaacgagaaggtgctggtggagaccagttaccccagccaaaccactcgactgccccccatcacctatactggccgcttttccctggagcctgcacccaacagtggcaacaccttgtggcccgagcccctcttcagcttggtcagtggcctagtgagcatgaccaacccaccggcctcctcgtcctcagcaccatctccagcggcctcctccgcctccgcctcccagagcccacccctgagctgcgcagtgccatccaacgacagcagtcccatttactcagcggcacccaccttccccacgccgaacactgacattttccctgagccacaaagccaggccttcccgggctcggcagggacagcgctccagtacccgcctcctgcctaccctgccgccaagggtggcttccaggttcccatgatccccgactacctgtttccacagcagcagggggatctgggcctgggcaccccagaccagaagcccttccagggcctggagagccgcacccagcagccttcgctaacccctctgtctactattaaggcctttgccactcagtcgggctcccaggacctgaaggccctcaataccagctaccagtcccagctcatcaaacccagccgcatgcgcaagtatcccaaccggcccagcaagacgcccccccacgaacgcccttacgcttgcccagtggagtcctgtgatcgccgcttctcccgctccgacgagctcacccgccacatccgcatccacacaggccagaagcccttccagtgccgcatctgcatgcgcaacttcagccgcagcgaccacctcaccacccacatccgcacccacacaggcgaaaagcccttcgcctgcgacatctgtggaagaaagtttgccaggagcgatgaacgcaagaggcataccaagatccacttgcggcagaaggacaagaaagcagacaaaagtgttgtggcctcttcggccacctcctctctctcttcctacccgtccccggttgctacctcttacccgtccccggttactacctcttatccatccccggccaccacctcatacccatcccctgtgcccacctccttctcctctcccggctcctcgacctacccatcccctgtgcacagtggcttcccctccccgtcggtggccaccacgtactcctctgttccccctgctttcccggcccaggtcagcagcttcccttcctcagctgtcaccaactccttcagcgcctccacagggctttcggacatgacagcaaccttttctcccaggacaattgaaatttgctaaagggaaaggggaaagaaagggaaaagggagaaaaagaaacacaagagacttaaaggacaggaggaggagatggccataggagaggagggttcctcttaggtcagatggaggttctcagagccaagtcctccctctctactggagtggaaggtctattggccaacaatcctttctgcccacttccccttccccaattactattccctttgacttcagctgcctgaaacagccatgtccaagttcttcacctctatccaaagaacttgatttgcatggattttggataaatcatttcagtatcatctccatcatatgcctgaccccttgctcccttcaatgctagaaaatcgagttggcaaaatggggtttgggcccctcagagccctgccctgcacccttgtacagtgtctgtgccatggatttcgtttttcttggggtactcttgatgtgaagataatttgcatattctattgtattatttggagttaggtcctcacttgggggaaaaaaaaaaaaaaaagccaagcaaaccaatggtgatcctctattttgtgatgatgctgtgacaataagtttgaacctttttttttgaaacagcagtcccagtattctcagagcatgtgtcagagtgttgttccgttaacctttttgtaaatactgcttgaccgtactctcacatgtggcaaaatatggtttggtttttcttttttttttttgaaagtgttttttcttcgtccttttggtttaaaaagtttcacgtcttggtgccttttgtgtgatgccccttgctgatggcttgacatgtgcaattgtgagggacatgctcacctctagccttaaggggggcagggagtgatgatttgggggaggctttgggagcaaaataaggaagagggctgagctgagcttcggttctccagaatgtaagaaaacaaaatctaaaacaaaatctgaactctcaaaagtctatttttttaactgaaaatgtaaatttataaatatattcaggagttggaatgttgtagttacctactgagtaggcggcgatttttgtatgttatgaacatgcagttcattattttgtggttctattttactttgtacttgtgtttgcttaaacaaagtgactgtttggcttataaacacattgaatgcgctttattgcccatgggatatgtggtgtatatccttccaaaaaattaaaacgaaaataaagtagctgcgattggg

SEQ ID NO: 254 - protein, 543 aa, Homo sapien
MAAAKAEMQLMSPLQISDPFGSFPHSPTMDNYPKLEEMMLLSNGAPQFLGAAGAPEGSGSNSSSSSSGGGGGGGGGSNSSSSSSTFNPQADTGEQPYEHLTAESFPDISLNNEKVLVETSYPSQTTRLPPITYTGRFSLEPAPNSGNTLWPEPLFSLVSGLVSMTNPPASSSSAPSPAASSASASQSPPLSCAVPSNDSSPIYSAAPTFPTPNTDIFPEPQSQAFPGSAGTALQYPPPAYPAAKGGFQVPMIPDYLFPQQQGDLGLGTPDQKPFQGLESRTQQPSLTPLSTIKAFATQSGSQDLKALNTSYQSQLIKPSRMRKYPNRPSKTPPHERPYACPVESCDRRFSRSDELTRHIRIHTGQKPFQCRICMRNFSRSDHLTTHIRTHTGEKPFACDICGRKFARSDERKRHTKIHLRQKDKKADKSVVASSATSSLSSYPSPVATSYPSPVTTSYPSPATTSYPSPVPTSFSSPGSSTYPSPVHSGFPSPSVATTYSSVPPAFPAQVSSFPSSAVTNSFSASTGLSDMTATFSPRTIEIC

SEQ ID NO: 255 - DNA, 2232 bp, Homo sapien
cttccccttctctgccctgctccaggcaccaggctctttccccttcagtgtctcagaggaggggacggcagcaccatggacccccgcttgtccactgtccgccagacctgctgctgcttcaatgtccgcatcgcaaccaccgccctggccatctaccatgtgatcatgagcgtcttgttgttcatcgagcactcagtagaggtggcccatggcaaggcgtcctgcaagctctcccagatgggctacctcaggatcgctgacctgatctccagcttcctgctcatcaccatgctcttcatcatcagcctgagcctactgatcggcgtagtcaagaaccgggagaagtacctgctgcccttcctgtccctgcaaatcatggactatctcctgtgcctgctcaccctgctgggctcctacattgagctgcccgcctacctcaagttggcctcccggagccgtgctagctcctccaagttccccctgatgacgctgcagctgctggacttctgcctgagcatcctgaccctctgcagctcctacatggaagtgcccacctatctcaacttcaagtccatgaaccacatgaattacctccccagccaggaggatatgcctcataaccagttcatcaagatgatgatcatcttttccatcgccttcatcactgtccttatcttcaaggtctacatgttcaagtgcgtgtggcggtgctacagattgatcaagtgcatgaactcggtggaggagaagagaaactccaagatgctccagaaggtggtcctgccgtcctacgaggaagccctgtctttgccatcgaagaccccagaggggggcccagcaccacccccatactcagaggtgtgaccctcgccaggccccagccccagtgctgggaggggtggagctgcctcataatctgcttttttgctttggtggcccctgtggcctgggtgggccctcccgcccctccctggcaggacaatctgcttgtgtctccctcgctggcctgctcctcctgcagggcctgtgagctgctcacaactgggtcaacgctttaggctgagtcactcctcgggtctctccataattcagcccaacaatgcttggtttatttcaatcagctctgacacttgtttagacgattggccattctaaagttggtgagtttgtcaagcaactatcgacttgatcagttcagccaagcaactgacaaatcaaaaacccacttgtcagttcagtaaaataatttggtcaaacaacagtctattgcattgatttataaatagttgtcagttcacatagcaatttaatcaagtaatcattaattagttaccccctatatataaatatatgtaatcaatttcttcaaatagcttgcttacatgataatcaattagccaaccatgagtcatttagaatagtgataaatagaatacacagaatagtgatgaaattcaatttaaaaaatcacgttagcctccaaaccatttaattcaaatgaacccatcaactggatgccaactctggcgaatgtaggacctctgagtggctgtataattgttaattcaaatgaaattcatttaaacagttgacaaactgtcattcaacaattagctccaggaaataacagttatttcatcataaaacagtcccttcaaacacacaattgttctgctgaagagttgtcatcaacaatccaatgctcacctattcagttgctctgtggtcagtgtggctgcatagcagtggattccatgaaaggagtcattttagtgatgagctgccagtccattcccaggccaggctgtcgctggccatccattcagtcgattcagtcataggcgaatctgttctgcccgaggcttgtggtcaagcaaaaattcagccctgaaatcaggcacatctgttcgttggactaaacccacaggttagttcagtcaaagcaggcaacccccttgtgggcactgaccctgccactggggtcatggcggttgtggcagctggggaggtttggccccaacagccctcctgtgcctgcttccctgtgtgtcggggtcctccagggagctgacccagaggtggaggccacggaggcagggtctctggggactgtcggggggtacagagggagaaggctctgcaagagctccctggcaatacccccttgtgtaattgctttgtgtgcgacagggaggaagtttcaataaagcaacaacaagcttcaaggaattc

SEQ ID NO: 256 - protein, 262 aa, Homo sapien
MDPRLSTVRQTCCCFNVRIATTALAIYHVIMSVLLFIEHSVEVAHGKASCKLSQMGYLRIADLISSFLLITMLFIISLSLLIGVVKNREKYLLPFLSLQIMDYLLCLLTLLGSYIELPAYLKLASRSRASSSKFPLMTLQLLDFCLSILTLCSSYMEVPTYLNFKSMNHMNYLPSQEDMPHNQFIKMMIIFSIAFITVLIFKVYMFKCVWRCYRLIKCMNSVEEKRNSKMLQKVVLPSYEEALSLPSKTPEGGPAPPPYSEV

SEQ ID NO: 257 - DNA, 2370 bp, Homo sapien
cacgagggagcgctaacgtctttctgtctccccgcggtggtgatgacggtgaaaactgaggctgctaagggcaccctcacttactccaggatgaggggcatggtggcaattctcatcgctttcatgaagcagaggaggatgggtctgaacgactttattcagaagattgccaataactcctatgcatgcaaacaccctgaagttcagtccatcttgaagatctcccaacctcaggagcctgagcttatgaatgccaacccttctcctccaccaagtccttctcagcaaatcaaccttggcccgtcgtccaatcctcatgctaaaccatctgactttcacttcttgaaagtgatcggaaagggcagttttggaaaggttcttctagcaagacacaaggcagaagaagtgttctatgcagtcaaagttttacagaagaaagcaatcctgaaaaagaaagaggagaagcatattatgtcggagcggaatgttctgttgaagaatgtgaagcaccctttcctggtgggccttcacttctctttccagactgctgacaaattgtactttgtcctagactacattaatggtggagagttgttctaccatctccagagggaacgctgcttcctggaaccacgggctcgtttctatgctgctgaaatagccagtgccttgggctacctgcattcactgaacatcgtttatagagacttaaaaccagagaatattttgctagattcacagggacacattgtccttactgatttcggactctgcaaggagaacattgaacacaacagcacaacatccaccttctgtggcacgccggagtatctcgcacctgaggtgcttcataagcagccttatgacaggactgtggactggtggtgcctgggagctgtcttgtatgagatgctgtatggcctgccgcctttttatagccgaaacacagctgaaatgtacgacaacattctgaacaagcctctccagctgaaaccaaatattacaaattccgcaagacacctcctggagggcctcctgcagaaggacaggacaaagcggctcggggccaaggatgacttcatggagattaagagtcatgtcttcttctccttaattaactgggatgatctcattaataagaagattactcccccttttaacccaaatgtgagtgggcccaacgagctacggcactttgaccccgagtttaccgaagagcctgtccccaactccattggcaagtcccctgacagcgtcctcgtcacagccagcgtcaaggaagctgccgaggctttcctaggcttttcctatgcgcctcccacggactctttcctctgaaccctgttagggcttggttttaaaggattttatgtgtgtttccgaatgttttagttagccttttggtggagccgccagctgacaggacatcttacaagagaatttgcacatctctggaagcttagcaatcttattgcacactgttcgctggaattttttgaagagcacattctcctcagtgagctcatgaggttttcatttttattcttccttccaacgtggtgctatctctgaaacgagcgttagagtgccgccttagacggaggcaggagtttcgttagaaagcggacctgttctaaaaaaggtctcctgcagatctgtctgggctgtgatgacgaatattatgaaatgtgccttttctgaagagattgtgttagctccaaagcttttcctatcgcagtgtttcagttctttattttcccttgtggatatgctgtgtgaaccgtcgtgtgagtgtggtatgcctgatcacagatggattttgttataagcatcaatgtgacacttgcaggacactacaacgtgggacattgtttgtttcttccatatttggaagataaatttatgtgtagacttttttgtaagatacggttaataactaaaatttattgaaatggtcttgcaatgactcgtattcagatgcctaaagaaagcattgctgctacaaatatttctatttttagaaagggtttttatggaccaatgccccagttgtcagtcagagccgttggtgtttttcattgtttaaaatgtcacctgtaaaatgggcattatttatgtttttttttttgcattcctgataattgtatgtattgtataaagaacgtctgtacattgggttataacactagtatatttaaacttacaggcttatttgtaatgtaaaccaccattttaatgtactgtaattaacatggttataatacgtacaatccttccctcatcccatcacacaactttttttgtgtgtgataaactgattttggtttgcaataaaaccttgaaaaataaaaaaaaaaaaaaaaaaaaaaa

SEQ ID NO: 258 - protein, 431 aa, Homo sapien [sequence omitted]

SEQ ID NO: 259 - DNA, 2708 bp, Homo sapien
ggcctgttctcgagtccgcgcttttcgtcaccgccatgtcgggaggtggtgtgattcgtggccccgcagggaacaacgattgccgcatctacgtgggtaacttacctccagacatccgaaccaaggacattgaggacgtgttctacaaatacggcgctatccgcgacatcgacctcaagaatcgccgcgggggaccgcccttcgccttcgttgagttcgaggacccgcgagacgcggaagacgcggtgtatggtcgcgacggctatgattacgatgggtaccgtctgcgggtggagtttcctcgaagcggccgtggaacaggccgaggcggcggcgggggtggaggtggcggagctccccgaggtcgctatggccccccatccaggcggtctgaaaacagagtggttgtctctggactgcctccaagtggaagttggcaggatttaaaggatcacatgcgtgaagcaggtgatgtatgttatgctgatgtttaccgagatggcactggtgtcgtggagtttgtacggaaagaagatatgacctatgcagttcgaaaactggataacactaagtttagatctcatgagggagaaactgcctacatccgggttaaagttgatgggcccagaagtccaagttatggaagatctcgatctcgaagccgtagtcgtagcagaagccgtagcagaagcaacagcaggagtcgcagttactccccaaggagaagcagaggatcaccacgctattctccccgtcatagcagatctcgctctcgtacataagatgattggtgacactttttgtagaacccatgttgtatacagttttcctttattcagtacaatcttttcattttttaattcaaactgttttgttcagaatgggctaaagtgttgaattgcattcttgtaatatccccttgctcctaacatctacattcccttcgtgtctttgataaattgtattttaagtgatgtcatagacaggattgtttaaatttagttaactccatactcttcagactgtgatattgtgtaaatgtctatctgccctggtttgtgtgaactgggatgttgggggtgtttgtggttatcttacctggggaagttcttatgtttatcttgcttttcatgtgtctttctgtagacatatctgaagagatggattaagaatgctttggattaaggattgtggagcacatttcaatcattttaggattgtcaaaaggaggattgaggaggatcagatcaataatggaggcaatggtatgactccaagtgctattgtcacagatgaaattggcagtattgaccttatactaaaaggcaggggttaaaaatgattatatacattttccttaaaacacttgcaaacattttattcagttgtctttagctacaattgctttgctttttaaaccttggcaattgtggcaaaattatattgcccattttgtagcaacttattttgctcccttccccccatttttgttttaatagggactaatgtgggaagaactggctaatttgtcacagtgcttagttacaactgttaatgtgtgacctgctgttggtgtacatgtgggtacagggtgtttttaaatccaacaagatagagtataatatcaatactgctaaatctgcatgtcctctgtgtgactgatagagcgttgctatttcatttttttaagacaaaatgaaagcaaaatatagagttccaatgtattggtgtagataatctagttgggaatacttttaagtctcaccttcccctttaaactaatattcataattggttcatatgtttaaaagactttaatttacaaattaaattgcaaatgggagcattagatttagttttagacttaggtgggtagcaatgccagtaaacttaaattacgtaacttcttgcaaccacgaaacctgtaatacgctgtacagtaacaagtgttggcattatcagttgaactgtaaatacaaaatgcttcttccaattagtctctatgatgattaagtttctaaaatttatctgaacaccattcagaaacttgttttggggaatttgatagttattgatgtgcatctgttaaactgatgacagacataactcatcattccccagaaaccttttttgattacagtatctaacattttgcctcctcttttttggttttgctggttataaaggtttggattggagagggctcactggatcccaatccttggagctggatcattggattcaaatcataatgtggataggatagggaggatgaattaccaggattcatggagcgggatcagattaccaggaacataggagtggattcctgccccaaccaaaccgcattcgtgtggatttttttattcaacttaattggctattccaaagattttttttttcctatttttgacgattggagcccttaagatgcacgatggaattgtgttttgcgttttttggtaaaaggagcaaagcgaggacctggagataaacgctggagcaatctccttggaaggattcagcacgagtagatggtaaacatttaaaggggaaagggggggtttgtttaaaatagtaaatcagtaagtcacttctaaatttaaagaaaacaaaattggagttgaagaataagtaggtttccaattggctattgccgttttctttgaaaaaataaacattttttaaaaaacaaaaaaaaaaaaaaa

SEQ ID NO: 260 - protein, 248 aa, Homo sapien
MSGGGVIRGPAGNNDCRIYVGNLPPDIRTKDIEDVFYKYGAIRDIDLKNRRGGPPFAFVEFEDPRDAEDAVYGRDGYDYDGYRLRVEFPRSGRGTGRGGGGGGGGGAPRGRYGPPSRRSENRVVVSGLPPSGSWQDLKDHMREAGDVCYADVYRDGTGVVEFVRKEDMTYAVRKLDNTKFRSHEGETAYIRVKVDGPRSPSYGRSRSRSRSRSRSRSRSNSRSRSYSPRRSRGSPRYSPRHSRSRSRT

SEQ ID NO: 261 - DNA, 2864 bp, Homo sapien
agataacaagagtaatccacagacttaaaacatgagctcagatgccagccaaggcgtgattaccactcctcctcctcccagcatgcctcacaaagagagatattttgaccgcatcaatgaaaatgacccagaatacattagggagaggaacatgtctcctgatctacgacaagacttcaacatgatggagcagaggaaacgagttactcagatcctgcaaagtcctgcctttcgggaagacttggaatgccttattcaagaacagatgaagaaaggccacaacccaactggattactagcattacagcagattgcagattacatcatggccaattctttctcgggtttttcttcacctcctctcagtcttggcatggtcacacctatcaatgaccttcctggtgcagatacatcctcatatgtgaagggagaaaaacttactcgctgtaaacttgccagcctgtacagacttgtagacttgtttggatgggcacacctggcaaatacctatatctcagtaagaataagtaaggagcaagaccacattataataattcccagaggcctatctttttctgaagctacagcctccaatttggtgaaagtcaatataataggagaagtggttgaccagggaagtaccaatttgaaaattgaccatacaggattcagtccccatgctgcaatctattcaacacgtcctgatgttaagtgtgtcatacacatccatacccttgcaacagcagctgtatcctccatgaaatgtgggatccttccaatttctcaagagtctcttcttctgggagatgttgcctattatgactaccaagggtcacttgaagaacaggaggagagaattcaactgcagaaggttctgggaccaagttgtaaggtgctggtactcaggaatcatggtgtggttgcacttggagaaacattagaggaggcttttcattatatttttaatgtgcaactagcctgtgagattcaggtgcaggccctagcaggtgcaggtggagtagacaatctccatgtactggactttcagaagtataaagctttcacttacactgtagcagcgtctggtggaggaggtgtgaatatgggttcccatcaaaaatggaaggttggcgaaattgagtttgaagggcttatgaggactctggacaacttggggtatagaacaggctatgcttacaggcatcctctcattcgagagaagcctaggcacaagagtgatgtggaaatcccagcaactgtgactgctttttcctttgaagacgatacagtgccactctctcctctcaaatacatggcacagaggcaacagcgtgaaaaaacaagatggctgaactcaccaaatacttacatgaaagtgaatgtgcctgaggagtctcggaacggagaaaccagtccccgaaccaaaatcacgtggatgaaagcagaagactcatctaaagttagtggtggaacacctatcaaaattgaagatccaaatcagtttgttcctttaaacacaaacccgaatgaggtactagaaaagagaaataagattcgggaacaaaatcgatatgacttgaaaacagcaggaccacaatctcagttgcttgctggaattgttgtggataagccaccttctactatgcaatttgaagatgatgatcatggcccaccagctcctcctaacccatttagtcatctcacagaaggagaacttgaagagtataagaggacaatcgaacgtaaacaacaaggcctagaagatgctgagcaggaattactctcagatgacgcttcatctgtttcacaaattcagtctcaaactcagtcaccgcaaaatgtccctgaaaaattagaagaaaaccatgagctgttttccaagagcttcatctccatggaagtgcctgtcatggtagtaaatggcaaggatgatatgcatgatgttgaagatgagcttgctaagcgagtgagtaggttaagcacaagtacaaccatagaaaacatcgagattactattaagtctccagagaaaatcgaagaagtcctgtcacctgaaggctccccttcaaaatcgccatccaagaaaaagaagaaattccgcactccttcttttctgaaaaagaacaaaaaaaaggagaaagttgaggcctaaataaagtctttttataattattattataacaatgtgacattgcacatctaaataccacatttaagttgatcattaatatgcaatggtagatcagattgggggatgtagcaaactggactttaagaactggaaagaggttttacaaaagaaaaactttcagattcatctctcattttatatgtccagaaatggctttgaattttaagcaattactagttttaattagctctgccctcatgaagtattattataattcaccataaacagctatctgtctgaattacttcaggccttctccataatatctgttagaaagaaattgccagtgagcaagtgagaatttttatttctcaatacctgcttcacttgataatcatattataattttttatcatgattattgactatatttttggagtcccattgtttcagtgggcattaacagaatgctttaaaaacttctaagacaagaatctatagcattagtatacactggcacataattttttaaaaagttttaagaaaagattcatttggaattttattcacagtataaaatttcctcacctgaagtaactttgtttgccaaaaaagttgttttaataaactataatttttgaaaacttccttttttattagtttagaaagccccttatttttcaacaaaggggattttgtacacataacatgggttatttagtttaactctggc

SEQ ID NO: 262 - protein, 706 aa, Homo sapien
MSSDASQGVITTPPPPSMPHKERYFDRINENDPEYIRERNMSPDLRQDFNMMEQRKRVTQILQSPAFREDLECLIQEQMKKGHNPTGLLALQQIADYIMANSFSGFSSPPLSLGMVTPINDLPGADTSSYVKGEKLTRCKLASLYRLVDLFGWAHLANTYISVRISKEQDHIIIIPRGLSFSEATASNLVKVNIIGEVVDQGSTNLKIDHTGFSPHAAIYSTRPDVKCVIHIHTLATAAVSSMKCGILPISQESLLLGDVAYYDYQGSLEEQEERIQLQKVLGPSCKVLVLRNHGVVALGETLEEAFHYIFNVQLACEIQVQALAGAGGVDNLHVLDFQKYKAFTYTVAASGGGGVNMGSHQKWKVGEIEFEGLMRTLDNLGYRTGYAYRHPLIREKPRHKSDVEIPATVTAFSFEDDTVPLSPLKYMAQRQQREKTRWLNSPNTYMKVNVPEESRNGETSPRTKITWMKAEDSSKVSGGTPIKIEDPNQFVPLNTNPNEVLEKRNKIREQNRYDLKTAGPQSQLLAGIVVDKPPSTMQFEDDDHGPPAPPNPFSHLTEGELEEYKRTIERKQQGLEDAEQELLSDDASSVSQIQSQTQSPQNVPEKLEENHELFSKSFISMEVPVMVVNGKDDMHDVEDELAKRVSRLSTSTTIENIEITIKSPEKIEEVLSPEGSPSKSPSKKKKKFRTPSFLKKNKKKEKVEA

SEQ ID NO: 263 - DNA, 2154 bp, Homo sapien
atataaccgcgtggcccgcgcgcgcgcttccctcccggcgcagtcaccggcgcggtctatggctgcgacttctctaatgtctgctttggctgcccggctgctgcagcccgcgcacagctgctcccttcgccttcgccctttccacctcgcggcagttcgaaatgaagctgttgtcatttctggaaggaaactggcccagcagatcaagcaggaagtgcggcaggaggtagaagagtgggtggcctcaggcaacaaacggccacacctgagtgtgatcctggttggcgagaatcctgcaagtcactcctatgtcctcaacaaaaccagggcagctgcagttgtgggaatcaacagtgagacaattatgaaaccagcttcaatttcagaggaagaattgttgaatttaatcaataaactgaataatgatgataatgtagatggcctccttgttcagttgcctcttccagagcatattgatgagagaaggatctgcaatgctgtttctccagacaaggatgttgatggctttcatgtaattaatgtaggacgaatgtgtttggatcagtattccatgttaccggctactccatggggtgtgtgggaaataatcaagcgaactggcattccaaccctagggaagaatgtggttgtggctggaaggtcaaaaaacgttggaatgcccattgcaatgttactgcacacagatggggcgcatgaacgtcccggaggtgatgccactgttacaatatctcatcgatatactcccaaagagcagttgaagaaacatacaattcttgcagatattgtaatatctgctgcaggtattccaaatctgatcacagcagatatgatcaaggaaggagcagcagtcattgatgtgggaataaatagagttcacgatcctgtaactgccaaacccaagttggttggagatgtggattttgaaggagtcagacaaaaagctgggtatatcactccagttcctggaggtgttggccccatgacagtggcaatgctaatgaagaataccattattgctgcaaaaaaggtgctgaggcttgaagagcgagaagtgctgaagtctaaagagcttggggtagccactaattaactactgtgtcttctgtgtcacaaacagcactccaggccagctcaagaagcaaagcaggccaatagaaatgcaatatttttaatttattctactgaaatggtttaaaatgatgccttgtatttattgaaagcttaaatgggtgggtgtttctgcacatacctctgcagtacctcaccagggagcattccagtatcatgcagggtcctgtgatctagccaggagcagccattaacctagtgattaatatgggagacattaccatatggaggatggatgcttcactttgtcaagcacctcagttacacattcgccttttctaggattgcatttcccaagtgctattgcaataacagttgatactcattttaggtaccagaccttttgagttcaactgatcaaaccaaaggaaaagtgttgctagagaaaattggggaaaaggtgaaaaagaaaaaatggtagtaattgagcagaaaaaaattaatttatatatgtattgattggcaaccagatttatctaagtagaactgaattggctaggaaaaaagaaaaactgcatgttaatcattttcctaagctgtccttttgaggcttagtcagtttattgggaaaatgtttaggattattccttgctattagtactcattttatgtatgttacccttcagtaagttctccccattttagttttctaggactgaaaggattcttttctacattatacatgtgtgttgtcatatttggcttttgctatatactttaacttcattgttaaatttttgtattgtatagtttctttggtgtatcttaaaacctatttttgaaaaacaaacttggcttgataatcatttgggcagcttgggtaagtacgcaacttacttttccaccaaagaactgtcagcagctgcctgcttttctgtgatgtatgtatcctgttgacttttccagaaattttttaagagtttgagttactattgaatttaatcagactttctgattaaagggttttctttcttttttaataaaacacatctgtctggtatggta

SEQ ID NO: 264 - protein, 344 aa, Homo sapien
MSALAARLLQPAHSCSLRLRPFHLAAVRNEAVVISGRKLAQQIKQEVRQEVEEWVASGNKRPHLSVILVGENPASHSYVLNKTRAAAVVGINSETIMKPASISEEELLNLINKLNNDDNVDGLLVQLPLPEHIDERRICNAVSPDKDVDGFHVINVGRMCLDQYSMLPATPWGVWEIIKRTGIPTLGKNVVVAGRSKNVGMPIAMLLHTDGAHERPGGDATVTISHRYTPKEQLKKHTILADIVISAAGIPNLITADMIKEGAAVIDVGINRVHDPVTAKPKLVGDVDFEGVRQKAGYITPVPGGVGPMTVAMLMKNTIIAAKKVLRLEEREVLKSKELGVATN

SEQ ID NO: 265 - DNA, 828 bp, Homo sapien
gggggagtgaaagcgaaagcccgggcgactagccgggagaccagagatctagcgactgaagcagcatggccaagccgtgtggggtgcgcctgagcggggaagcccgcaaacaggtggaggtcttcaggcagaatcttttccaggaggctgaggaattcctctacagattcttgccacagaaaatcatatacctgaatcagctcttgcaagaggactccctcaatgtggctgacttgacttccctccgggccccactggacatccccatcccagaccctccacccaaggatgatgagatggaaacagataagcaggagaagaaagaagtccctaagtgtggatttctccctgggaatgagaaagtcctgtccctgcttgccctggttaagccagaagtctggactctcaaagagaaatgcattctggtgattacatggatccaacacctgatccccaagattgaagatggaaatgattttggggtagcaatccaggagaaggtgctggagagggtgaatgccgtcaagaccaaagtggaagctttccagacaaccatttccaagtacttctcagaacgtggggatgctgtggccaaggcctccaaggagactcatgtaatggattaccgggccttggtgcatgagcgagatgaggcagcctatggggagctcagggccatggtgctggacctgagggccttctatgctgagctttatcatatcatcagcagcaacctggagaaaattgtcaccccaaagggtgaagaaaagccatctatgtactgaacccgggactagaaggaaaataaatgatctatatgttgtgtgg

SEQ ID NO: 266 - protein, 239 aa, Homo sapien [sequence omitted]

SEQ ID NO: 267 - DNA, 1645 bp, Homo sapien
agtcaagatggaggagtacgcgcgagagccttgcccatggcgaattgtggatgactgtggtggggcctttacgatgggtaccattggtggtggtatctttcaagcaatcaaaggttttcgcaattctccagtgggagtaaaccacagactacgagggagtttgacagctattaaaaccagggctccacagttaggaggtagctttgcagtttggggagggctgttttccatgattgactgtagtatggttcaagtcagaggaaaggaagatccctggaactccatcacaagtggtgccttaacgggagccatactggcagcaagaaatggaccagtggccatggttgggtcagccgcaatgggtggcattctcctagctttaattgaaggagctggtatcttgttgacaagatttgcctctgcacagtttcccaatggtcctcagtttgcagaagacccctcccagttgccttcaactcagttaccttcctcaccttttggagactatcgacaatatcagtaggacttctttcctaggatttctttaacagaacgagttgtggttcgagaaggatttcagaagatcaagttacagtctgtttttaaaaccataggtgggacagctatggccaataggctataaagagacatttagcacttttttctatttaaaggaacaagcggggaagggtgctaaaagataatacgtttatttattcacacttgaattgcatttgtgatcaaaataaatgtttaaatcgctaaaggaaaatacagtaagtgcttgaaagatgaaggaccaaaaggccaaaaaacagtgaaatatgatcatcatctcttgcggacttctctgcctggttttgtgtgttctgttattcaaacaataaaaagctggtggaacttactctttcttttaagataagttgtagacttcgatgtttcatgctcatgtacttcaaataatgcatgttttatagttagtccctcatcacttgaagtgacttctgagaattatgcagagtcaacatggatcatttcacagtgagatgctttatggattgaaggatatggtaaaatgtttatagtttactttgaaagtaaaatatactatgtcttggttttgaggatattggatacaaaactctcttcctttagggctactgagtcttgattcctgatcatcagaaatttcaccagaaacaacttgcttccaatatacccaattctatatgaagaattcatggagagtgtactggcactggaagagtttagtgtttcttgtatgcttgaaaataaagtatgtactgttttgaatgtgttccaagtcctctgcataaacgatgtattttggggtctggttgggcctggaaaatggatgagcacttcagaacaggtcattttcctgatattggaagtgacatgtggccctataggaggcatgatgttagttaattacacatttgcctacatctgtgggaaatggagaacaaagccatgtgggtactgtaaacacacgtttatcttttggcccaatgccatacatatggtaggcatttaattactgattgtgtttggataatttgggaattttcgactgtggtaaaatatacataaaataatacttattaaaaaaaaaaaaaaaaaa

SEQ ID NO: 268 - protein, 171 aa, Homo sapien
MEEYAREPCPWRIVDDCGGAFTMGTIGGGIFQAIKGFRNSPVGVNHRLRGSLTAIKTRAPQLGGSFAVWGGLFSMIDCSMVQVRGKEDPWNSITSGALTGAILAARNGPVAMVGSAAMGGILLALIEGAGILLTRFASAQFPNGPQFAEDPSQLPSTQLPSSPFGDYRQYQ

SEQ ID NO: 269 - DNA, 3195 bp, Homo sapien
agaggcttccctggctggtgcctgagcccggcgtccctcgccccccgccctccccgcatccctctcctccctcgcgcctggccctgtggctcttcctccctccctccttccccccccccccacccctcgcccgctgcctccctcggcccagccagctgtgccggcgtttgttggctgccctgcgcccggccctccagccagccttctgccggccccgccgcgatggaggtgccccagccggagcccgcgccaggctcggctctcagtccagcaggcgtgtgcggtggcgcccagcgtccgggccacctcccgggcctcctgctgggatctcatggcctcctggggtccccggtgcgggcggccgcttcctcgccggtcaccaccctcacccagaccatgcacgacctcgccgggctcggcagccgcagccgcctgacgcacctatccctgtctcgacgggcatccgaatcctccctgtcgtctgaatcctccgaatcttctgatgcaggtctctgcatggattcccccagccctatggacccccacatggcggagcagacgtttgaacaggccatccaggcagccagccggatcattcgaaacgagcagtttgccatcagacgcttccagtctatgccggtgaggctgctgggccacagccccgtgcttcggaacatcaccaactcccaggcgcccgacggccggaggaagagcgaggcgggcagtggagctgccagcagctctggggaagacaaggagaatgtgcgcttctggaaggccggggtgggagctctccgggaagaggagggggcatgctggggtggttccctggcatgtgaggaccctcctctcccatcttggctgcaggatggatttgtcttcaagatgccatggaagcccacacatcccagctccacccatgctctggcagagtgggccagccgcagggaagcctttgcccagagacccagctcggcccccgacctgatgtgtctcagtcctgaccggaagatggaagtggaggagctcagccccctggccctaggtcgcttctctctgacccctgcagagggggatactgaggaagatgatggatttgtggacatcctagagagtgacttaaaggatgatgatgcagttcccccaggcatggagagtctcattagtgccccactggtcaagaccttggaaaaggaagaggaaaaggacctcgtcatgtacagcaagtgccagcggctcttccgctctccgtccatgccctgcagcgtgatccggcccatcctcaagaggctggagcggccccaggacagggacacgcccgtgcagaataagcggaggcggagcgtgacccctcctgaggagcagcaggaggctgaggaacctaaagcccgcgtcctccgctcaaaatcactgtgtcacgatgagatcgagaacctcctggacagtgaccaccgagagctgattggagattactctaaggccttcctcctacagacagtagacggaaagcaccaagacctcaagtacatctcaccagaaacgatggtggccctattgacgggcaagttcagcaacatcgtggataagtttgtgattgtagactgcagatacccctatgaatatgaaggcgggcacatcaagactgcggtgaacttgcccctggaacgcgacgccgagagcttcctactgaagagccccatcgcgccctgtagcctggacaagagagtcatcctcattttccactgtgaattctcatctgagcgtgggccccgcatgtgccgtttcatcagggaacgagaccgtgctgtcaacgactaccccagcctctactaccctgagatgtatatcctgaaaggcggctacaaggagttcttccctcagcacccgaacttctgtgaaccccaggactaccggcccatgaaccacgaggccttcaaggatgagctaaagaccttccgcctcaagactcgcagctgggctggggagcggagccggcgggagctctgtagccggctgcaggaccagtgaggggcctgcgccagtcctgctacctcccttgcctttcgaggcctgaagccagctgccctatgggcctgccgggctgagggcctgctggaggcctcaggtgctgtccatgggaaagatggtgtggtgtcctgcctgtctgccccagcccagattcccctgtgtcatcccatcattttccatatcctggtgccccccacccctggaagagcccagtctgttgagttagttaagttgggttaataccagcttaaaggcagtattttgtgtcctccaggagcttcttgtttccttgttagggttaacccttcatcttcctgtgtcctgaaacgctcctttgtgtgtgtgtcagctgaggctggggagagccgtggtccctgaggatgggtcagagctaaactccttcctggcctgagagtcagctctctgccctgtgtacttcccgggccagggctgcccctaatctctgtaggaaccgtggtatgtctgccatgttgcccctttctcttttcccctttcctgtcccaccatacgagcacctccagcctgaacagaagctcttactctttcctatttcagtgttacctgtgtgcttggtctgtttgactttacgcccatctcaggacacttccgtagactgtttaggttcccctgtcaaatatcagttacccactcggtcccagttttgttgccccagaaagggatgttattatccttgggggctcccagggcaagggttaaggcctgaatcatgagcctgctggaagcccagcccctactgctgtgaaccctggggcctgactgctcagaacttgctgctgtcttgttgcggatggatggaaggttggatggatgggtggatggccgtggatggccgtggatgcgcagtgccttgcatacccaaaccaggtgggagcgttttgttgagcatgacacctgcagcaggaatatatgtgtgcctatttgtgtggacaaaaatatttacacttagggtttggagctattcaagaggaaatgtcacagaagcagctaaaccaaggactgagcaccctctggattctgaatctcaagatgggggcagggctgtgcttgaaggccctgctgagtcatctgttagggccttggttcaataaagcactgagcaagttgagaaaaaaaaaaaaaaaaaaa

SEQ ID NO: 270 - protein, 601 aa, Homo sapien
MEVPQPEPAPGSALSPAGVCGGAQRPGHLPGLLLGSHGLLGSPVRAAASSPVTTLTQTMHDLAGLGSRSRLTHLSLSRRASESSLSSESSESSDAGLCMDSPSPMDPHMAEQTFEQAIQAASRIIRNEQFAIRRFQSMPVRLLGHSPVLRNITNSQAPDGRRKSEAGSGAASSSGEDKENVRFWKAGVGALREEEGACWGGSLACEDPPLPSWLQDGFVFKMPWKPTHPSSTHALAEWASRREAFAQRPSSAPDLMCLSPDRKMEVEELSPLALGRFSLTPAEGDTEEDDGFVDILESDLKDDDAVPPGMESLISAPLVKTLEKEEEKDLVMYSKCQRLFRSPSMPCSVIRPILKRLERPQDRDTPVQNKRRRSVTPPEEQQEAEEPKARVLRSKSLCHDEIENLLDSDHRELIGDYSKAFLLQTVDGKHQDLKYISPETMVALLTGKFSNIVDKFVIVDCRYPYEYEGGHIKTAVNLPLERDAESFLLKSPIAPCSLDKRVILIFHCEFSSERGPRMCRFIRERDRAVNDYPSLYYPEMYILKGGYKEFFPQHPNFCEPQDYRPMNHEAFKDELKTFRLKTRSWAGERSRRELCSRLQDQ

SEQ ID NO: 271 - DNA, 1182 bp, Homo sapien
gaattccgctagactaagttggtcatgatgcagaagctactcaaatgcagtcggcttgtcctggctcttgccctcatcctggttctggaatcctcagttcaaggttatcctacgcagagagccaggtaccaatgggtgcgctgcaatccagacagtaattctgcaaactgccttgaagaaaaaggaccaatgttcgaactacttccaggtgaatccaacaagatcccccgtctgaggactgacctttttccaaagacgagaatccaggacttgaatcgtatcttcccactttctgaggactactctggatcaggcttcggctccggctccggctctggatcaggatctgggagtggcttcctaacggaaatggaacaggattaccaactagtagacgaaagtgatgctttccatgacaaccttaggtctcttgacaggaatctgccctcagacagccaggacttgggtcaacatggattagaagaggattttatgttataaaagaggattttcccaccttgacaccaggcaatgtagttagcatattttatgtaccatggttatatgattaatcttgggacaaagaattttatagaaatttttaaacatctgaaaaagaagcttaagttttatcatccttttttttctcatgaattcttaaaggattatgctttaatgctgttatctatcttattgttcttgaaaatacctgcattttttggtatcatgttcaaccaacatcattatgaaattaattagattcccatggccataaaatggctttaaagaatatatatatatttttaaagtagcttgagaagcaaattggcaggtaatatttcatacctaaattaagactctgacttggattgtgaattataatgatatgccccttttcttataaaaacaaaaaaaaaataatgaaacacagtgaatttgtagagtgggggtatttgacatattttacagggtggagtgtactatatactattacctttgaatgtgtttgcagagctagtggatgtgtttgtctacaagtatgattgctgttacataacaccccaaattaactcccaaattaaaacacagttgtgctgtcaatacctcatactgctttacctttttttcctggatatctgtgtattttcaaatgttactatatattaaagcagaaatataacc

SEQ ID NO: 272 - protein, 158 aa, Homo sapien
MMQKLLKCSRLVLALALILVLESSVQGYPTQRARYQWVRCNPDSNSANCLEEKGPMFELLPGESNKIPRLRTDLFPKTRIQDLNRIFPLSEDYSGSGFGSGSGSGSGSGSGFLTEMEQDYQLVDESDAFHDNLRSLDRNLPSDSQDLGQHGLEEDFML

SEQ ID NO: 273 - DNA, 3568 bp, Homo sapien
ccggtcctgagacacgctgtgtggctgaaaagtgaaggcaagagctcatttggcctctgtgctcccctccgcaagggatcgtttctccagaagagctggatattctttcgcccagttatggcagacaagttaacgagaattgctattgtcaaccatgacaaatgtaaacctaagaaatgtcgacaggaatgcaaaaagagttgtcctgtagttcgaatgggaaaattatgcatagaggttacaccccagagcaaaatagcatggatttccgaaactctttgtattggttgtggtatctgtattaagaaatgcccctttggcgccttatcaattgtcaatctaccaagcaacttggaaaaagaaaccacacatcgatattgtgccaatgccttcaaacttcacaggttgcctatccctcgtccaggtgaagttttgggattagttggaactaatggtattggaaagtcagctgctttaaaaattttagcaggaaaacaaaagccaaaccttggaaagtacgatgatcctcctgactggcaggagattttgacttatttccgtggatctgaattacaaaattactttacaaagattctagaagatgacctaaaagccatcatcaaacctcaatatgtagccagattcctaaggctggcaaaggggacagtgggatctattttggaccgaaaagatgaaacaaagacacaggcaattgtatgtcagcagcttgatttaacccacctaaaagaacgaaatgttgaagatctttcaggaggagagttgcagagatttgcttgtgctgtcgtttgcatacagaaagctgatattttcatgtttgatgagccttctagttacctagatgtcaagcagcgtttaaaggctgctattactatacgatctctaataaatccagatagatatatcattgtggtggaacatgatctaagtgtattagactatctctccgacttcatctgctgtttatatggtgtaccaagcgcctatggagttgtcactatgccttttagtgtaagagaaggcataaacatttttttggatggctatgttccaacagaaaacttgagattcagagatgcatcacttgtttttaaagtggctgagacagcaaatgaagaagaagttaaaaagatgtgtatgtataaatatccaggaatgaagaaaaaaatgggagaatttgagctagcaattgtagctggagagtttacagattctgaaattatggtgatgctgggggaaaatggaacgggtaaaacgacatttatcagaatgcttgctggaagacttaaacctgatgaaggaggagaagtaccagttctaaatgtcagttataagccacagaaaattagtcccaaatcaactggaagtgttcgccagttactacatgaaaagataagagatgcttatactcacccacaatttgtgaccgatgtaatgaagcctctgcaaattgaaaacatcattgatcaagaggtgcagacattatctggtggtgaactacagcgagtacgtttacgcctttgcttgggcaaacctgctgatgtctatttaattgatgaaccatctgcatatttggattctgagcaaagactgatggcagctcgagttgtcaaacgtttcatactccatgcaaaaaagacagcctttgttgtggaacatgacttcatcatggccacctatctagcggatcgcgtcatcgtttttgatggtgttccatctaagaacacagttgcaaacagtcctcaaacccttttggctggcatgaataaatttttgtctcagcttgaaattacattcagaagagatccaaacaactataggccacgaataaacaaacttaattcaattaaggatgtagaacaaaagaagagtggaaactactttttcttggatgattagactgactctgagaatattgataagccatttattaaaaggagtatttactagaattttttgtcatataaaacttgaatcaggattttatgccccacatactctggaacttgaagtataatatacttaatataacataaaaagccagttgggttctaaattgtagttgaaacacagaaaatgccacttttctgttcctgaagaggctcttttgtgcataatattctaaaatgaagacatttcaagctatacaaattacttccaagttttcatgatgtatgggaagattttcagtaggtgtattatattcacggtaccaaatgctgaccagtgttgctccattttttaaatcttgaaaagggtttctgtacttacctggtttgccaagtatgccagtgtaatgaaactgcccttattttaaaagccagtcaaagattccactgattgacatttgataaataaacatcaggattatgtttattgtttgttttcagtctttgcactatattaccagtatatggtttccgaggaagattatctactgcaaaacaccactgttggaaaaataggtatttttaaattgtttttaatccttttttggtgcttttaaacatgtttaagcaaaaaccaattcagtccattccccgcaaaaaacccctaactttactctgaactttttttgtttttgcattccatgaggttctgtattcagtcattctctaggtaatgtcatttttgtacacatatatttatataatcactgattgagatttaggaaaaagcatttctaaagaatatttgcttcccttagaactacagactcgaaatctttaaagatggtgcctaagcatctatgtattttttttaagttccacagatttttctgttgggcaggccaaggattataaaccacttccctaaaggcaacattaatgcaaaagtccccagatggcaatacaaagtatcccctggtaccacatatattcatttgtgagtttggatatagagcacattatctaaaccattttgtagttccaaaaacccatctaaatttcttgagttcctgaattttgaacaggattacctggagcctggagccactttaagttgtacttctgactaaactggaattatgagtgaggaagagtgtttactaaataaatgactggggcaagcaaaattgaggaggaaattagaaactgtttgacaaactttaagagctacttgaaataacagaagtcttgattaatatgcaaataatggctagaaagtatggtttaactggaccctattatgccttttaaaaataatttcagtaacccataaatacatgttgtaaaaaattcaaatatacagaatggaataaaaaaatgatctccctttattaccctcccaaaggttaccagcgtttgaatttaataatgtatattctttcatgcttttttctgtgcacttacctaagtgtgaatatgtaaagggtttgttttgtatacaaatgggattatactaaaataagtaatgcctatttttaaggataggttaaatttgtgaatgatcatttcaaatatattgaataaaataagcaaaagctattgttatttactgatcctgaaaaaaaaaaaaaaaaaaaaaaaaaaaaaaaaaaaaaaaaaaa

SEQ ID NO: 274 - protein, 599 aa, Homo sapien
MADKLTRIAIVNHDKCKPKKCRQECKKSCPVVRMGKLCIEVTPQSKIAWISETLCIGCGICIKKCPFGALSIVNLPSNLEKETTHRYCANAFKLHRLPIPRPGEVLGLVGTNGIGKSAALKILAGKQKPNLGKYDDPPDWQEILTYFRGSELQNYFTKILEDDLKAIIKPQYVARFLRLAKGTVGSILDRKDETKTQAIVCQQLDLTHLKERNVEDLSGGELQRFACAVVCIQKADIFMFDEPSSYLDVKQRLKAAITIRSLINPDRYIIVVEHDLSVLDYLSDFICCLYGVPSAYGVVTMPFSVREGINIFLDGYVPTENLRFRDASLVFKVAETANEEEVKKMCMYKYPGMKKKMGEFELAIVAGEFTDSEIMVMLGENGTGKTTFIRMLAGRLKPDEGGEVPVLNVSYKPQKISPKSTGSVRQLLHEKIRDAYTHPQFVTDVMKPLQIENIIDQEVQTLSGGELQRVRLRLCLGKPADVYLIDEPSAYLDSEQRLMAARVVKRFILHAKKTAFVVEHDFIMATYLADRVIVFDGVPSKNTVANSPQTLLAGMNKFLSQLEITFRRDPNNYRPRINKLNSIKDVEQKKSGNYFFLDD

SEQ ID NO: 275 - DNA, 2475 bp, Homo sapien
ccggaggagtccgagaggaagcggaggcgcgagctggaggcggcggctcccgtcggcctccggcaggactgagcgctgggaggccggaaggcgggcgcgcacggcggagaggcgggcgggaggccggagcatattaatgaaaagtgccataaactgaaaaaccaaacatgagggtagcaggtgctgcaaagttggtggtagctgtggcagtgtttttactgacattttatgttatttctcaagtatttgaaataaaaatggatgcaagtttaggaaatctatttgcaagatcagcattggacacagctgcacgttctacaaagcctcccagatataagtgtgggatctcaaaagcttgccctgagaagcattttgcttttaaaatggcaagtggagcagccaacgtggtgggacccaaaatctgcctggaagataatgttttaatgagtggtgttaagaataatgttggaagagggatcaatgttgccttggcaaatggaaaaacaggagaagtattagacactaaatattttgacatgtggggaggagatgtggcaccatttattgagtttctgaaggccatacaagatggaacaatagttttaatgggaacatacgatgatggagcaaccaaactcaatgatgaggcacggcggctcattgctgatttggggagcacatctattactaatcttggttttagagacaactgggtcttctgtggtgggaagggcattaagacaaaaagcccttttgaacagcacataaagaacaataaggatacaaacaaatatgaaggatggcctgaagttgtagaaatggaaggatgcatcccccagaagcaagactaatggaaatgtggagagaattgaagaaagcgcactttcactcttaatgggagagctataaatggcagagctatgtgtaaatattttaagagcatgcagccatcttggtgtgtgcatgagtattgtctcttttgatatcaggattatttattgctaacgtaaatagatagcattgtaaataatcatcacaatgatcaaatcactgaaccatgtctccgcacatttccctaaaagtacaatgtttagactgctatggtaatacatattttaaattctaaaagcatacacaatgtgtaactgaatggtttgtgaaaaatatattgatatatatactagttgctatgaaaatatcatggaataatagggattttagggtggatactttattttcttttatgtttctatatgttgcgttgtgatgacattatcttttaaattaaaaagagatttggctagttgtgtgtgtaatgttactttacagtccgactctcctgatgtacctcttttcatgatctttttctttccttcccaagaaactgaggaatgtttaatatgaaaacatacatcggatatgtgaaaagcacaacaaaattcttaatgtacacagtaaaaaagtaaatatataaatgtagatggcatttaggaccacagcttgctggatttgtgttagctatgggaataacttgattttgtataagctatttagagtgaggctggaggtggcagcttcacagaactggagaaccaggccaagtcccctccccaacctaattaggtcattcaggacagctaagtcagtatatttagagcaatactagcatacgtttttcttaattgttatcagcattgaccaagtggtttggaaggaggcatgctttaatatcacaataattttgatttgtaaaccaagaaattaatcctgtgtttatctaacttcataatagcaattattgcccgaagctatagtggcatatttacaaaagttcttattactgggcggactgataacatttaaaaaataattgtgtttgaccccaaatgactttatacccaattctacataaaaatatagaagatctatctttttttgttaccttcagatgttcactaaataactcagtttttaagcagaagttttcagggcattaaatatatgttgtgtatgaagtatctcaaactggaacataaatttagtgatcaaactgccattcacagtgtaaggcagcacttaaatttcgaacctaaagtttagatgcattgtataaaaaaacctaaaagcagtatctgttatttagctgtaaaccaagttggaagctattcggataatttcttaaatattgatgaactttggagtactgtttcttccttcaaactgaatgtaattaattcatgaataaatgcaccttatatgtttaaacaatctttgtatacttttgggatttttggtgcttatatgctaaatcacattcagcatgtgtattttgacatttaaaatacttccctcaattctgtaaattaaaagaatagttattttacagttccagggattgtgaaataaatgttgcagttttttaaaataatgaaaataaatactcttggttttgctttgtgaaaaaaaaaaaaaaaa

SEQ ID NO: 276 - protein, 227 aa, Homo sapien
MRVAGAAKLVVAVAVFLLTFYVISQVFEIKMDASLGNLFARSALDTAARSTKPPRYKCGISKACPEKHFAFKMASGAANVVGPKICLEDNVLMSGVKNNVGRGINVALANGKTGEVLDTKYFDMWGGDVAPFIEFLKAIQDGTIVLMGTYDDGATKLNDEARRLIADLGSTSITNLGFRDNWVFCGGKGIKTKSPFEQHIKNNKDTNKYEGWPEVVEMEGCIPQKQD

SEQ ID NO: 277 - DNA, 1985 bp, Homo sapien
tactgactttcagcaccaacttgtggtcccaggtaagtttccacgctggtactttagccctgggctcgaacctgcggacacgctgtggctgcaactccccgcccgccagacctcagtacgcagcgcggctggtgagaaacataatgcactctgacttccacgcgtggaatggggagatggactgcacggcgggcggacctgctcgggctgatggacggcaggtggactgatgtgcgcagggactggcggcagcgcggtcagagccagtcagccaaagccaggccagcacaatagactgtcccggttcccgccaggaggcggccgagcaccaactgtacggtactgcgcctgcgccgcgaccgccaacgcgcccagtctacgcttgcgcggcgcaacagggccgactgcagctggaagatggcggcgtccgtggtctgtcgggccgctaccgccggggcacaagtgctattgcgcgcccgccgctcgccggccctgctgcggacgccagccttgcggagtacggcaaccttcgctcaggcgctccagttcgtgccggagacgcaggttagcctgctggacaacggcctgcgtgtggcctccgagcagtcctctcagcccacttgcacggtgggagtgtggattgatgttggcagccgttttgagactgagaagaataatggggcaggctactttttggagcatctggctttcaagggaacaaagaatcggcctggcagtgccctggagaaggaggtggagagcatgggggcccatcttaatgcctacagcacccgggagcacacagcttactacatcaaggcgctgtccaaggatctgccgaaagctgtggagctcctgggtgacattgtgcagaactgtagtctggaagactcacagattgagaaggaacgtgatgtgatcctgcgggagatgcaggagaatgatgcatctatgcgagatgtggtctttaactacctgcatgccacagcattccagggcacacctctagcccaggctgtggaggggcccagtgagaatgtcaggaagctgtctcgtgcagacttgaccgagtacctcagcacacattacaaggcccctcgaatggtgctggcagcagctggaggagtggagcaccagcaactgttagacctcgcccagaagcacctcggtggcatcccatggacatatgcagaggacgctgtgcccactcttactccatgccgcttcactggcagtgagatccgccaccgtgatgatgctctaccttttgcccacgtggccattgcagtagagggtcctggctgggccagcccggacagtgtggccttgcaagtggccaatgccatcatcggccactatgactgcacttatggtggtggcgtgcacctgtccagcccactggcttcaggtgctgtggccaacaagctatgccagagtttccagaccttcagcatctgctatgcagagacgggcttgctgggtgcacactttgtctgtgaccgaatgaaaatcgatgacatgatgttcgtcctgcaagggcagtggatgcgcctgtgtaccagtgccacggagagtgaggtggcccggggcaaaaacatcctcagaaatgccctggtatctcatctagatggcactactcctgtgtgtgaggacatcggacgcagcctcctgacctatggccgccgcatccccctggctgaatgggaaagccggattgcggaggtggatgccagtgtggtacgtgagatctgctccaagtacatctatgaccagtgcccagcagtggctggatatggccccattgagcagctcccagactacaaccggatccgtagcggcatgttctggctgcgcttctaggcgggaagcctatgtaagcaagagggcagggccggggtttgtggtcccccccccaccacaaacacagcacttcggctcctctaacctgtgccacaggtgaccaccaataaaatcctctgctgaga

SEQ ID NO: 278 - protein, 480 aa, Homo sapien
MAASVVCRAATAGAQVLLRARRSPALLRTPALRSTATFAQALQFVPETQVSLLDNGLRVASEQSSQPTCTVGVWIDVGSRFETEKNNGAGYFLEHLAFKGTKNRPGSALEKEVESMGAHLNAYSTREHTAYYIKALSKDLPKAVELLGDIVQNCSLEDSQIEKERDVILREMQENDASMRDVVFNYLHATAFQGTPLAQAVEGPSENVRKLSRADLTEYLSTHYKAPRMVLAAAGGVEHQQLLDLAQKHLGGIPWTYAEDAVPTLTPCRFTGSEIRHRDDALPFAHVAIAVEGPGWASPDSVALQVANAIIGHYDCTYGGGVHLSSPLASGAVANKLCQSFQTFSICYAETGLLGAHFVCDRMKIDDMMFVLQGQWMRLCTSATESEVARGKNILRNALVSHLDGTTPVCEDIGRSLLTYGRRIPLAEWESRIAEVDASVVREICSKYIYDQCPAVAGYGPIEQLPDYNRIRSGMFWLRF

SEQ ID NO: 279 - DNA, 2587 bp, Homo sapien
ggcacacacgaggaggagggttgagctgctgccgccgccgcctctgtcgtcgtcgcgagtgtggagtcgggactggagctgctgccgcggcgacgccggggatctttgtcgctagctcccggcccttctgccccgccgccttccctcagtcagcgttgcccactcctctccggccgggcgcccctgcctccatttctcgctctctgtccaccacacacacggcccccccgatcatggatccgggcagtggcggcggcggcggcggcggcggcggcggcgggagcagcagcggcagcagcagcagcgactcggcgcctgactgctgggaccaggcggacatggaagcccccgggccgggcccttgcggcggcggcggcttccctggcggcggcggccgaggcccagcgggagaacctcagcgcggccttcagccggcaactcaacgtcaacgccaagcccttcgtgcccaacgtccacgccgccgagttcgtgccgtccttcctgcggggcccggcagcgccgccacccccagctggcggcgccgccaataaccacggagccggcagcggcgcgggaggccgtgcggcacctgtggaatcctctcaagaggaacagtcattgtgtgaaggttcaaattcagctgttagcatggaactttcagaacctattgtagaaaatggagagacagaaatgtctccagaagaatcatgggagcacaaagaagaaataagtgaagcagagccagggggtggttccttgggagatggaaggccgccagaggaaagtgcccatgaaatgatggaggaggaagaggaaatcccaaaacctaagtctgtggttgcaccgccaggtgctcctaagaaagagcatgtaaatgtagtattcattgggcacgtagatgctggcaagtcaaccattggaggacaaataatgtatttgactggaatggttgacaaaaggacgcttgaaaagtatgaaagagaagctaaagagaaaaacagagaaacttggtacttgtcttgggccttagacacaaatcaggaagaacgagacaagggtaaaacagtagaagtgggtcgtgcctattttgaaaccgaaaagaagcatttcacaattctagatgcccctggccacaagagttttgtcccaaatatgattggtggtgcctctcaagctgatttggctgtgctggtaatctcagccaggaaaggagagtttgaaactggatttgaaaaaggaggacagacaagagaacatgcaatgttggcaaagacagcaggtgtaaaacacctaattgtgctaattaataagatggatgatccaacagtaaattggagcaatgagagatatgaagaatgtaaggagaaactagtgccatttttgaaaaaagttggcttcaatcccaaaaaggacattcactttatgccctgctcaggacttactggagcaaatctcaaagagcagtcggatttctgtccttggtacattggattaccgtttattccatatctggataatttgccgaacttcaatagatcagttgatggaccaatcaggctgccaattgtggataagtacaaggatatgggcactgtggtcctgggaaagctggaatcaggatctatttgtaaaggccagcagcttgtgatgatgccaaacaagcacaacgtggaagttcttggaatactttccgatgatgtagagactgataccgtagccccaggtgaaaacctcaaaatcagactgaaaggaattgaagaagaggagattcttccagggtttatactttgtgatcctaataatctttgtcattctggacgcacatttgatgcccagatagtgattatagagcacaaatccatcatctgcccaggctataatgcggtgctgcatattcatacctgtattgaggaggtggaaataacagccttaatctgcttggtagacaaaaaatcaggagaaaaaagtaagacccgaccccgttttgtgaaacaagatcaagtatgcattgctcgcttaaggacagcaggaaccatctgccttgagacctttaaagacttccctcagatgggtcgtttcaccttaagagatgagggtaagaccattgcaattggaaaagttctgaaactggttccagagaaagactaagcattttcttgatgaccctgcacaatactgtgaggaaaattgactgcagaagcctacttcacaccgccttctcttattttctgcccattgataaacctctccccatattttgcaaagaggaaattcacagcaaaagtccacattatgtcagctttctcatattgagagctctgctatgccactgttgaatttttcccaagattcctgtccctagccctcacttcaaactctgcttccttggacagatttggcaatagctttgtaagtgatgtggacataattgcctacaataatgaaaacctacaggaatttttttatttttcattttccccttaggcatatttagtatttttcccccaggccagatcattcgtgagtgtgcgagtgtgtgtgcacatgttacaaaggcaactaccatgttaataaaatattcaatttg

SEQ ID NO: 280 - protein, 499 aa, Homo sapien
MELSEPIVENGETEMSPEESWEHKEEISEAEPGGGSLGDGRPPEESAHEMMEEEEEIPKPKSVVAPPGAPKKEHVNVVFIGHVDAGKSTIGGQIMYLTGMVDKRTLEKYEREAKEKNRETWYLSWALDTNQEERDKGKTVEVGRAYFETEKKHFTILDAPGHKSFVPNMIGGASQADLAVLVISARKGEFETGFEKGGQTREHAMLAKTAGVKHLIVLINKMDDPTVNWSNERYEECKEKLVPFLKKVGFNPKKDIHFMPCSGLTGANLKEQSDFCPWYIGLPFIPYLDNLPNFNRSVDGPIRLPIVDKYKDMGTVVLGKLESGSICKGQQLVMMPNKHNVEVLGILSDDVETDTVAPGENLKIRLKGIEEEEILPGFILCDPNNLCHSGRTFDAQIVIIEHKSIICPGYNAVLHIHTCIEEVEITALICLVDKKSGEKSKTRPRFVKQDQVCIARLRTAGTICLETFKDFPQMGRFTLRDEGKTIAIGKVLKLVPEKD

SEQ ID NO: 281 - DNA, 921 bp, Homo sapien
gcggcgctcgcgccaagggacgtgtttctgcgctcgcgtggtcatggaggcgctgccgctgctagccgcgacaactccggaccacggccgccaccgaaggctgcttctgctgccgctactgctgttcctgctgccggctggagctgtgcagggctgggagacagaggagaggccccggactcgcgaagaggagtgccacttctacgcgggtggacaagtgtacccgggagaggcatcccgggtatcggtcgccgaccactccctgcacctaagcaaagcgaagatttccaagccagcgccctactgggaaggaacagctgtgatcgatggagaatttaaggagctgaagttaactgattatcgtgggaaatacttggttttcttcttctacccacttgatttcacatttgtgtgtccaactgaaattatcgcttttggcgacagacttgaagaattcagatctataaatactgaagtggtagcatgctctgttgattcacagtttacccatttggcctggattaatacccctcgaagacaaggaggacttgggccaataaggattccacttctttcagatttgacccatcagatctcaaaggactatggtgtatacctagaggactcaggccacactcttagaggtctcttcattattgatgacaaaggaatcctaagacaaattactctgaatgatcttcctgtgggtagatcagtggatgagacactacgtttggttcaagcattccagtacactgacaaacacggagaagtctgccctgctggctggaaacctggtagtgaaacaataatcccagatccagctggaaagctgaagtatttcgataaactgaattgagaaatacttcttcaagttatgatgcttgaaagttctcaataaagttcacggtttcattacca

SEQ ID NO: 282 - protein, 271 aa, Homo sapien
MEALPLLAATTPDHGRHRRLLLLPLLLFLLPAGAVQGWETEERPRTREEECHFYAGGQVYPGEASRVSVADHSLHLSKAKISKPAPYWEGTAVIDGEFKELKLTDYRGKYLVFFFYPLDFTFVCPTEIIAFGDRLEEFRSINTEVVACSVDSQFTHLAWINTPRRQGGLGPIRIPLLSDLTHQISKDYGVYLEDSGHTLRGLFIIDDKGILRQITLNDLPVGRSVDETLRLVQAFQYTDKHGEVCPAGWKPGSETIIPDPAGKLKYFDKLN

SEQ ID NO: 283 - DNA, 2917 bp, Homo sapien
ggaaaaaagcgacttgtggcggtcgagcgtggcgcaggcgaatcctcggcactaagcaaatatggacctcgcggcggcagcggagccgggcgccggcagccagcacctggaggtccgcgacgaggtggccgagaagtgccagaaactgttcctggacttcttggaggagtttcagagcagcgatggagaaattaaatacttgcaattagcagaggaactgattcgtcctgagagaaacacattggttgtgagttttgtggacctggaacaatttaaccagcaactttccaccaccattcaagaggagttctatagagtttacccttacctgtgtcgggccttgaaaacattcgtcaaagaccgtaaagagatccctcttgccaaggatttttatgttgcattccaagacctgcctaccagacacaagattcgagagctcacctcatccagaattggtttgctcactcgcatcagtgggcaggtggtgcggactcacccagttcacccagagcttgtgagcggaacttttctgtgcttggactgtcagacagtgatcagggatgtagaacagcagttcaaatacacacagccaaacatctgccgaaatccagtttgtgccaacaggaggagattcttactggatacaaataaatcaagatttgttgattttcaaaaggttcgtattcaagagacccaagctgagcttcctcgagggagtatcccccgcagtttagaagtaattttaagggctgaagctgtggaatcagctcaagctggtgacaagtgtgactttacagggacactgattgttgtgcctgacgtctccaagcttagcacaccaggagcacgtgcagaaactaattcccgtgtcagtggtgttgatggatatgagacagaaggcattcgaggactccgggcccttggtgttagggacctttcttataggctggtctttcttgcctgctgtgttgcgccaaccaacccaaggtttggggggaaagagctcagagatgaggaacagacagctgagagcattaagaaccaaatgactgtgaaagaatgggagaaagtgtttgagatgagtcaagataaaaatctataccacaatctttgtaccagcctgttccctactatacatggcaatgatgaagtaaaacggggtgtcctgctgatgctctttggtggcgttccaaagacaacaggagaagggacctctcttcgaggggacataaatgtttgcattgttggtgacccaagtacagctaagagccaatttctcaagcacgtggaggagttcagccccagagctgtctacaccagtggtaaagcgtccagtgctgctggcttaacagcagctgttgtgagagatgaagaatctcatgagtttgtcattgaggctggagctttgatgttggctgataatggtgtgtgttgtattgatgaatttgataagatggacgtgcgggatcaagttgctattcatgaagctatggaacagcagaccatatccatcactaaagcaggagtgaaggctactctgaacgcccggacgtccattttggcagcagcaaacccaatcagtggacactatgacagatcaaaatcattgaaacagaatataaatttgtcagctcccatcatgtcccgattcgatctcttctttatccttgtggatgaatgtaatgaggttacagattatgccattgccaggcgcatagtagatttgcattcaagaattgaggaatcaattgatcgtgtctattccctcgatgatatcagaagatatcttctctttgcaagacagtttaaacccaagatttccaaagagtcagaggacttcattgtggagcaatataaacatctccgccagagagatggttctggagtgaccaagtcttcatggaggattacagtgcgacagcttgagagcatgattcgtctctctgaagctatggctcggatgcactgctgtgatgaggtccaacctaaacatgtgaaggaagctttccggttactgaataaatcaatcatccgtgtggaaacacctgatgtcaatctagatcaagaggaagagatccagatggaggtagatgagggtgctggtggcatcaatggtcatgctgacagccctgctcctgtgaacgggatcaatggctacaatgaagacataaatcaagagtctgctcccaaagcctccttaaggctgggcttctctgagtactgccgaatctctaaccttattgtgcttcacctcagaaaggtggaagaagaagaggacgagtcagcattaaagaggagcgagcttgttaactggtacttgaaggaaatcgaatcagagatagactctgaagaagaacttataaataaaaaaagaatcatagagaaagttattcatcgactcacacactatgatcatgttctaattgagctcacccaggctggattgaaaggctccacagagggaagtgagagctatgaagaagatccctacttggtagttaaccctaactacttgctcgaagattgagatagtgaaagtaactgaccagagctgaggaactgtggcacagcacctcgtggcctggagcctggctggagctctgctagggacagaagtgtttctggaagtgatgcttccaggatttgttttcagaaacaagaattgagttgatggtcctatgtgtcacattcatcacaggtttcataccaacacaggcttcagcacttcctttggtgtgtttcctgtcccagtgaagttggaaccaaataatgtgtagtctctataaccaatacctttgttttcatgtgtaagaaaaggcccattacttttaaggtatgtgctgtcctattgagcaaataactttttttcaattgccagctactgcttttattcatcaaaataaaataacttgttctg

SEQ ID NO: 284 - protein, 821 aa, Homo sapien
MDLAAAAEPGAGSQHLEVRDEVAEKCQKLFLDFLEEFQSSDGEIKYLQLAEELIRPERNTLVVSFVDLEQFNQQLSTTIQEEFYRVYPYLCRALKTFVKDRKEIPLAKDFYVAFQDLPTRHKIRELTSSRIGLLTRISGQVVRTHPVHPELVSGTFLCLDCQTVIRDVEQQFKYTQPNICRNPVCANRRRFLLDTNKSRFVDFQKVRIQETQAELPRGSIPRSLEVILRAEAVESAQAGDKCDFTGTLIVVPDVSKLSTPGARAETNSRVSGVDGYETEGIRGLRALGVRDLSYRLVFLACCVAPTNPRFGGKELRDEEQTAESIKNQMTVKEWEKVFEMSQDKNLYHNLCTSLFPTIHGNDEVKRGVLLMLFGGVPKTTGEGTSLRGDINVCIVGDPSTAKSQFLKHVEEFSPRAVYTSGKASSAAGLTAAVVRDEESHEFVIEAGALMLADNGVCCIDEFDKMDVRDQVAIHEAMEQQTISITKAGVKATLNARTSILAAANPISGHYDRSKSLKQNINLSAPIMSRFDLFFILVDECNEVTDYAIARRIVDLHSRIEESIDRVYSLDDIRRYLLFARQFKPKISKESEDFIVEQYKHLRQRDGSGVTKSSWRITVRQLESMIRLSEAMARMHCCDEVQPKHVKEAFRLLNKSIIRVETPDVNLDQEEEIQMEVDEGAGGINGHADSPAPVNGINGYNEDINQESAPKASLRLGFSEYCRISNLIVLHLRKVEEEEDESALKRSELVNWYLKEIESEIDSEEELINKKRIIEKVIHRLTHYDHVLIELTQAGLKGSTEGSESYEEDPYLVVNPNYLLED

SEQ ID NO: 285 - DNA, 1627 bp, Homo sapien
gcccccaccatcaaggggaagaaagtgctcttcggattccggttcgccctggcctcccgcagccgccgcgggaccggcccccagcacacccccggggcgccgggcgcggggcagccgcccggacgcgcgcgggcctcaggcgccgccgggaccccagccccccaaactttggcaagttgcgggcgccgagcgcacccggaggcgcggggcgcggccgcaggcggagccgccccctgacgccgggccgccccctcccggccccggccgccccgccggctccgcggaaagtttgcggccgcccctgcgccgcacccggggcctgggtgagactgcggcggcggcagggcgcggacggccatatttgccggcgcggcccgagccgccgacaacaaaaagtgcgcgggcgctcggcgggcgctcggacgggcgcggggctgcagcgctaccgcccggcctcgccgccgccgccgccgccctcgcggcctggccccgccgcgcccggcgcgcccgccgcccggggggatgtcttacaaaccgaacttggccgcgcacatgcccgccgccgccctcaacgccgctgggagtgtccactcgccttccaccagcatggcaacgtcttcacagtaccgccagctgctcagtgactacgggccaccgtccctaggctacacccagggaactgggaacagccaggtgccccaaagcaaatacgcggagctgctggccatcattgaagagctggggaaggagatcagacccacgtacgcagggagcaagagtgccatggagaggctgaagcgcggcatcattcacgctagaggactggttcgggagtgcttggcagaaacggaacggaatgccagatcctagctgccttgttggttttgaaggatttccatctttttacaagatgagaagttacagttcatctcccctgttcagatgaaacccttgttttcaaaatggttacagtttcgtttttcctcccatggttcacttggctctgaacctacagtctcaaagattgagaaaagattttgcagttaattaggatttgcattttaagtagttaggaactgcccaggttttttttgttttttaagcattgatttaaaagatgcacggaaagttatcttacagcaaactgtagtttgcctccaagacaccattgtctccctttaatcttctcttttgtatacatttgttacccatggtgttctttgttccttttcataagctaataccactgtagggattttgttttgaacgcatattgacagcacgctttacttagtagccggttcccatttgccatacaatgtaggttctgcttaatgtaacttcttttttgcttaagcatttgcatgactattagtgcttcaaagtcaatttttaaaaatgcacaagttataaatacagaagaaagagcaacccaccaaacctaacaaggacccccgaacactttcatactaagactgtaagtagatctcagttctgcgtttattgtaagttgataaaaacatctggaagaaaatgactaaaactgtttgcatctttgtatgtatttattacttgatgtaataaagcttattttcattaacaatttgtattaaaaaaaaaaaaaaaa

SEQ ID NO: 286 - protein, 115 aa, Homo sapien
MSYKPNLAAHMPAAALNAAGSVHSPSTSMATSSQYRQLLSDYGPPSLGYTQGTGNSQVPQSKYAELLAIIEELGKEIRPTYAGSKSAMERLKRGIIHARGLVRECLAETERNARS

SEQ ID NO: 287 - DNA, 4180 bp, Homo sapien
gcggggaagcagcagcggccaggatgaatcccaggtgctctggagctggatggtgaaggtcggcactcttcaccctcccgagccctgcccgtctcggccccatgcccccaccagtcagccccgggccacaggcagtgagcaggcacctgggagccgaggccctgtgaccaggccaaggagacgggcgctccagggtcccagccacctgtcccccccatggagctgaggccctggttgctatgggtggtagcagcaacaggaaccttggtcctgctagcagctgatgctcagggccagaaggtcttcaccaacacgtgggctgtgcgcatccctggaggcccagcggtggccaacagtgtggcacggaagcatgggttcctcaacctgggccagatcttcggggactattaccacttctggcatcgaggagtgacgaagcggtccctgtcgcctcaccgcccgcggcacagccggctgcagagggagcctcaagtacagtggctggaacagcaggtggcaaagcgacggactaaacgggacgtgtaccaggagcccacagaccccaagtttcctcagcagtggtacctgtctggtgtcactcagcgggacctgaatgtgaaggcggcctgggcgcagggctacacagggcacggcattgtggtctccattctggacgatggcatcgagaagaaccacccggacttggcaggcaattatgatcctggggccagttttgatgtcaatgaccaggaccctgacccccagcctcggtacacacagatgaatgacaacaggcacggcacacggtgtgcgggggaagtggctgcggtggccaacaacggtgtctgtggtgtaggtgtggcctacaacgcccgcattggaggggtgcgcatgctggatggcgaggtgacagatgcagtggaggcacgctcgctgggcctgaaccccaaccacatccacatctacagtgccagctggggccccgaggatgacggcaagacagtggatgggccagcccgcctcgccgaggaggccttcttccgtggggttagccagggccgaggggggctgggctccatctttgtctgggcctcggggaacgggggccgggaacatgacagctgcaactgcgacggctacaccaacagtatctacacgctgtccatcagcagcgccacgcagtttggcaacgtgccgtggtacagcgaggcctgctcgtccacactggccacgacctacagcagtggcaaccagaatgagaagcagatcgtgacgactgacttgcggcagaagtgcacggagtctcacacgggcacctcagcctctgcccccttagcagccggcatcattgctctcaccctggaggccaataagaacctcacatggcgggacatgcaacacctggtggtacagacctcgaagccagcccacctcaatgccaacgactgggccaccaatggtgtgggccggaaagtgagccactcatatggctacgggcttttggacgcaggcgccatggtggccctggcccagaattggaccacagtggccccccagcggaagtgcatcatcgacatcctcaccgagcccaaagacatcgggaaacggctcgaggtgcggaagaccgtgaccgcgtgcctgggcgagcccaaccacatcactcggctggagcacgctcaggcgcggctcaccctgtcctataatcgccgtggcgacctggccatccacctggtcagccccatgggcacccgctccaccctgctggcagccaggccacatgactactccgcagatgggtttaatgactgggccttcatgacaactcattcctgggatgaggatccctctggcgagtgggtcctagagattgaaaacaccagcgaagccaacaactatgggacgctgaccaagttcaccctcgtactctatggcaccgcccctgaggggctgcccgtacctccagaaagcagtggctgcaagaccctcacgtccagtcaggcctgtgtggtgtgcgaggaaggcttctccctgcaccagaagagctgtgtccagcactgccctccagggttcgccccccaagtcctcgatacgcactatagcaccgagaatgacgtggagaccatccgggccagcgtctgcgccccctgccacgcctcatgtgccacatgccaggggccggccctgacagactgcctcagctgccccagccacgcctccttggaccctgtggagcagacttgctcccggcaaagccagagcagccgagagtccccgccacagcagcagccacctcggctgcccccggaggtggaggcggggcaacggctgcgggcagggctgctgccctcacacctgcctgaggtggtggccggcctcagctgcgccttcatcgtgctggtcttcgtcactgtcttcctggtcctgcagctgcgctctggctttagttttcggggggtgaaggtgtacaccatggaccgtggcctcatctcctacaaggggctgccccctgaagcctggcaggaggagtgcccgtctgactcagaagaggacgagggccggggcgagaggaccgcctttatcaaagaccagagcgccctctgatgagcccactgcccaccccctcaagccaatcccctccttgggcactttttaattcaccaaagtatttttttatcttgggactgggtttggaccccagctgggaggcaagaggggtggagactgcttcccatcctaccctcgggcccacctggccacctgaggtgggcccaggaccagctggggcgtggggagggccgtaccccaccctcagcaccccttccatgtggagaaaggagtgaaacctttagggcagcttgccccggccccggccccagccagagttcctgcggagtgaagaggggcagcccttgcttgttgggattcctgacccaggccgcagctcttgcccttccctgtccctctaaagcaataatggtcccatccaggcagtcgggggctggcctaggagatatctgagggaggaggccacctctccaagggcttctgcaccctccaccctgtcccccagctctggtgagtcttggcggcagcagccatcataggaagggaccaaggcaaggcaggtgcctccaggtgtgcacgtggcatgtggcctgtggcctgtgtcccatgacccacccctgtgctccgtgcctccaccaccactggccaccaggctggcgcagccaaggccgaagctctggctgaaccctgtgctggtgtcctgaccaccctcccctctcttgcacccgcctctcccgtcagggcccaagtccctgttttctgagcccgggctgcctgggctgttggcactcacagacctggagcccctgggtgggtggtggggaggggcgctggcccagccggcctctctggcctcccacccgatgctgctttcccctgtggggatctcaggggctgtttgaggatatattttcactttgtgattatttcactttagatgctgatgatttgtttttgtatttttaatgggggtagcagctggactacccacgttctcacacccaccgtccgccctgctcctccctggctgccctggccctgaggtgtgggggctgcagcatgttgctgaggagtgaggaatagttgagccccaagtcctgaagaggcgggccagccaggcgggctcaaggaaagggggtcccagtgggaggggcaggctgacatctgtgtttcaagtggggctcgccatgccgggggttcataggtcactggctctccaagtgccagaggtgggcaggtggtggcactgagcccccccaacactgtgccctggtggagaaagcactgacctgtcatgcccccctcaaacctcctcttctgacgtgccttttgcacccctcccattaggacaatcagtcccctcccatctgggagtccccttttcttttctaccctagccattcctggtacccagccatctgcccaggggtgccccctcctctcccatccccctgccctcgtggccagcccggctggttttgtaagatgctgggttggtgcacagtgatttttttcttgtaatttaaacaggcccagcattgctggttctatttaatggacatgagataatgttagaggttttaaagtgattaaacgtgcagactatgcaaaccag

SEQ ID NO: 288 - protein, 794 aa, Homo sapien
MELRPWLLWVVAATGTLVLLAADAQGQKVFTNTWAVRIPGGPAVANSVARKHGFLNLGQIFGDYYHFWHRGVTKRSLSPHRPRHSRLQREPQVQWLEQQVAKRRTKRDVYQEPTDPKFPQQWYLSGVTQRDLNVKAAWAQGYTGHGIVVSILDDGIEKNHPDLAGNYDPGASFDVNDQDPDPQPRYTQMNDNRHGTRCAGEVAAVANNGVCGVGVAYNARIGGVRMLDGEVTDAVEARSLGLNPNHIHIYSASWGPEDDGKTVDGPARLAEEAFFRGVSQGRGGLGSIFVWASGNGGREHDSCNCDGYTNSIYTLSISSATQFGNVPWYSEACSSTLATTYSSGNQNEKQIVTTDLRQKCTESHTGTSASAPLAAGIIALTLEANKNLTWRDMQHLVVQTSKPAHLNANDWATNGVGRKVSHSYGYGLLDAGAMVALAQNWTTVAPQRKCIIDILTEPKDIGKRLEVRKTVTACLGEPNHITRLEHAQARLTLSYNRRGDLAIHLVSPMGTRSTLLAARPHDYSADGFNDWAFMTTHSWDEDPSGEWVLEIENTSEANNYGTLTKFTLVLYGTAPEGLPVPPESSGCKTLTSSQACVVCEEGFSLHQKSCVQHCPPGFAPQVLDTHYSTENDVETIRASVCAPCHASCATCQGPALTDCLSCPSHASLDPVEQTCSRQSQSSRESPPQQQPPRLPPEVEAGQRLRAGLLPSHLPEVVAGLSCAFIVLVFVTVFLVLQLRSGFSFRGVKVYTMDRGLISYKGLPPEAWQEECPSDSEEDEGRGERTAFIKDQSAL

SEQ ID NO: 289 - DNA, 1935 bp, Homo sapien
ctggtcccgagcacgagctgtgaggggattcacttgtgtgcggaactcctcggaaccatggcgtccctttcccttgcacctgttaacatctttaaggcaggagctgatgaagagagagcagagacagctcgtctgacttcttttattggtgccatcgccattggagacttggtaaagagcaccttgggacccaaaggcatggacaaaattcttctaagcagtggacgagatgcctctcttatggtaaccaatgatggtgccactattctaaaaaacattggtgttgacaatccagcagctaaagttttagttgatatgtcaagggttcaagatgatgaagttggtgatggcactacctctgttaccgttttagcagcagaattattaagggaagcagaatctttaattgcaaaaaagattcatccacagaccatcatagcgggttggagagaagccacgaaggctgcaagagaggcgctgttgagttctgcagttgatcatggttccgatgaagttaaattccgtcaagatttaatgaatattgcgggcacaacattatcctcaaaacttcttactcatcacaaagaccactttacaaagttagctgtagaagcagttctcagactgaaaggctctggcaacctggaggcaattcatattatcaagaagctaggaggaagtttggcagattcctatttagatgaaggcttcctgttggataaaaaaattggagtaaatcaaccaaaacgaattgaaaatgctaaaattcttattgcaaatactggtatggatacagacaaaataaagatatttggttcccgggtaagagttgactctacagcaaaggttgcagaaatagaacatgcggaaaaggaaaaaatgaaggagaaagttgaacgtattcttaagcatggaataaattgctttattaacaggcaattaatttataattatcctgaacagctctttggtgctgctggtgtcatggctattgagcatgcagattttgcaggtgtggaacgcctagctcttgtcacaggtggtgaaattgcctctacctttgatcacccagaactggtgaagcttggaagttgcaaacttatcgaggaagtcatgattggagaagacaaactcattcacttttctggggttgcccttggtgaggcttgtaccattgttttgcgtggtgccactcaacaaattttagatgaagcagaaagatcattgcatgatgctctttgtgttcttgcgcaaactgtaaaggactctagaacagtttatggaggaggctgttctgagatgttgatggctcatgctgtgacacagcttgccaatagaacaccaggcaaagaagctgttgcaatggagtcttatgctaaagcactgagaatgttgccaaccatcatagctgacaatgcaggctatgacagtgcagacctggtggcacagctcagggctgctcacagtgaaggcaataccactgctggattggatatgagggaaggcaccattggagatatggctatcctgggtataacagaaagttttcaagtgaagcgacaggttcttctgagtgcagctgaagcagcagaggtgattctgcgtgtggacaacatcatcaaagcggcacccaggaaacgtgtccctgatcaccacccctgttaagcattcccacgtgctgtcgatctttggaccagtttctagcaaagttgtgtttgaaagatactctattaaagaagactgtggaatctgtttatcggtgcccattatatccttaagtttggatatttagctgaccttcgctttaacataggtctaatttatttgccgtgtcattttccatacaaatcagttgatttaaaggagttcatttcgcatactgggcattaaaataaaaatttgaacaatgaaaggaaaaaaaggagaaaaaaaaaa

SEQ ID NO: 290 - protein, 535 aa, Homo sapien
MASLSLAPVNIFKAGADEERAETARLTSFIGAIAIGDLVKSTLGPKGMDKILLSSGRDASLMVTNDGATILKNIGVDNPAAKVLVDMSRVQDDEVGDGTTSVTVLAAELLREAESLIAKKIHPQTIIAGWREATKAAREALLSSAVDHGSDEVKFRQDLMNIAGTTLSSKLLTHHKDHFTKLAVEAVLRLKGSGNLEAIHIIKKLGGSLADSYLDEGFLLDKKIGVNQPKRIENAKILIANTGMDTDKIKIFGSRVRVDSTAKVAEIEHAEKEKMKEKVERILKHGINCFINRQLIYNYPEQLFGAAGVMAIEHADFAGVERLALVTGGEIASTFDHPELVKLGSCKLIEEVMIGEDKLIHFSGVALGEACTIVLRGATQQILDEAERSLHDALCVLAQTVKDSRTVYGGGCSEMLMAHAVTQLANRTPGKEAVAMESYAKALRMLPTIIADNAGYDSADLVAQLRAAHSEGNTTAGLDMREGTIGDMAILGITESFQVKRQVLLSAAEAAEVILRVDNIIKAAPRKRVPDHHPC

SEQ ID NO: 291 - DNA, 2561 bp, Homo sapien
gcctgagtgagtctctggcgtcccaaattgcctgtttttctcgcaggctctattccgttcgctggttcgccacctcaggggaacgatggccatggagtccacagccactgccgccgtcgccgcggacgtggtttctgccgacaaaattgaagatgtccctgctccttctacatctgcagataaagtggagagtctggatgtggatagtgaagctaagaaactattgggtttaggacagaaacatctggtgatgggggatattccagcagctgtcaatgcattccaggaagcagctagtcttttaggtaagaagtatggagagacagctaatgagtgtggagaagccttctttttctatgggaaatcacttctggagttggcaagaatggagaatggtgtgttgggaaacgccttggaaggtgtgcatgtggaagaggaagaaggagaaaaaacagaagatgaatctctggtagaaaataatgataacatagatgaggaagcaagggaagagttgagagaacaggtttatgacgccatgggagaaaaagaagaagccaaaaaaacagaagacaagtctttggcaaagcctgaaactgataaagaacaggacagtgaaatggagaagggtggaagagaagatatggatataagtaaatctgcagaggagccacaggaaaaagttgacttgactctagattggttaactgaaacctctgaagaggcaaaaggaggagcagcaccagaaggaccgaatgaagctgaggtcacttctgggaagccagaacaggaagtaccagatgctgaggaagaaaaatcagtttctggaactgatgtccaagaagagtgcagagaaaaaggaggtcaggagaagcagggagaggtaattgtgagcatagaggagaagccaaaagaagtttcagaagagcagcctgtggtgactctagaaaagcagggcactgcagtggaggtagaagcagagtctttagacccgacagtcaagccagtggatgtgggtggggacgagccagaggagaaggtagttacctctgaaaacgaggcaggaaaggcggttcttgaacaactggtaggtcaagaagtaccacctgctgaagagtcaccagaggtgcaaacagaggctgcagaggcctcagctgtagaggctggatcagaagtctctgaaaagcctgggcaggaggctccagttctccctaaggatggtgcagtcaatggaccgtcagttgtaggagatcagactcctattgaaccacagacttctatagaaagactgacagaaacaaaagatggctcaggactagaggagaaggtcagggcaaagctggttcctagtcaggaggagactaagctgtctgtagaagagtctgaggcagctggagatggggttgataccaaggtagcccagggagctactgagaaatcacctgaagacaaagttcagatagctgctaatgaagagacacaagagagagaagaacagatgaaagagggtgaagaaactgaaggctcggaagaggatgataaagaaaatgataagactgaagaaatgccaaatgattcagtccttgaaaacaagtctcttcaagaaaatgaggaggaggagattgggaacctagagcttgcctgggatatgctggatttagcaaagatcatttttaaaaggcaagaaacaaaagaagcacagctttatgctgcccaggcacatcttaaactcggagaagttagtgttgaatctgaaaactatgtgcaagctgtggaggagttccagtcctgccttaacctgcaggaacagtacctggaagcccacgaccgtctgcttgcagagacccactaccagctgggcttggcttatgggtacaactctcagtatgatgaggcagtggcacagttcagcaaatctattgaagtcattgagaacagaatggctgtactaaacgagcaggtgaaggaggctgaaggatcgtctgaatacaagaaagaaattgaggaactaaaggaactgctacccgaaattagagagaagatagaagatgcaaaggagtctcagcgtagtgggaatgtagctgaactggctctgaaagctactctggtggagagttctacttcaggtttcactcctggtggaggaggctcttcagtctccatgattgccagtagaaagccaacagacggtgcttcctcatcaaattgtgtgactgatatttcccaccttgtcagaaagaagaggaaaccagaggaagagagtccccggaaagatgatgcaaagaaagccaaacaagagccggaggtgaacggaggcagtggggatgctgtcccgagtggaaatgaagtttcggaaaacatggaggaggaggctgagaatcagctgaaacgcggagcagcagtggaggggacactggaggctggagctacagttgaaagcactgcatgttaagagggggcacagcctcctcccaagggaaagtgtttttgtatataatgtattttttcacttttggaggattctttttgtataacttcaataaagattgtaagcaaaaaaaaaa

SEQ ID NO: 292 - protein, 787 aa, Homo sapien [sequence omitted]

SEQ ID NO: 293 - DNA, 2628 bp, Homo sapien
aagcgatggctgggcccgcgtggatctccaaggtctctcggctgctgggggcattccacaacccaaaacaggtgaccagaggttttactggtggtgttcagacagtaactttaattccaggagatggtattggcccagaaatttcagctgcagttatgaagatttttgatgctgccaaagcacctattcagtgggaggagcggaacgtcactgccattcaaggacctggaggaaagtggatgatcccttcagaggctaaagagtccatggataagaacaagatgggcttgaaaggccctttgaagaccccaatagcagccggtcacccatctatgaatttactgctgcgcaaaacatttgacctttacgcgaatgtccgaccatgtgtctctatcgaaggctataaaaccccttacaccgatgtaaatattgtgaccattcgagagaacacagaaggagaatacagtggaattgagcatgtgattgttgatggagtcgtgcagagtatcaagctcatcaccgagggggcgagcaagcgcattgctgagtttgcctttgagtatgcccggaacaaccaccggagcaacgtcacggcggtgcacaaagccaacatcatgcggatgtcagatgggctttttctacaaaaatgcagggaagttgcagaaagctgtaaagatattaaatttaatgagatgtaccttgatacagtatgtttgaatatggtacaagatccttcccaatttgatgttcttgttatgccaaatttgtatggagacatccttagtgacttgtgtgcaggattgatcggaggtctcggtgtgacaccaagtggcaacattggagccaatggggttgcaatttttgagtcggttcatgggacggctccagacattgcaggcaaggacatggcgaatcccacagccctcctgctcagtgccgtgatgatgctgcgccacatgggactttttgaccatgctgcaagaattgaggctgcgtgttttgctacaattaaggacggaaagagcttgacaaaagatttgggaggcaatgcaaaatgctcagacttcacagaggaaatctgtcgccgagtaaaagatttagattaacacttctacaactggcatttacatcagtcactctaaatggacaccacatgaacctctgtttagaatacctacgtatgtatgcattggtttgcttgtttcttgacagtacatttttagatctggccttttcttaacaaaatctgtgcaaaagatgcaggtggatgtccctaggtctgttttcaaagaactttttccaagtgcttgttttatttattaagtgtctacctggtaaatgttttttttgtaaactctgagtggactgtatcatttgctattctaaaccattttacacttaagttaaaatagtttctcttcagctgtaaataacaggatacagaattaacaagagaaaatgtctaactttttaagaaaaaccttattttcttcggtttttgaaaaacataatggaaataaaacaggatattgacataatagcacaaaatgacactcttctaaaactaaatgggcacaagagaattttcctgggaaagttcacatcaaaaagagtgaatgtggtatatttctaaatgatatggaaaatagagacagatttgtcctttacagaaattactgagtgtgaataaaaacttcagatccaagaaatatataatgagagatataatttttgttaataagacaaaggtaatatattggatacaaagacacaaatgtattgtgtgttcaattattttgttgtcttgagatttaatattctttccaagagcttttaatgaagcagagagctagtacttcattttcactggatacattttcagcatcatgagttgtcacagcctctgagcccctgatctgaagccagaagggctgagtgtattgtaaacttattcttgcatgttgctgtctgggaatggaccacactacagcaggtagttctgggggcgatactgccgaaaggcccgaacacatgtattttggctgcaattgaggaacttgggatgctattaattttgtatttcagcaactgccccttctcctatcccaaagcaccaattactgccctctgcctcagcagtaccagtataagatgacattccaaagactggaggcaactcagcctgagttaattcacaaaattatgccatgctggggcttgagcttgagcttgggcttaggcttgggctcagcttttgaccctcaggcatctccttttccttcctgtcttcctctcccttctcctctgctgcagcatgattttcttaatcttcagacactcactattttcatgaacagttaccctctgtccccacaaccaaagacaactcatggcctcctttggcccttgtgtaacattgcaaacctgtggctttgcaaaatgtacccaggtcacaaggggatttttttttttttagcaatgatatccctgtctgggtcactttttaagcttgtaaccgcccccccagacttataatcttaaatgtattttcctttgtttaagctgctgcttcctctgtttcattggattgtgccagttatcagtggctcttgggttcaaagtaataaa

SEQ ID NO: 294 - protein, 366 aa, Homo sapien
MAGPAWISKVSRLLGAFHNPKQVTRGFTGGVQTVTLIPGDGIGPEISAAVMKIFDAAKAPIQWEERNVTAIQGPGGKWMIPSEAKESMDKNKMGLKGPLKTPIAAGHPSMNLLLRKTFDLYANVRPCVSIEGYKTPYTDVNIVTIRENTEGEYSGIEHVIVDGVVQSIKLITEGASKRIAEFAFEYARNNHRSNVTAVHKANIMRMSDGLFLQKCREVAESCKDIKFNEMYLDTVCLNMVQDPSQFDVLVMPNLYGDILSDLCAGLIGGLGVTPSGNIGANGVAIFESVHGTAPDIAGKDMANPTALLLSAVMMLRHMGLFDHAARIEAACFATIKDGKSLTKDLGGNAKCSDFTEEICRRVKDLD

SEQ ID NO: 295 - DNA, 2613 bp, Homo sapien
gcgcgccttctccagtccgcggtgccatggcccccgcccgtctgttcgcgctgctgctgctcttcgtaggcggagtcgccgagtcgatccgagagactgaggtcatcgacccccaggacctcctagaaggccgatacttctccggagccctaccagacgatgaggatgtagtggggcccgggcaggaatctgatgactttgagctgtctggctctggagatctggatgacttggaagactccatgatcggccctgaagttgtccatcccttggtgcctctagataaccatatccctgagagggcagggtctgggagccaagtccccaccgaacccaagaaactagaggagaatgaggttatccccaagagaatctcacccgttgaagagagtgaggatgtgtccaacaaggtgtcaatgtccagcactgtgcagggcagcaacatctttgagagaacggaggtcctggcagctctgattgtgggtggcatcgtgggcatcctctttgccgtcttcctgatcctactgctcatgtaccgtatgaagaagaaggatgaaggcagctatgacctgggcaagaaacccatctacaagaaagcccccaccaatgagttctacgcgtgaagcttgcttgtgggcactggcttggactttagcggggagggaagccaggggattttgaagggtggacattagggtagggtgaggtcaacctaatactgacttgtcagtatctccagctctgattacctttgaagtgttcagaagagacattgtcttctactgttctgccaggttcttcttgagctttgggcctcagttgccctggcagaaaaatggattcaacttggcctttctgaaggcaagactgggattggatcacttcttaaacttccagttaagaatctaggtccgccctcaagcccatactgaccatgcctcatccagagctcctctgaagccagggggctaacggatgttgtgtggagtcctggctggaggtcctcccccagtggccttcctcccttcctttcacagccggtctctctgccaggaaatgggggaaggaactagaaccacctgcaccttgagatgtttctgtaaatgggtacttgtgatcacactacgggaatctctgtggtatatacctggggccattctaggctctttcaagtgacttttggaaatcaaccttttttatttgggggggaggatggggaaaagagctgagagtttatgctgaaatggatttatagaatatttgtaaatctatttttagtgtttgttcgtttttttaactgttcattcctttgtgcagagtgtatatctctgcctgggcaagagtgtggaggtgccgaggtgtcttcattctctcgcacatttccacagcacctgctaagtttgtatttaatggtttttgtttttgtttttgtttgtttcttgaaaatgagagaagagccggagagatgatttttattaattttttttttttttttttttttactatttatagctttagatagggcctcccttcccctcttctttctttgttctctttcattaaaccccttccccagttttttttttatactttaaaccccgctcctcatggccttggccctttctgaagctgcttcctcttataaaatagcttttgccgaaacatagtttttttttagcagatcccaaaatataatgaaggggatggtgggatatttgtgtctgtgttcttataatatattattattcttccttggttctagaaaaatagataaatatatttttttcaggaaatagtgtggtgtttccagtttgatgttgctgggtggttgagtgagtgaattttcatgtggctgggtgggtttttgcctttttctcttgccctgttcctggtgccttctgatggggctggaatagttgaggtggatggttctaccctttctgccttctgtttgggacccagctggtgttctttggtttgctttcttcaggctctagggctgtgctatccaatacagtaaccacatgcggctgtttaaagttaagccaattaaaatcacataagattaaaaattccttcctcagttgcactaaccacgtttctagaggcgtcactgtatgtagttcatggctactgtactgacagcgagagcatgtccatctgttggacagcactattctagagaactaaactggcttaacgagtcacagcctcagctgtgctgggacgacccttgtctccctgggtaggggggggggaatgggggagggctgatgaggccccagctggggcctgttgtctgggaccctccctctcctgagaggggaggcctggtggcttagcctgggcaggtcgtgtctcctcctgaccccagtggctgcggtgaggggaaccaccctcccttgctgcaccagtggccattagctcccgtcaccactgcaacccagggtcccagctggctgggtcctcttctgcccccagtgcccttccccttgggctgtgttggagtgagcacctcctctgtaggcacctctcacactgttgtctgttactgattttttttgataaaaagataataaaacctggtactttctaaaaaaaaaaaaaaaaaaa

SEQ ID NO: 296 - protein, 198 aa, Homo sapien
MAPARLFALLLLFVGGVAESIRETEVIDPQDLLEGRYFSGALPDDEDVVGPGQESDDFELSGSGDLDDLEDSMIGPEVVHPLVPLDNHIPERAGSGSQVPTEPKKLEENEVIPKRISPVEESEDVSNKVSMSSTVQGSNIFERTEVLAALIVGGIVGILFAVFLILLLMYRMKKKDEGSYDLGKKPIYKKAPTNEFYA

SEQ ID NO: 297 - DNA, 2093 bp, Homo sapien
cactgcgcttgcgcgggttgagggcggtggctcagtctcctggaaaggaccgtccacccctccgcgctggcggtgtggacgcggaactcagcggagaaacgcgattgagaaatggaaaagaaaatgaaataaatcagcagttatgaggcagagcctaagagaactatggcaacatcaggtgactgtcccagaagtgaatcgcagggagaagagcctgctgagtgcagtgaggcgggtctcctgcaggagggagtacagccagaggagtttgtggccatcgcggactacgctgccaccgatgagacccagctcagttttttgagaggagaaaaaattcttatcctgagacaaaccactgcagattggtggtggggtgagcgtgcgggctgctgtgggtacattccggcaaaccatgtggggaagcacgtggatgagtacgaccccgaggacacgtggcaggatgaagagtacttcggcagctatggaactctgaaactccacttggagatgttggcagaccagccacgaacaactaaataccacagtgtcatcctgcagaataaagaatccctgacggataaagtcatcctggacgtgggctgtgggactgggatcatcagtctcttctgtgcacactatgcgcggcctagagcggtgtacgcggtggaggccagtgagatggcacagcacacggggcagctggtcctgcagaacggctttgctgacatcatcaccgtgtaccagcagaaggtggaggatgtggtgctgcccgagaaggtggacgtgctggtgtctgagtggatggggacctgcctgctgtttgagttcatgatcgagtccatcctgtatgcccgggatgcctggctgaaggaggacggggtcatttggcccaccatggctgcgttgcaccttgtgccctgcagtgctgataggattatcgtagccaaggtgctcttctgggacaacgcgtacgagttcaacctcagcgctctgaaatctttagcagttaaggagtttttttcaaagcccaagtataaccacattttgaaaccagaagactgtctctctgaaccgtgcactatattgcagttggacatgagaaccgtgcaaatttctgatctagagaccctgaggggcgagctgcgcttcgacatcaggaaggcggggaccctgcacggcttcacggcctggtttagcgtccacttccagagcctgcaggaggggcagccgccgcaggtgctcagcacggggcccttccaccccaccacacactggaagcagacgctgttcatgatggacgacccagtccctgtccatacaggagacgtggtcacgggttcagttgtgttgcagagaaacccagtgtggagaaggcacatgtctgtggctctgagctgggctgtcacttccagacaagaccccacatctcaaaaagttggagaaaaagtcttccccatctggagatgacagttgatgctttatttggaaagcagtgtgcatatcttgaggggtgatgaacacaagcaaaccaagttgcacctggcttctgcacactcctgcgaaagtcggtgaacattcactccacattgacccctccctagcctggcaggtgacgtcagggtccttcacagacaaacacgcttgggctcggcaggagctgccgtggccacccccgctgcccagtgtctgccctctagaagtaggctgtgtttccaggtgttcacccgtggtgcccacagtgccgacccgtggctgggtcggagctccatgttcctaagctaggtctaggtctacactcctaggacgcacgcatatcagcccgtgtaccctgtgacagtgactgtccccacctcctgtgttagtggtgcccttactgccgtcgctcatccactcgtgtgggacgtaggattgcacagggctgtgccagtggcgtgtagggaacactgccctggctcagcgtgcgagctaaggtggcgatgtatgcgatgggactctgcatgggatagtacagttgtgtagacgtcttccaaataaattatgtgttggtgccatcgcacatgctcaataaatattttaaatgagtgaaaaaaaaa

SEQ ID NO: 298 - protein, 433 aa, Homo sapien
MATSGDCPRSESQGEEPAECSEAGLLQEGVQPEEFVAIADYAATDETQLSFLRGEKILILRQTTADWWWGERAGCCGYIPANHVGKHVDEYDPEDTWQDEEYFGSYGTLKLHLEMLADQPRTTKYHSVILQNKESLTDKVILDVGCGTGIISLFCAHYARPRAVYAVEASEMAQHTGQLVLQNGFADIITVYQQKVEDVVLPEKVDVLVSEWMGTCLLFEFMIESILYARDAWLKEDGVIWPTMAALHLVPCSADRIIVAKVLFWDNAYEFNLSALKSLAVKEFFSKPKYNHILKPEDCLSEPCTILQLDMRTVQISDLETLRGELRFDIRKAGTLHGFTAWFSVHFQSLQEGQPPQVLSTGPFHPTTHWKQTLFMMDDPVPVHTGDVVTGSVVLQRNPVWRRHMSVALSWAVTSRQDPTSQKVGEKVFPIWR

SEQ ID NO: 299 - DNA, 3379 bp, Homo sapien
aattccgcggaatcatcggaatccttcaccatggcatccagcccggcccagcgtcggcgaggcaatgatcctctcacctccagccctggccgaagctcccggcgtactgatgccctcacctccagccctggccgtgaccttccaccatttgaggatgagtccgaggggctcctaggcacagaggggcccctggaggaagaagaggatggagaggagctcattggagatggcatggaaagggactaccgcgccatcccagagctggacgcctatgaggccgagggactggctctggatgatgaggacgtagaggagctgacggccagtcgaagggaggcagcagacgggccatgcggcacggtgaccgggagctggccggggctgggcgcatgcgccgtgggctcctgtatgacagcgatgaggaggacgaggagcgccctgcccgcaagcgccgccagtggagccggcacggaggacggcgaggaggacgagcagatgattgagagcatcgagaacctggaggatctcaaaggccactctgtgcgcgagtgggtgagcatggcgggcccccggctggagatccaccaccgcttcaagaacttcctgcgcactcacgtcgacagccacggccacaacgtcttcaaggagcgcatcagcgacatgtgcaaagagaaccgtgagagcctggtggtgaactatgaggacttggcagccagggagcacgtgctggcctacttcctgcctgaggcaccggcggagctgctgcagatctttgatgaggctgccctggaggtggtactggccatgtaccccaagtacgaccgcatcaccaaccacatccatgtccgcatctcccacctgcctctggtggaggagctgcgctcgctgaggcagctgcatctgaaccagctgatccgcaccagtggggtggtgaccagctgcactggcgtcctgccccagctcagcatggtcaagtacaactgcaacaagtgcaatttcgtcctgggtcctttctgccagtcccagaaccaggaggtgaaaccaggctcctgtcctgagtgccagtcggccggcccctttgaggtcaacatggaggagaccatctatcagaactaccagcgtatccgaatccaggagagtccaggcaaagtggcggctcggcggctgccccgctccaaggacgccattctcctcgcagatctggtggacagctgcaacgcaggagacgagatagagctgactggcatctatcacaacaactatgatggctccctcaacactgccaatggcttccctgtctttgccactgtcatcctagccaaccacgtggccaagaaggacaacaaggttgctgtaggggaactgaccgatgaagatgtgaagatgatcactagcctctccaaggatcagcagatcggagagaagatctttgccagcattgctccttccatctatggtcatgaagacatcaagagaggccctgctctggccctgttcggaggggagcccaaaaacccaggtggcaagcacaaggtacgtggtgatatcaacgtgctcttgtgcggagaccctggcacagcgaagtcgcagtttctcaagtatattgagaaagtgtccagccgagccatcttcaccactggccagggggcgtcggctgtggccgtcacggcgtatgtccagcggcaccctgtcagcagggagtggaccttggaggctggggccctggttctggctgaccgaggagtgtgtctcattgatgaatttgacaagatgaatgaccaggacagaaccagcatccatgaggccatggagcaacagagcatctccatctcgaaggctggcatcgtcacctccctgcaggctcgctgcacggtcattgctgccgccaaccccataggagggcgctacgacccctcgctgactttctctgagaacgtggacctcacagagcccatcatctcacgctttgacatcctgtgtgtggtgagggacaccgtggacccagtccaggacgagatgctggcccgcttcgtggtgggcagccacgtcagacaccaccccagcaacaaggaggaggaggggctggccaatggcagcgctgctgagcccgccatgcccaacacgtatggcgtggagcccctgccccaggaggtcctgaagaagtacatcatctacgccaaggagagggtccacccgaagctcaaccagatggaccaggacaaggtggccaagatgtacagtgacctgaggaaagaatctatggcgacaggcagcatccccattacggtgcggcacatcgagtccatgagtcatggcggaggcccacgcgcgcatccatctgcgggactatgtgatcgaagacgacgtcaacatggccatccgcgtgatgctggagagcttcatagacacacagaagttcagcgtcatcgcagcatgcgcaagacttttgcccgctacctttcattccggcgtgacaacaatgagctgttgctcttcatactgaagcagttagtggcagagcaggtgacatatcagcgcaaccgctttggggcccagcaggacactattgaggtccctgagaaggacttggtggataaggctcgtcagatcaacatccacaacctctctgcattttatgacagtgagctcttcaggatgaacaagttcagccacgacctgaaaaggaaaatgatcctgcagcagttctgaggccctatgccatccataaggattccttgggattctggtttggggtggtcagtgccctctgtgctttatggacacaaaaccagagcacttgatgaactcggggtactagggtcagggcttatagcaggatgtctggctgcacctggcatgactgtttgtttctccaagcctgctttgtgcttctcacctttgggtgggatgccttgccagtgtgtcttacttggttgctgaacatcttgccacctccgagtgctttgtctccactcagtaccttggatcagagctgctgagttcaggatgcctgcgtgtggtttaggtgttagccttcttacatggatgtcaggagagctgctgccctcttggcgtgagttgcgtattcaggctgcttttgctcgctttggccagagagctggttgaagatgtttgtaatcgttttcagtctcctgcaggtttctgtgcccctgtggtggaagaggcacgacagtgccagcgcagcgttctgggctcctcagtcgcaggggtgggatgtgagtcatgcggattatccactcgccacagttatcagctgccattgctccctgtctgtttccccactctcttatttgtgcattcggtttggtttctgtagttttaatttttaataaagttgaataaaatataaaaaaaaaaa

SEQ ID NO: 300 - protein, 892 aa, Homo sapien
MASSPAQRRRGNDPLTSSPGRSSRRTDALTSSPGRDLPPFEDESEGLLGTEGPLEEEEDGEELIGDGMERDYRAIPELDAYEAEGLALDDEDVEELTASRREAADGPCGTVTGSWPGLGACAVGSCMTAMRRTRSALPASAASGAGTEDGEEDEQMIESIENLEDLKGHSVREWVSMAGPRLEIHHRFKNFLRTHVDSHGHNVFKERISDMCKENRESLVVNYEDLAAREHVLAYFLPEAPAELLQIFDEAALEVVLAMYPKYDRITNHIHVRISHLPLVEELRSLRQLHLNQLIRTSGVVTSCTGVLPQLSMVKYNCNKCNFVLGPFCQSQNQEVKPGSCPECQSAGPFEVNMEETIYQNYQRIRIQESPGKVAARRLPRSKDAILLADLVDSCNAGDEIELTGIYHNNYDGSLNTANGFPVFATVILANHVAKKDNKVAVGELTDEDVKMITSLSKDQQIGEKIFASIAPSIYGHEDIKRGPALALFGGEPKNPGGKHKVRGDINVLLCGDPGTAKSQFLKYIEKVSSRAIFTTGQGASAVAVTAYVQRHPVSREWTLEAGALVLADRGVCLIDEFDKMNDQDRTSIHEAMEQQSISISKAGIVTSLQARCTVIAAANPIGGRYDPSLTFSENVDLTEPIISRFDILCVVRDTVDPVQDEMLARFVVGSHVRHHPSNKEEEGLANGSAAEPAMPNTYGVEPLPQEVLKKYIIYAKERVHPKLNQMDQDKVAKMYSDLRKESMATGSIPITVRHIESMSHGGGPRAHPSAGLCDRRRRQHGHPRDAGELHRHTEVQRHRSMRKTFARYLSFRRDNNELLLFILKQLVAEQVTYQRNRFGAQQDTIEVPEKDLVDKARQINIHNLSAFYDSELFRMNKFSHDLKRKMILQQF

SEQ ID NO: 301 - DNA, 3200 bp, Homo sapien
gagctgcgaaagggcgggaaaggcagttggagaagaggtaagcggttactcactccatggctgcagcaaggagaggcggcggcggcctcggctgaagaaagaaggtgggagcggagagcgcaggcgtgaaatcttcccaaggctgcagacaccgacggatttgctttgggagccagagtagctgccgccaccagagtccggagccatgagcgggtttaattttggaggcactggggcccctacaggcgggttcacgtttggcactgcaaagacggcaacaaccacacctgctacagggttttctttctccacctctggcactggagggtttaattttggggctcccttccaaccagccacaagtaccccttccaccggcctgttctcacttgccacccagactccggccacacagacgacaggcttcacttttggaacagcgactcttgcttcggggggaactggattttctttggggatcggtgcttcaaagctcaacttgagcaacacagctgccaccccagccatggcaaaccccagcggctttgggctgggcagcagcaacctcactaatgccatatcgagcaccgtcacctccagccagggcacagcacccaccggctttgtgtttggcccctccaccacctctgtggctccagctaccacatctggaggcttctcattcactggtggaagcacggcccaaccctccggtttcaacattggctcagcagggaattcagcccagcccacggcacctgccacgttgcccttcactccggccacgccagcagccaccacagcaggtgccacacagccagctgctcccacacccacagccaccatcaccagtactgggcccagcctctttgcgtcaatagcaactgctccaacctcatctgccaccactggactctccctctgtacccctgtgaccacagcgggcgcccccactgctgggacacagggcttcagcttaaaggcacctggagcagcttccggcacctccacaacaacatccaccgctgccaccgccaccgccaccaccaccaccagcagcagcaccaccggctttgccttgaatttaaaaccactggcgccagccgggatccccagcaatacagcagctgccgtgaccgctccacctggccctggcgcagctgcaggggcggctgccagctccgccatgacctacgcgcagctggagagcctgatcaacaaatggagcctggagctagaggaccaggagcggcacttcctccagcaggccacccaggtcaacgcctgggaccgcacgctgatcgagaatggagaaaagatcaccagcctgcaccgcgaggtggagaaggtgaagctggaccagaagaggctggaccaggagctcgacttcatcctgtcccagcagaaggagctggaagacctgctgagcccactggaggagttggtcaaggagcagagcgggaccatctacctgcagcacgcggatgaggagcgtgagaaaacctacaagctggctgagaacatcgacgcacagctcaagcgcatggcccaggatctcaaggacatcatcgagcacctgaacacgtccggggcccccgccgacaccagtgacccactgcagcagatctgcaagatcctcaatgcgcacatggactcactgcagtggatcgaccagaactcggccctgctgcagaggaaggtggaggaggtgaccaaggtgtgcgagggccggcgcaaggagcaggagcgcagcttccggatcacctttgactgagcgacagcagccctggggcccgcaggtccctagggagttcatgaggggaatgcgccctgttgtctgtagtttggggttgtggcaagatacttgtttgtttgtttctttctttcacatgactgcccttgacatgatcgctgtgtgctttgcgtttttccatttaggagggtattctgggccttctgcccaggcagcagcctcatgggtgtggcttctgtggctttcatttgagtatctttggccccttttcacctactgcgaccacccacctcatcctggctcagcctggtgatggagaagtgctgatggtcttggtcccagccagggtcgtgggggcagccactctctccaaagcatagtcatgggtgtcatgaaaaaataccaaatgtaagagaacctccaagtcagggcgcagtggctcacccctgtaatctcagcactttgggtggccaaggcgggcagatgacttgaggtcaggagttcgagaccagcctggccaacatggtgaaaccccgtctctactaaaaatacaaaaattagtcaggtgtggtggacgcctgtgatctcaatctcagctactcgggaggctgaggcaggagaatcacttgaacccaggaggtgttgcagtgaaccaagatcacaccactgcactccagcctaggcaacagagactctgtctcaaaaaaaaaaaaaaaaaaaagaaactcccaggagacagcagcctagttttcgagtgtgagcttgtgcttgtgaaagctaaccatgctaaccaccaaggcaaagcagcacagtgtgaatagaacagagcgggatcaagaatttcacagaagacaggtcagctgaggggcctgcacacacagggtgttgaggaaccacagatgggcgccgagaggcctgccttttgcctggcccaggctcacccccaccttgggcctcacctcctctaggaagccttcccagctacccgaagctcaggtggccttcttgcaggtccccgtagcaccctgagcctgtaccttgggtggcacttgttatgctatcctgtgctagccgtttgtgcctcgtctcgctgttagattgtgagttcccatgggcagagacccactgtcgttccccgtgtgtccccagcccggtccctgtcacatttgttaaatgaaagaacaatgaagcccagtgtaacgtcagtccacagaaatagccacagcttccagtggtggccgtagacttggctcggaacttagtggcaccagagtaactctagtcagttacagtaaaatccactgtgtgtggaaggcagaagctagcggttgtatcccaagcatcttttgtatttgtctttatactttgctgaattctctgaaatacctattactgtatgtggcttttctaaataaatgtattgtgaaactaaaaaaaaaaaaaaaaa

SEQ ID NO: 302 - protein, 522 aa, Homo sapien [sequence omitted]

SEQ ID NO: 303 - DNA, 2318 bp, Homo sapien
cgcagggaccgtgctccgccgtctccgccgcatcttccaccctcgccgccgccgcagctccccgcgctcgtgccaccgccgccgcgtccaccctcagcgccaccgccatgcgggagatcgtgcacctgcaggccggccagtgcggcaaccagatcggggccaagttttgggaggttatcagtgacgaacatggcatcgaccccacaggcacataccatggggacagtgacctgcaactggagaggatcaacgtgtactacaacgaggccacaggaggaaattatgtccccagagcggtgctggtggacctggaacccggcaccatggactctgtccgttctggccccttcggtcagatctttcggccggacaacttcgtgtttggccaatccggagccggcaacaactgggcaaaggggcactacacggagggcgcagagctggtggacgctgtcctggacgtagtccggaaggaggccgagagctgcgactgccttcagggcttccagctgacccactcgctggggggtggcacggggtccggaatgggcacgctgctcatcagtaagatccgcgaggagttcccagaccgcatcatgaacaccttcagcgtggtgccctcgcccaaagtgtcagacacggtggtggagccctacaacgccacgctgtctgtgcaccagctggtggagaatacggatgagacctactgcatcgacaacgaggcactctacgacatctgtttccgcaccctcaagctgaccacccccacctacggggacctcaaccacctggtgtcggccaccatgagcggggtcaccacctgcctgcgcttcccgggccagctgaacgccgacctgcgcaagctggccgtcaacatggttccctttcctcgcctgcacttcttcatgcccggcttcgcacccctgaccagccggggcagccagcagtaccgggccctgacggtgcccgagctcacccagcagatgttcgatgccaagaacatgatggcggcgtgcgacccgcgccacggccgctacctgaccgtggccgccgtgttccggggccgcatgtccatgaaggaggtggacgagcagatgctgagcgtgcagagcaagaacagcagctacttcgtggagtggatccccaacaacgtgaagacggccgtgtgcgacatcccgccccgcggcctgaagatggccgcgaccttcatcggcaacagcacggccatccaggagctgttcaagcgcatctccgagcagttcacggccatgttccggcgcaaggccttcttgcactggtacacgggcgagggcatggacgagatggagttcaccgaggccgagagcaacatgaatgacctggtatctgagtaccagcagtaccaggacgccacggccgaggagggcgagttcgaggaggaggcggaggaggaggtggcctaggctgctcccatcgcttcccacctgtcccctcgaggcttctgacctttgatccgctaggccccccatctctgaaccctagagccccgctttccctccaaggctgactccccgctgaccctaacaatacctttggagctcgctttacctctggctacttcatctccgaccctggctcccctttgagccctaatttatctttaacccccttgagctcttccaaccttgacattcccaggaggagccccgcttcaccccttctgactctggaaaccgcacctttaactttgcagaccttccttcacccctgacttctgcttcacctttgacctctgccccccatgaatcccattttacctctagacctataagttctggtttatgtttgacccctccctctgagctgcacttcaccgctgaccttgcctcacctttaaccccccacctgagccccagctcctacctctgaccccaacttctctttgatctctgaatcccctctgactccaacttctctttcaccctctatgagtcccattttacttctacacctgcaagtcctggtttatattggacccctccctccgagctgcagttcacctttgaccttgcctcacctttcaccccccaccccccacagcgtcagctcctacctctgaccccagcttctctctgattcccacaggccccatgcatcctccctgcctcactcccctcagcccctgccgaccttagcttatctgggagagaaacaaggcctggtgcctgtgaggaagagaggtcacccctaccctccctccccgcttccctgcctcaccctcaataaataaattaattgttgtcatggaaaaaaaaaaaaaaaaaaaaaaaaaaaaaaaa

SEQ ID NO: 304 - protein, 444 aa, Homo sapien
MREIVHLQAGQCGNQIGAKFWEVISDEHGIDPTGTYHGDSDLQLERINVYYNEATGGNYVPRAVLVDLEPGTMDSVRSGPFGQIFRPDNFVFGQSGAGNNWAKGHYTEGAELVDAVLDVVRKEAESCDCLQGFQLTHSLGGGTGSGMGTLLISKIREEFPDRIMNTFSVVPSPKVSDTVVEPYNATLSVHQLVENTDETYCIDNEALYDICFRTLKLTTPTYGDLNHLVSATMSGVTTCLRFPGQLNADLRKLAVNMVPFPRLHFFMPGFAPLTSRGSQQYRALTVPELTQQMFDAKNMMAACDPRHGRYLTVAAVFRGRMSMKEVDEQMLSVQSKNSSYFVEWIPNNVKTAVCDIPPRGLKMAATFIGNSTAIQELFKRISEQFTAMFRRKAFLHWYTGEGMDEMEFTEAESNMNDLVSEYQQYQDATAEEGEFEEEAEEEVA

SEQ ID NO: 305 - DNA, 2681 bp, Homo sapien
cggccgcgtcctcaagccggcacctgagcggcggagacggctgtagcacaaggatctgcatctccaatggatactgaggggtttggtgagctccttcagcaagctgaacagcttgctgctgagactgagggcatctcagagcttccccatgtggaacggaacttacaggagatccagcaggcgggagagcgcctgcgttcccgtaccctaacacgcacgtcccaggagacggcagatgtcaaggcgtcagttctcctcgggtctcggggacttgacatatcccacatctcccagcgattggagagtctgagtgcagccaccacctttgagcctcttgagcctgtgaaggacactgacattcagggcttcctgaagaatgagaaggacaatgccctgctgtctgccatcgaagagtcccggaagaggaccttcggcatggctgaggagtaccatcgggagtcaatgttggttgagtgggagcaagtgaaacagcgaattctgcacacactgctggcatcaggagaagacgcccttgactttactcaagaaagcgagccaagctacatcagtgatgtgggaccccctggtcgaagctctctggataacatcgagatggcctatgcgcggcaaatttatatctataatgagaaaattgtaaatggacacctgcagcctaacctggtggacctttgtgcttccgtcgcagagctggatgataagagcatttccgacatgtggaccatggtaaaacaaatgacagacgtgttgttgacaccggcaacggatgccctgaagaaccgcagcagcgtggaagtgcgcatggagtttgtcaggcaggccttggcgtaccttgagcagagttataagaattacacccttgtgactgtctttggaaatttgcatcaggcccagctgggcggggtgcctgggacttaccaattggttcgaagtttcctgaacattaaactgccagctcccttgcctggactacaggatggagaggtggaaggccatcctgtgtgggcgctaatttactactgcatgcgctgtggagacctgcttgccgcttcacaggtagttaatcgagcccagcaccagctgggagagtttaaaacctggttccaggagtacatgaacagcaaggacagaagattgtccccagctacggaaaacaagctccggctgcattaccgtagggccctcaggaacaatacagatccctacaagcgggccgtgtactgtatcattggcagatgtgacgtcaccgacaaccagagtgaagtggcggacaaaactgaggattacctgtggctgaagttgaaccaagtgtgttttgacgacgatggcaccagctccccacaagacaggctcactctctcacagttccagaagcagttgttggaagactatggcgagtcccactttacggtgaaccagcaacccttcctctacttccaagtcctgttcctgacagcgcagtttgaagcagcagttgcctttcttttccgcatggagcggctgcgctgccatgctgtccatgtagcactggtgctgtttgagctgaagctgcttttaaagtcctctggacagagtgctcagctcctcagccacgagcctggtgaccctccttgcttgcggcggctgaacttcgtgcggctcctcatgctgtacacccggaagtttgagtccacggacccaagggaggccctccagtacttctatttcctcagggatgagaaagatagtcaaggagaaaacatgtttctgcgctgtgtgagtgagcttgtgattgaaagccgagagttcgatatgattcttgggaaactagagaatgacggaagtagaaagcctggagtcatagataagtttactagtgacacaaagcctattatcaacaaagttgcttctgtggcagaaaataaaggactgtttgaagaggcagcaaagctgtatgaccttgccaagaatgctgacaaggtactggagctgatgaacaaactgctgagccctgtcgtcccccagatcagtgccccgcaatccaacaaggagaggctgaagaacatggcactctccattgccgaacggtatagggctcaaggaataagcgcaaataaatttgtggactccacgttctatcttcttttggacttgatcaccttttttgacgagtatcatagtggtcatattgatagagcttttgatatcattgagcgcttgaagctggtgcccctgaatcaggaaagtgtggaagagagagtggctgctttcagaaatttcagtgatgaaatcaggcacaacctctcagaagtgcttcttgccaccatgaacatcttgttcacacagtttaagaggctcaaggggacaagtccatcctcgtcatccaggccccagcgagtcatcgaggaccgcgactctcaactccgaagtcaagcccgcactctgattacctttgctggaatgataccataccgaacgtctggggacaccaatgcgaggctggtgcagatggaggtcctcatgaattaagtgccatgctttgtgggagtctgggtcggcacactgtcagtacatcaggcacatgggcccactaggctggggtttctggttttgtttctgttgtgttttgttttggtttctgtattatgtatttttgtcaacgccaataaatttctttgatttgt

SEQ ID NO: 306 - protein, 819 aa, Homo sapien
MDTEGFGELLQQAEQLAAETEGISELPHVERNLQEIQQAGERLRSRTLTRTSQETADVKASVLLGSRGLDISHISQRLESLSAATTFEPLEPVKDTDIQGFLKNEKDNALLSAIEESRKRTFGMAEEYHRESMLVEWEQVKQRILHTLLASGEDALDFTQESEPSYISDVGPPGRSSLDNIEMAYARQIYIYNEKIVNGHLQPNLVDLCASVAELDDKSISDMWTMVKQMTDVLLTPATDALKNRSSVEVRMEFVRQALAYLEQSYKNYTLVTVFGNLHQAQLGGVPGTYQLVRSFLNIKLPAPLPGLQDGEVEGHPVWALIYYCMRCGDLLAASQVVNRAQHQLGEFKTWFQEYMNSKDRRLSPATENKLRLHYRRALRNNTDPYKRAVYCIIGRCDVTDNQSEVADKTEDYLWLKLNQVCFDDDGTSSPQDRLTLSQFQKQLLEDYGESHFTVNQQPFLYFQVLFLTAQFEAAVAFLFRMERLRCHAVHVALVLFELKLLLKSSGQSAQLLSHEPGDPPCLRRLNFVRLLMLYTRKFESTDPREALQYFYFLRDEKDSQGENMFLRCVSELVIESREFDMILGKLENDGSRKPGVIDKFTSDTKPIINKVASVAENKGLFEEAAKLYDLAKNADKVLELMNKLLSPVVPQISAPQSNKERLKNMALSIAERYRAQGISANKFVDSTFYLLLDLITFFDEYHSGHIDRAFDIIERLKLVPLNQESVEERVAAFRNFSDEIRHNLSEVLLATMNILFTQFKRLKGTSPSSSSRPQRVIEDRDSQLRSQARTLITFAGMIPYRTSGDTNARLVQMEVLMN

SEQ ID NO: 307 - DNA, 3317 bp, Homo sapien
ccccagcgaggctccgggagcccttgcctgcgggggtccggggactcgagccggcctccgccccccggacgcacagccagcgtggtccccgcgtgcaacgcgagcgccggggagtggctcctgctttgcccctcgtgggggccgagccaagaccagtctgcaaactccatcccgccggctggaagaagtcgcggagccggcaccaaacccgcagcgtcttcccgcgcggatcccgggacttaaaaagccggggccaccccggcccaggacgggatgcgggtcggtccggtgcgctctgccatgagcggcgcctcgcagccccgcggcccggccctgctcttcccagccacccgaggcgtcccggccaaacgcctgctggacgccgacgacgcggcggctgtggcggccaagtgcccgcgcctctccgagtgctccagccccccggactacctcagcccccccggctcgccctgcagcccgcagcccccgcctgccgctccgggggccggcggaggctccgggagcgcgccggggcccagccgcatcgccgactacctgctgctgcccctagccgagcgcgagcatgtgtcccgggcgctgtgcatccacactggacgcgagctgcgctgcaaggtgtttcccattaaacactaccaggacaaaatcaggccttacatccagctgccatcgcacagcaacattactggcattgtggaagtgatccttggggaaaccaaggcctatgtcttctttgagaaggactttggggacatgcactcctatgtgcgaagccggaagaggctgcgggaagaggaagccgcccggctcttcaagcagattgtctccgccgtcgcccactgccaccagtcagccatcgtgctgggggacctgaagcttaggaagttcgtcttctccacggaggagagaacccagcttagactagaaagtctagaagacacacacataatgaagggggaagatgatgctttgtcagacaaacatggctgcccagcctacgtgagccctgagatcctcaacaccactgggacctactccggaaaggctgcggacgtttggagcctgggggtgatgctctacacccttctggttggacgataccccttccatgactcagaccccagtgcccttttctccaaaattcggcgtggacagttctgcattcctgagcacatttcccccaaagccaggtgcctcattcgcagcctcttgagacgggagccctccgagagactcactgcccccgagatcctactgcacccctggtttgagtccgtcttggaacccgggtacatcgactcagaaataggaacttcagaccagattgttccagagtaccaggaggacagtgacattagttccttcttctgctaatccccaaaacctcagaaacctcataattcttaacacctggcatttccatttctaaagatggacaggccctttggcatggtaccaaccagataatgactgcatcaggatgaaagctgctgaactcggcatggcgcctcctcttctctgttgggatgagtgactttattgatttgagcagcatatgctgtgattggctgccctgcaaatttgtttcccttaaggaaccctcaccaactatctctgctggatttgggagttccgcatcttttgtggagggcagagtatggacatcttacacccggtggtcaagtgtgtaataaacttgagcattcgaatgggagaaaaagcaaatcgcacaatgacatattttgagtaataaccgtatttttcacagggtgacaaattgggccaataaatctgccatctttgaactcatctttggtggctagactgctacggcagcttctctgatgggaaagttccttttttggcttaacactcaccctttcttcacactcacatttaccaatgactctgctccgtttttggagcagactgttttaagttgctcaggagcctgatggaaccatgaaccgagactcttctctgtttcctgccaagacctcatctgcactaatgccttctccctgaccttgacacttccccctttagctataaaagcacttaccagccgaacgtggaacagtatcacaaaagattccatctcccaacgatttcagaactctgagctcagagagactccagattttaaaaaataatttgagtgcttggaaactattagctttttaagttccttccaaatatgttagtacctaccctttactttttccccaagaccatctcagggtggagcattctgtctaagagaagaaagataaggaggctcccacccacctctcccaagagcagacattaaacatctttgtgctttgaagagagtgaattttggatagtcttgtgattctcagactaacttccagaattatactttaacccctcccagatatggtccgcctttggcattgtgtgtacatctgcagttttgcatggtgggttgttaatatttcaaatgtgtggtttatgaatacgtctgtataatcggcttctggagtgaaacagcaaaccccaaatcttcaaagttggaaggaactttaaaaatcatccggtccaatctctttcctctttctgccacctcccaaggcagaaatcccctcttcagcttcttttgtaggtgggaatccagcctctgttagatatgtccagagatggaaactcactcccctacaaaagatggagcttaatggagaaattgcaactttcattaaaaaacaaattcagatgaaatatcagtaactgtcttggacagtgctgaaatcaggtggttaaacgggtaaacaaaatatactgtattttgagaaatggcacaaaaacaggcagtcatctttaagggctatgcctaggcaaactactaacatgcattgtgagaatgccgtgtatacctcacgtactgtgtactttgtacatatattttaccttttatacctatgttcgattttgttttgttttgttctggctttgaggcttgttttgttgtctgtgtctgtctgaataacctgcgtgtctaaaaccacgtgaaatgtgaatgattattggcaatattaccttgacagaatcatgggactttgagaagagggaggacagaggcctctgtcgcactaacgctctcgtggttgctcgactgttgtatctgtgatacattatccgactaaggactctgggctggcagggccttctgccgggaaagctagaaacactaggttcttcctgtacatacgtgtatatatgtgaacagtgagatggccgtttctgacttgtagagaaattttaataaacctggtttcgta

SEQ ID NO: 308 - protein, 372 aa, Homo sapien
MRVGPVRSAMSGASQPRGPALLFPATRGVPAKRLLDADDAAAVAAKCPRLSECSSPPDYLSPPGSPCSPQPPPAAPGAGGGSGSAPGPSRIADYLLLPLAEREHVSRALCIHTGRELRCKVFPIKHYQDKIRPYIQLPSHSNITGIVEVILGETKAYVFFEKDFGDMHSYVRSRKRLREEEAARLFKQIVSAVAHCHQSAIVLGDLKLRKFVFSTEERTQLRLESLEDTHIMKGEDDALSDKHGCPAYVSPEILNTTGTYSGKAADVWSLGVMLYTLLVGRYPFHDSDPSALFSKIRRGQFCIPEHISPKARCLIRSLLRREPSERLTAPEILLHPWFESVLEPGYIDSEIGTSDQIVPEYQEDSDISSFFC

SEQ ID NO: 309 - DNA, 1347 bp, Homo sapien
ggcacgagggagaactagtctcgatttttttttttttttttttctttgttttgtttttcctgtataaaaaaggaccccaaatataaaggtagggaaagggacaagagggaacataccccttagtgtagagaaatgggaaggagaaggagaagcctcaaaaggagaggtgggaggggaatgtcattaaggcagcaaagtaatctctgtagaaagatggaggaggaccctccatagcctcagagataaaggcaaagattgccctctcagtgtccagaagggaaatggcagcttttcttccttccatggcagccactccattgctcactccggattaccttcatccttatgtagataagagtgctgcagagctcgaaaggcagagattcgcttgtgtgggttaaaagtcagcatttccagcagcagctgtgctcccgactcctccatctcaggtaccaccgactgcactgggcggggccctctggggggaaaggctccacggggcagggatacatctcgaggccagtcatcctctggaggcagcccaatcaggtcaaagattttgcccaactggtcggcttcagagtttccacagaagagaggctttcgacgaaacatctctgcaaagatacagccaacactccacatgtccacaggtgttgcatatgtggactgcagaagaacttcgggagctcggtaccagagtgtaacaaccacgggtgtaagtgccatctggtagctgtagattctggccaggccaaagtcagccagcttgactgttccaccacttgtcaccagaatgttctctggcttcagatctcggtgaacgatgcaattggcatgaaggaaatctaggcctcttagaaactggcgcatcagatccttgatcgtttcggctggcaagcctggtgggggtgccttgtccagatatgtccttaggtcctggtctacatgctcaaacaccagggttaccttgatctcccggtcagttcgggatgtggcacagacgtccatcagccggacaacattgggatgctcaaaagcctccagtcgcctcagtaaagccacctcacgaactgtgctgatgggaaggcctcctccacctcctcctccattggggactctcacactcttgagggccacaaagtggccactgtggggatcacgggccttgtacactgtcccataggcaccgacaccaatttcagccactggctcatatcgagaggtagccattctcagatcaagggagaccctcacgccagcccggggtgctgtgggggcggcccgttatcggggccccggagccggttcctacggccccatacacccgagctcggtccggagcag

SEQ ID NO: 310 - protein, 30 aa, Homo sapien
MSTGVAYVDCRRTSGARYQSVTTTGVSAIW

SEQ ID NO: 311 - DNA, 3381 bp, Homo sapien
cgcgattctcagggattgatccgcctcttcaggtaagttatcttccggccccgtaccactgtgccacaggcgcagcccgcttcctcaggtgccctatcccgcgcagaagaccacggcttcacagagtgttatttaagggcgtggccagcggaacatcccgccccattctgtgacgcacggggtggcgcgcgtgggacccgaggggtggggctgggtttagtaggagacctggggcaaggccccctgtggacgaccatctgccagcttctctcgttccgtcgattgggaggagcggtggcgacctcggccttcagtgtttccgacggagtgaatggcggcggcggctgggatgctgctgctgggcttgctgcaggcgggtgggtcggtgctgggccaggcgatggagaaggtgacaggcggcaacctcttgtccatgctgctgatcgcctgcgccttcaccctcagcctggtctacctgatccgtctggccgccggccacctggtccagctgcccgcaggggtgaaaagtcctccatacattttctccccaattccattccttgggcatgccatagcatttgggaaaagtccaattgaatttctagaaaatgcatatgagaagtatggacctgtatttagttttaccatggtaggcaagacatttacttaccttctggggagtgatgctgctgcactgctttttaatagtaaaaatgaagacctgaatgcagaagatgtctacagtcgcctgacaacacctgtgtttgggaagggagttgcatacgatgtgcctaatccagttttcttggagcagaagaaaatgttaaaaagtggccttaacatagcccactttaaacagcatgtttctataattgaaaaagaaacaaaggaatactttgagagttggggagaaagtggagaaaaaaatgtgtttgaagctctttctgagctcataattttaacagctagccattgtttgcatggaaaggaaatcagaagtcaactcaatgaaaaggtagcacagctgtatgcagatttggatggaggtttcagccatgcagcctggctcttaccaggttggctgcctttgcctagtttcagacgcagggacagagctcatcgggaaatcaaggatattttctataaggcaatccagaaacgcagacagtctcaagaaaaaattgatgacattctccaaactttactagatgctacatacaaggatgggcgtcctttgactgatgatgaagtagcagggatgcttattggattactcttggcagggcagcatacatcctcaactactagtgcttggatgggcttctttttggccagagacaaaacacttcaaaaaaaatgttatttagaacagaaaacagtctgtggagagaatctgcctcctttaacttatgaccagctcaaggatctaaatttacttgatcgctgtataaaagaaacattaagacttagacctcctataatgatcatgatgagaatggccagaactcctcagactgtggcagggtataccattcctccaggacatcaggtgtgtgtttctcccactgtcaatcaaagacttaaagactcatgggtagaacgcctggactttaatcctgatcgctacttacaggataacccagcatcaggggaaaagtttgcctatgtgccatttggagctgggcgtcatcgttgtattggggaaaattttgcctatgttcaaattaagacaatttggtccactatgcttcgtttatatgaatttgatctcattgatggatactttcccactgtgaattatacaactatgattcacacccctgagaacccagttatccgttacaaacgaagatcaaaatgaaaaaggttgcaaggaacgaatatatgtgattatcactgtaagccacaaaggcattcgaagagaatgaagtgtacaaaacaactcttgtagtttactgtttttttaagtgtgtaattctaaaagccagtttatgatttaggattttgttaactgaatggttctatcaaatataatagcatttgacacattttctaatagttatgatacttatacatgtgctttcaggaagttccttggtgaaacaattgttgaggggggatctaggtaattggcagattctaaataatataatttccagatagtaattttaagagtactcatcgctcttgccaaataagttcagggtattcaaatcttggactagtcctgcaaggtataaagaataaaaatcccagtgagatacttggaaaccacagtttattattatttatctgggcaattattgtgtgtgtgaggatggaagggtagggaataatcgaacatctaaagccttgaataagagaatactaattgttttggtatgatgatactcagaaatggagatattataggaaaaagaaatcctttggaattttaactaaaatcactgcatatgggaaattaagagatccaggaccatatttgataagagttcctaaaaataatgtaattattaatgctaaagactgctcatgtatcttgatctaattactaaataaattacatatttatttacctgataaatatgtatctagttctacaaggtcacatttatgtggaagtccaaagtcaagtccttaggggataattttgttttgggctcagttgttccctgcttccttttttttttttttttttttttgagatggagtctcgctctgttgcccaggctggagtgcagtggtgcgatctcagctcactgcatcctctgcctcccgggttcaagcaattctctgcctcagcctcccaagtagttgggattacaggcacctgccaccatgcctggctaattttttgtatttttagtagagacgggggtttcactatgttggctaggctggtcttgaactcctgagcctcgtgagtccacccgccttggcctcccaaagtgctgggattacaggcatgagccaccgcacctggccttccctgcttcctctctagaatccaattagggatgtttgttactactcatattgattaaaacagttaacaaacttttttctttttaaaatgtgagatcagtgaactctggttttaagataatctgaaacaaggtccttgggagtaataaaattggtcacattctgtaaagcacattctgtttaggaatcaacttatctcaaattgtaactcggggcctaactatatgagatggctgaaaaaataccacatcgtctgttttcactaggtgatgccaaaatattttgctttatgtatattacagttctttttaaaacactggaagactcatgttaaactctaattgtgaaggcagaatctctgctaatttttcagattaaaattctctttgaaaaaat

SEQ ID NO: 312 - protein, 509 aa, Homo sapien
MAAAAGMLLLGLLQAGGSVLGQAMEKVTGGNLLSMLLIACAFTLSLVYLIRLAAGHLVQLPAGVKSPPYIFSPIPFLGHAIAFGKSPIEFLENAYEKYGPVFSFTMVGKTFTYLLGSDAAALLFNSKNEDLNAEDVYSRLTTPVFGKGVAYDVPNPVFLEQKKMLKSGLNIAHFKQHVSIIEKETKEYFESWGESGEKNVFEALSELIILTASHCLHGKEIRSQLNEKVAQLYADLDGGFSHAAWLLPGWLPLPSFRRRDRAHREIKDIFYKAIQKRRQSQEKIDDILQTLLDATYKDGRPLTDDEVAGMLIGLLLAGQHTSSTTSAWMGFFLARDKTLQKKCYLEQKTVCGENLPPLTYDQLKDLNLLDRCIKETLRLRPPIMIMMRMARTPQTVAGYTIPPGHQVCVSPTVNQRLKDSWVERLDFNPDRYLQDNPASGEKFAYVPFGAGRHRCIGENFAYVQIKTIWSTMLRLYEFDLIDGYFPTVNYTTMIHTPENPVIRYKRRSK

SEQ ID NO: 313 - DNA, 662 bp, Homo sapien
accgccgacgcagacccctctctgcacgccagcccgcccgcacccaccatggccacagttcagcagctggaaggaagatggcgcctggtggacagcaaaggctttgatgaatacatgaaggagctaggagtgggaatagctttgcgaaaaatgggcgcaatggccaagccagattgtatcatcacttgtgatggtaaaaacctcaccataaaaactgagagcactttgaaaacaacacagttttcttgtaccctgggagagaagtttgaagaaaccacagctgatggcagaaaaactcagactgtctgcaactttacagatggtgcattggttcagcatcaggagtgggatgggaaggaaagcacaataacaagaaaattgaaagatgggaaattagtggtggagtgtgtcatgaacaatgtcacctgtactcggatctatgaaaaagtagaataaaaattccatcatcactttggacaggagttaattaagagaatgaccaagctcagttcaatgagcaaatctccatactgtttctttcttttttttttcattactgtgttcaattatctttatcataaacattttacatgcagctatttcaaagtgtgttggattaattaggatcatccctttggttaataaataaatgtgtttgtgct

SEQ ID NO: 314 - protein, 135 aa, Homo sapien
MATVQQLEGRWRLVDSKGFDEYMKELGVGIALRKMGAMAKPDCIITCDGKNLTIKTESTLKTTQFSCTLGEKFEETTADGRKTQTVCNFTDGALVQHQEWDGKESTITRKLKDGKLVVECVMNNVTCTRIYEKVE

SEQ ID NO: 315 - DNA, 3548 bp, Homo sapien
tggccgaagcagggggacagcaagggacgctcaggcggggaccatggcggacggcggctcggagcgggctgacgggcgcatcgtcaagatggaggtggactacagcgccacggtggatcagcgcctacccgagtgtgcgaagctagccaaggaaggaagacttcaagaagtcattgaaacccttctctctctggaaaagcagactcgtactgcttccgatatggtatcgacatcccgtatcttagttgcagtagtgaagatgtgctatgaggctaaagaatgggatttacttaatgaaaatattatgcttttgtccaaaaggcggagtcagttaaaacaagctgttgccaaaatggttcaacagtgctgtacttatgttgaggaaatcacagaccttcctatcaaacttcgattaattgatactctacgaatggttaccgaaggcaagatttatgttgaaattgagcgtgcgcgactgactaaaacattagcaactataaaagaacaaaatggtgatgtgaaagaggcagcctccattttacaggagttacaggtggaaacctacgggtcaatggaaaagaaagagcgagtggaatttattttggagcaaatgaggctctgcctagctgtgaaggattacattcgaacacaaatcatcagcaagaaaattaacaccaaatttttccaggaagaaaatacagagaaattaaagttgaagtactataatttaatgattcagctggatcaacatgagggatcctatttgtctatttgtaagcactacagagcaatatatgatactccctgtatacaggcagaaagtgaaaaatggcagcaggctctgaagagtgttgtactctatgttatcctggctccttttgacaatgaacagtcagatttggttcaccgaataagtggtgacaagaagttagaagaaattcccaaatacaaggatcttttaaagctttttaccacaatggagttgatgcgttggtccacacttgttgaggactatggaatggaattaagaaaaggttcccttgagagtcctgcaacggatgtttttggttctacagaggaaggtgaaaaaaggtggaaagacttgaagaacagagttgttgaacataatattagaataatggccaagtattatactcggataacaatgaaaaggatggcacagcttctggatctatctgttgatgagtccgaagcctttctctcaaatctagtagttaacaagaccatctttgctaaagtagacagattagcaggaattatcaacttccagagacccaaggatccaaataatttattaaatgactggtctcagaaactgaactcattaatgtctctggttaacaaaactacgcatctcatagccaaagaggagatgatacataatctacaataagggtcttagtgctttagaaaaaagttaaaattggaagtcattaaaaaaagactgttataatggtgtatatgttggggttttttttctaagcttctttgtcttaaattttaaaatagtgaatatgtttgagactccctttgacctttcagttccccaagttcattgttaactttgcatttgcaattggtgcaaaaatacagatttctgtcgtctgaatacacaaaaagttgtgtcataacttacccagatatgtttttctatcatttgaaacctttttagctactgtttgttttcattcaactaacaaacatattccaataataaaagcagtatatacatatttcctttctacagttacctctgattctcaacattttgtggggtagtgatttggcaagtgttttttaaataaaacaaatctcattgtaaagttatcagtcatttagtagaatagaaaagcaacatagagcatacaagaacatttgggatagagttgtgatttgtgaagaatttgtactttgatattgtggcggaaagtctagactgagtgtgtatgctggtaaactgtagacttttttttttttttttgagtccggctggttccaatcacagtagcttgattgctttcagccctcatcctctcacttgatcagttgttcaacagaatcagctgacataattgacacagtttattgggtgttaagtccgctctatagggatagtgactacttttttttttttttttttttttgctcttcttcctctcccctttctttatatgggtttaaatttaacataaagttgtttttataaggcttatttgtggctttaacttgtaagtctgattacatcattattgttccaaattcattatctctgtaggaacttttagttccattatatgaacactggataacctaattttttttaatgctttaaaaaaatggcaaaaagacgtcaggccaccctcatagtaagtggtgtagtattaaaatattttcacggaattaaaagtagcttgctgtcaaagaaacacctgagatgaattggtgtgaacgaattttgcaagtttaatttgatttatttcagagaaaatagaaaaaacaatgttagaaggttatttaaaatgatacttaaataaagaaagtgtgaggtctactttaaaaaaattcaaatgaagagaaaaagaaaaacagcattctagaaatggcatttctcctaattaattttccacttaatggaagattatcaattgtcctattttatgatcccaggactgaagacagttgtgggatatctgtcatatttatcctgtgagtcattgtgaataatgacatacagtactgaagtaatctgattttattctttggaaattcaatgcattggtcacactaataacatcaacatctgctatcacttatctttttaaaactaaccaaaaaaggctgggattacaggcatgagccactgcacccaactcctctttcgtctttctttaacacacactaggctctttgtgtattatgattcagtgctatttgtaactgtgtcccagtgaccaaattgcactcgactcgatcagctgttcatccatttcgtgttttttcctgtcaaacattaatccagcaaatatatgaggtatttaccaatttattttcttagtattacaaaataattcattagcataaagtacaatagtgaaatatttgagttgttcggaacctcaattaatcctgttttacatttcagacctaaagctggcaatcaggagaagaagcactttgttttaaatgtggagaagataacacttgattccatttcattgtcattagtgtattaaccagcaggagaggtgatgagccatttttcaaatgaaataccttttatttccatataatttttttattttagagttcaatagctgtttctatgattatcctcaatttccatatgttactgaatctgaaaaacatctttaaaattcaaacagttccattttctctcttgtaagtgttaaatgtgataaaagtacatattttaaattgttttcagctcttggatatagcagcaataaaaacactaatttgtgggtatttaagaaaacctggagaataaactcatactttaaaagatc

SEQ ID NO: 316 - protein, 456 aa, Homo sapien
MADGGSERADGRIVKMEVDYSATVDQRLPECAKLAKEGRLQEVIETLLSLEKQTRTASDMVSTSRILVAVVKMCYEAKEWDLLNENIMLLSKRRSQLKQAVAKMVQQCCTYVEEITDLPIKLRLIDTLRMVTEGKIYVEIERARLTKTLATIKEQNGDVKEAASILQELQVETYGSMEKKERVEFILEQMRLCLAVKDYIRTQIISKKINTKFFQEENTEKLKLKYYNLMIQLDQHEGSYLSICKHYRAIYDTPCIQAESEKWQQALKSVVLYVILAPFDNEQSDLVHRISGDKKLEEIPKYKDLLKLFTTMELMRWSTLVEDYGMELRKGSLESPATDVFGSTEEGEKRWKDLKNRVVEHNIRIMAKYYTRITMKRMAQLLDLSVDESEAFLSNLVVNKTIFAKVDRLAGIINFQRPKDPNNLLNDWSQKLNSLMSLVNKTTHLIAKEEMIHNLQ

SEQ ID NO: 317 - DNA, 2121 bp, Homo sapien
ctgctcgcggccgccaccgccgggccccggccgtccctggctcccctcctgcctcgagaagggcagggcttctcagaggcttggcgggaaaaaagaacggagggagggatcgcgctgagtataaaagccggttttcggggctttatctaactcgctgtagtaattccagcgagaggcagagggagcgagcgggcggccggctagggtggaagagccgggcgagcagagctgcgctgcgggcgtcctgggaagggagatccggagcgaatagggggcttcgcctctggcccagccctcccgcttgatcccccaggccagcggtccgcaacccttgccgcatccacgaaactttgcccatagcagcgggcgggcactttgcactggaacttacaacacccgagcaaggacgcgactctcccgacgcggggaggctattctgcccatttggggacacttccccgccgctgccaggacccgcttctctgaaaggctctccttgcagctgcttagacgctggatttttttcgggtagtggaaaaccagcagcctcccgcgacgatgcccctcaacgttagcttcaccaacaggaactatgacctcgactacgactcggtgcagccgtatttctactgcgacgaggaggagaacttctaccagcagcagcagcagagcgagctgcagcccccggcgcccagcgaggatatctggaagaaattcgagctgctgcccaccccgcccctgtcccctagccgccgctccgggctctgctcgccctcctacgttgcggtcacacccttctcccttcggggagacaacgacggcggtggcgggagcttctccacggccgaccagctggagatggtgaccgagctgctgggaggagacatggtgaaccagagtttcatctgcgacccggacgacgagaccttcatcaaaaacatcatcatccaggactgtatgtggagcggcttctcggccgccgccaagctcgtctcagagaagctggcctcctaccaggctgcgcgcaaagacagcggcagcccgaaccccgcccgcggccacagcgtctgctccacctccagcttgtacctgcaggatctgagcgccgccgcctcagagtgcatcgacccctcggtggtcttcccctaccctctcaacgacagcagctcgcccaagtcctgcgcctcgcaagactccagcgccttctctccgtcctcggattctctgctctcctcgacggagtcctccccgcagggcagccccgagcccctggtgctccatgaggagacaccgcccaccaccagcagcgactctgaggaggaacaagaagatgaggaagaaatcgatgttgtttctgtggaaaagaggcaggctcctggcaaaaggtcagagtctggatcaccttctgctggaggccacagcaaacctcctcacagcccactggtcctcaagaggtgccacgtctccacacatcagcacaactacgcagcgcctccctccactcggaaggactatcctgctgccaagagggtcaagttggacagtgtcagagtcctgagacagatcagcaacaaccgaaaatgcaccagccccaggtcctcggacaccgaggagaatgtcaagaggcgaacacacaacgtcttggagcgccagaggaggaacgagctaaaacggagcttttttgccctgcgtgaccagatcccggagttggaaaacaatgaaaaggcccccaaggtagttatccttaaaaaagccacagcatacatcctgtccgtccaagcagaggagcaaaagctcatttctgaagaggacttgttgcggaaacgacgagaacagttgaaacacaaacttgaacagctacggaactcttgtgcgtaaggaaaagtaaggaaaacgattccttctaacagaaatgtcctgagcaatcacctatgaacttgtttcaaatgcatgatcaaatgcaacctcacaaccttggctgagtcttgagactgaaagatttagccataatgtaaactgcctcaaattggactttgggcataaaagaacttttttatgcttaccatcttttttttttctttaacagatttgtatttaagaattgtttttaaaaaattttaa

SEQ ID NO: 318 - protein, 439 aa, Homo sapien
MPLNVSFTNRNYDLDYDSVQPYFYCDEEENFYQQQQQSELQPPAPSEDIWKKFELLPTPPLSPSRRSGLCSPSYVAVTPFSLRGDNDGGGGSFSTADQLEMVTELLGGDMVNQSFICDPDDETFIKNIIIQDCMWSGFSAAAKLVSEKLASYQAARKDSGSPNPARGHSVCSTSSLYLQDLSAAASECIDPSVVFPYPLNDSSSPKSCASQDSSAFSPSSDSLLSSTESSPQGSPEPLVLHEETPPTTSSDSEEEQEDEEEIDVVSVEKRQAPGKRSESGSPSAGGHSKPPHSPLVLKRCHVSTHQHNYAAPPSTRKDYPAAKRVKLDSVRVLRQISNNRKCTSPRSSDTEENVKRRTHNVLERQRRNELKRSFFALRDQIPELENNEKAPKVVILKKATAYILSVQAEEQKLISEEDLLRKRREQLKHKLEQLRNSCA

SEQ ID NO: 319 - DNA, 5128 bp, Homo sapien
actctggagtgggagtgggagcgagcgcttctgcgactccagttgtgagagccgcaagggcatgggaattgacgccactcaccgacccccagtctcaatctcaacgctgtgaggaaacctcgactttgccaggtccccaagggcagcggggctcggcgagcgaggcacccttctccgtccccatcccaatccaagcgctcctggcactgacgacgccaagagactcgagtgggagttaaagcttccagtgagggcagcaggtgtccaggccgggcctgcgggttcctgttgacgtcttgccctaggcaaaggtcccagttccttctcggagccggctgtcccgcgccactggaaaccgcacctccccgcagcatgggcaccagcctcagcccgaacgacccttggccgctaaacccgctgtccatccagcagaccacgctcctgctactcctgtcggtgctggccactgtgcatgtgggccagcggctgctgaggcaacggaggcggcagctccggtccgcgcccccgggcccgtttgcgtggccactgatcggaaacgcggcggcggtgggccaggcggctcacctctcgttcgctcgcctggcgcggcgctacggcgacgttttccagatccgcctgggcagctgccccatagtggtgctgaatggcgagcgcgccatccaccaggccctggtgcagcagggctcggccttcgccgaccggccggccttcgcctccttccgtgtggtgtccggcggccgcagcatggctttcggccactactcggagcactggaaggtgcagcggcgcgcagcccacagcatgatgcgcaacttcttcacgcgccagccgcgcagccgccaagtcctcgagggccacgtgctgagcgaggcgcgcgagctggtggcgctgctggtgcgcggcagcgcggacggcgccttcctcgacccgaggccgctgaccgtcgtggccgtggccaacgtcatgagtgccgtgtgtttcggctgccgctacagccacgacgaccccgagttccgtgagctgctcagccacaacgaagagttcgggcgcacggtgggcgcgggcagcctggtggacgtgatgccctggctgcagtacttccccaacccggtgcgcaccgttttccgcgaattcgagcagctcaaccgcaacttcagcaacttcatcctggacaagttcttgaggcactgcgaaagccttcggcccggggccgccccccgcgacatgatggacgcctttatcctctctgcggaaaagaaggcggccggggactcgcacggtggtggcgcgcggctggatttggagaacgtaccggccactatcactgacatcttcggcgccagccaggacaccctgtccaccgcgctgcagtggctgctcctcctcttcaccaggtatcctgatgtgcagactcgagtgcaggcagaattggatcaggtcgtggggagggaccgtctgccttgtatgggtgaccagcccaacctgccctatgtcctggccttcctttatgaagccatgcgcttctccagctttgtgcctgtcactattcctcatgccaccactgccaacacctctgtcttgggctaccacattcccaaggacactgtggtttttgtcaaccagtggtctgtgaatcatgacccagtgaagtggcctaacccggagaactttgatccagctcgattcttggacaaggatggcctcatcaacaaggacctgaccagcagagtgatgattttttcagtgggcaaaaggcggtgcattggcgaagaactttctaagatgcagctttttctcttcatctccatcctggctcaccagtgcgatttcagggccaacccaaatgagcctgcgaaaatgaatttcagttatggtctaaccattaaacccaagtcatttaaagtcaatgtcactctcagagagtccatggagctccttgatagtgctgtccaaaatttacaagccaaggaaacttgccaataagaagcaagaggcaagctgaaattttagaaatattcacatcttcggagatgaggagtaaaattcagtttttttccagttcctcttttgtgctgcttctcaattagcgtttaaggtgagcataaatcaactgtccatcaggtgaggtgtgctccatacccagcggttcttcatgagtagtgggctatgcaggagcttctgggagatttttttgagtcaaagacttaaagggcccaatgaattattatatacatactgcatcttggttatttctgaaggtagcattctttggagttaaaatgcacatatagacacatacacccaaacacttacaccaaactactgaatgaagaagtattttggtaaccaggccatttttggtgggaatccaagattggtctcccatatgcagaaatagacaaaaagtatattaaacaaagtttcagagtatattgttgaagagacagagacaagtaatttcagtgtaaagtgtgtgattgaaggtgataagggaaaagataaagaccagaaattcccttttcaccttttcaggaaaataacttagactctagtatttatgggtggatttatccttttgccttctggtatacttccttacttttaaggataaatcataaagtcagttgctcaaaaagaaatcaatagttgaattagtgagtatagtggggttccatgagttatcatgaattttaaagtatgcattattaaattgtaaaactccaaggtgatgttgtacctcttttgcttgccaaagtacagaatttgaattatcagcaaagaaaaaaaaaaaagccagccaagctttaaattatgtgaccataatgtactgatttcagtaagtctcataggttaaaaaaaaaagtcaccaaatagtgtgaaatatattacttaactgtccgtaagcagtatattagtattatcttgttcaggaaaaggttgaataatatatgccttgtgtaatattgaaaattgaaaagtacaactaacgcaaccaagtgtgctaaaaatgagcttgattaaatcaaccacctatttttgacatggaaatgaagcagggtttcttttcttcactcaaattttggcgaatctcaaaattagatcctaagatgtgttcttatttttataacatctttattgaaattctatttataatacagaatcttgttttgaaaataacctaattaatatattaaaattccaaattcatggcatgcttaaattttaactaaattttaaagccattctgattattgagttccagttgaagttagtggaaatctgaacattctcctgtggaaggcagagaaatctaagctgtgtctgcccaatgaataatggaaaatgccatgaattacctggatgttctttttacgaggtgacaagagttggggacagaactcccattacaactgaccaagtttctcttctagatgattttttgaaagttaacattaatgcctgctttttggaaagtcagaatcagaagatagtcttggaagctgtttggaaaagacagtggagatgaggtcagttgtgttttttaagatggcaattactttggtagctgggaaagcataaagctcaaatgaaatgtatgcattcacatttagaaaagtgaattgaagtttcaagttttaaagttcattgcaattaaacttccaaagaaagttctacagtgtcctaagtgctaagtgcttattacattttattaagctttttggaatctttgtaccaaaattttaaaaaagggagtttttgatagttgtgtgtatgtgtgtgtggggtggggggatggtaagagaaaagagagaaacactgaaaagaaggaaagatggttaaacattttcccactcattctgaattaattaatttggagcacaaaattcaaagcatggacatttagaagaaagatgtttggcgtagcagagttaaatctcaaataggctattaaaaaagtctacaacatagcagatctgttttgtggtttggaatattaaaaaacttcatgtaattttattttaaaatttcatagctgtacttcttgaatataaaaaatcatgccagtatttttaaaggcattagagtcaactacacaaagcaggcttgcccagtacatttaaattttttggcacttgccattccaaaatattatgccccaccaaggctgagacagtgaatttgggctgctgtagcctatttttttagattgagaaatgtgtagctgcaaaaataatcatgaaccaatctggatgcctcattatgtcaaccaggtccagatgtgctataatctgtttttacgtatgtaggcccagtcgtcatcagatgcttgcggcaaaagaaagctgtgtttatatggaagaaagtaaggtgcttggagtttacctggcttatttaatatgcttataacctagttaaagaaaggaaaagaaaacaaaaaacgaatgaaaataactgaatttggaggctggagtaatcagattactgctttaatcagaaaccctcattgtgtttctaccggagagagaatgtatttgctgacaaccattaaagtcagaagttttactccaggttattgcaataaagtataatgtttattaaatgcttcatttgtatgtcaaagctttgactctataagcaaattgcttttttccaaaacaaaaagatgtctcaggtttgttttgtgaattttctaaaagctttcatgtcccagaacttagcctttacctgtgaagtgttactacagccttaatattttcctagtagatctatattagatcaaatagttgcatagcagtatatgttaatttgtgtgtttttagctgtgacacaactgtgtgattaaaaggtatactttagtagacatttataactcaaggataccttcttatttaatcttttcttatttttgtactttatcatgaatgcttttagtgtgtgcataatagctacagtgcatagttgtagacaaagtacattctggggaaacaacatttatatgtagcctttactgtttgatataccaaattaaaaaaaaattgtatctcattacttatactgggacaccattaccaaaataataaaaatcactttcataatcttgaaaaaa

SEQ ID NO: 320 - protein, 543 aa, Homo sapien
MGTSLSPNDPWPLNPLSIQQTTLLLLLSVLATVHVGQRLLRQRRRQLRSAPPGPFAWPLIGNAAAVGQAAHLSFARLARRYGDVFQIRLGSCPIVVLNGERAIHQALVQQGSAFADRPAFASFRVVSGGRSMAFGHYSEHWKVQRRAAHSMMRNFFTRQPRSRQVLEGHVLSEARELVALLVRGSADGAFLDPRPLTVVAVANVMSAVCFGCRYSHDDPEFRELLSHNEEFGRTVGAGSLVDVMPWLQYFPNPVRTVFREFEQLNRNFSNFILDKFLRHCESLRPGAAPRDMMDAFILSAEKKAAGDSHGGGARLDLENVPATITDIFGASQDTLSTALQWLLLLFTRYPDVQTRVQAELDQVVGRDRLPCMGDQPNLPYVLAFLYEAMRFSSFVPVTIPHATTANTSVLGYHIPKDTVVFVNQWSVNHDPVKWPNPENFDPARFLDKDGLINKDLTSRVMIFSVGKRRCIGEELSKMQLFLFISILAHQCDFRANPNEPAKMNFSYGLTIKPKSFKVNVTLRESMELLDSAVQNLQAKETCQ

SEQ ID NO: 321 - DNA, 4975 bp, Homo sapien
ctctcacacacacacacccctcccctgccatccctccccggactccggctccggctccgattgcaatttgcaacctccgctgccgtcgccgcagcagccaccaattcgccagcggttcaggtggctcttgcctcgatgtcctagcctaggggcccccgggccggacttggctgggctcccttcaccctctgcggagtcatgagggcgaacgacgctctgcaggtgctgggcttgcttttcagcctggcccggggctccgaggtgggcaactctcaggcagtgtgtcctgggactctgaatggcctgagtgtgaccggcgatgctgagaaccaataccagacactgtacaagctctacgagaggtgtgaggtggtgatggggaaccttgagattgtgctcacgggacacaatgccgacctctccttcctgcagtggattcgagaagtgacaggctatgtcctcgtggccatgaatgaattctctactctaccattgcccaacctccgcgtggtgcgagggacccaggtctacgatgggaagtttgccatcttcgtcatgttgaactataacaccaactccagccacgctctgcgccagctccgcttgactcagctcaccgagattctgtcagggggtgtttatattgagaagaacgataagctttgtcacatggacacaattgactggagggacatcgtgagggaccgagatgctgagatagtggtgaaggacaatggcagaagctgtcccccctgtcatgaggtttgcaaggggcgatgctggggtcctggatcagaagactgccagacattgaccaagaccatctgtgctcctcagtgtaatggtcactgctttgggcccaaccccaaccagtgctgccatgatgagtgtgccgggggctgctcaggccctcaggacacagactgctttgcctgccggcacttcaatgacagtggagcctgtgtacctcgctgtccacagcctcttgtctacaacaagctaactttccagctggaacccaatccccacaccaagtatcagtatggaggagtttgtgtagccagctgtccccataactttgtggtggatcaaacatcctgtgtcagggcctgtcctcctgacaagatggaagtagataaaaatgggctcaagatgtgtgagccttgtgggggactatgtcccaaagcctgtgagggaacaggctctgggagccgcttccagactgtggactcgagcaacattgatggatttgtgaactgcaccaagatcctgggcaacctggactttctgatcaccggcctcaatggagacccctggcacaagatccctgccctggacccagagaagctcaatgtcttccggacagtacgggagatcacaggttacctgaacatccagtcctggccgccccacatgcacaacttcagtgttttttccaatttgacaaccattggaggcagaagcctctacaaccggggcttctcattgttgatcatgaagaacttgaatgtcacatctctgggcttccgatccctgaaggaaattagtgctgggcgtatctatataagtgccaataggcagctctgctaccaccactctttgaactggaccaaggtgcttcgggggcctacggaagagcgactagacatcaagcataatcggccgcgcagagactgcgtggcagagggcaaagtgtgtgacccactgtgctcctctgggggatgctggggcccaggccctggtcagtgcttgtcctgtcgaaattatagccgaggaggtgtctgtgtgacccactgcaactttctgaatggggagcctcgagaatttgcccatgaggccgaatgcttctcctgccacccggaatgccaacccatggggggcactgccacatgcaatggctcgggctctgatacttgtgctcaatgtgcccattttcgagatgggccccactgtgtgagcagctgcccccatggagtcctaggtgccaagggcccaatctacaagtacccagatgttcagaatgaatgtcggccctgccatgagaactgcacccaggggtgtaaaggaccagagcttcaagactgtttaggacaaacactggtgctgatcggcaaaacccatctgacaatggctttgacagtgatagcaggattggtagtgattttcatgatgctgggcggcacttttctctactggcgtgggcgccggattcagaataaaagggctatgaggcgatacttggaacggggtgagagcatagagcctctggaccccagtgagaaggctaacaaagtcttggccagaatcttcaaagagacagagctaaggaagcttaaagtgcttggctcgggtgtctttggaactgtgcacaaaggagtgtggatccctgagggtgaatcaatcaagattccagtctgcattaaagtcattgaggacaagagtggacggcagagttttcaagctgtgacagatcatatgctggccattggcagcctggaccatgcccacattgtaaggctgctgggactatgcccagggtcatctctgcagcttgtcactcaatatttgcctctgggttctctgctggatcatgtgagacaacaccggggggcactggggccacagctgctgctcaactggggagtacaaattgccaagggaatgtactaccttgaggaacatggtatggtgcatagaaacctggctgcccgaaacgtgctactcaagtcacccagtcaggttcaggtggcagattttggtgtggctgacctgctgcctcctgatgataagcagctgctatacagtgaggccaagactccaattaagtggatggcccttgagagtatccactttgggaaatacacacaccagagtgatgtctggagctatggtgtgacagtttgggagttgatgaccttcggggcagagccctatgcagggctacgattggctgaagtaccagacctgctagagaagggggagcggttggcacagccccagatctgcacaattgatgtctacatggtgatggtcaagtgttggatgattgatgagaacattcgcccaacctttaaagaactagccaatgagttcaccaggatggcccgagacccaccacggtatctggtcataaagagagagagtgggcctggaatagcccctgggccagagccccatggtctgacaaacaagaagctagaggaagtagagctggagccagaactagacctagacctagacttggaagcagaggaggacaacctggcaaccaccacactgggctccgccctcagcctaccagttggaacacttaatcggccacgtgggagccagagccttttaagtccatcatctggatacatgcccatgaaccagggtaatcttggggggtcttgccaggagtctgcagtttctgggagcagtgaacggtgcccccgtccagtctctctacacccaatgccacggggatgcctggcatcagagtcatcagaggggcatgtaacaggctctgaggctgagctccaggagaaagtgtcaatgtgtagaagccggagcaggagccggagcccacggccacgcggagatagcgcctaccattcccagcgccacagtctgctgactcctgttaccccactctccccacccgggttagaggaagaggatgtcaacggttatgtcatgccagatacacacctcaaaggtactccctcctcccgggaaggcaccctttcttcagtgggtctcagttctgtcctgggtactgaagaagaagatgaagatgaggagtatgaatacatgaaccggaggagaaggcacagtccacctcatccccctaggccaagttcccttgaggagctgggttatgagtacatggatgtggggtcagacctcagtgcctctctgggcagcacacagagttgcccactccaccctgtacccatcatgcccactgcaggcacaactccagatgaagactatgaatatatgaatcggcaacgagatggaggtggtcctgggggtgattatgcagccatgggggcctgcccagcatctgagcaagggtatgaagagatgagagcttttcaggggcctggacatcaggccccccatgtccattatgcccgcctaaaaactctacgtagcttagaggctacagactctgcctttgataaccctgattactggcatagcaggcttttccccaaggctaatgcccagagaacgtaactcctgctccctgtggcactcagggagcatttaatggcagctagtgcctttagagggtaccgtcttctccctattccctctctctcccaggtcccagccccttttccccagtcccagacaattccattcaatctttggaggcttttaaacattttgacacaaaattcttatggtatgtagccagctgtgcactttcttctctttcccaaccccaggaaaggttttccttattttgtgtgctttcccagtcccattcctcagcttcttcacaggcactcctggagatatgaaggattactctccatatcccttcctctcaggctcttgactacttggaactaggctcttatgtgtgcctttgtttcccatcagactgtcaagaagaggaaagggaggaaacctagcagaggaaagtgtaattttggtttatgactcttaaccccctagaaagacagaagcttaaaatctgtgaagaaagaggttaggagtagatattgattactatcataattcagcacttaactatgagccaggcatcatactaaacttcacctacattatctcacttagtcctttatcatccttaaaacaattctgtgacatacatattatctcattttacacaaagggaagtcgggcatggtggctcatgcctgtaatctcagcactttgggaggctgaggcagaaggattacctgaggcaaggagtttgagaccagcttagccaacatagtaagacccccatctc

SEQ ID NO: 322 - protein, 1342 aa, Homo sapien
MRANDALQVLGLLFSLARGSEVGNSQAVCPGTLNGLSVTGDAENQYQTLYKLYERCEVVMGNLEIVLTGHNADLSFLQWIREVTGYVLVAMNEFSTLPLPNLRVVRGTQVYDGKFAIFVMLNYNTNSSHALRQLRLTQLTEILSGGVYIEKNDKLCHMDTIDWRDIVRDRDAEIVVKDNGRSCPPCHEVCKGRCWGPGSEDCQTLTKTICAPQCNGHCFGPNPNQCCHDECAGGCSGPQDTDCFACRHFNDSGACVPRCPQPLVYNKLTFQLEPNPHTKYQYGGVCVASCPHNFVVDQTSCVRACPPDKMEVDKNGLKMCEPCGGLCPKACEGTGSGSRFQTVDSSNIDGFVNCTKILGNLDFLITGLNGDPWHKIPALDPEKLNVFRTVREITGYLNIQSWPPHMHNFSVFSNLTTIGGRSLYNRGFSLLIMKNLNVTSLGFRSLKEISAGRIYISANRQLCYHHSLNWTKVLRGPTEERLDIKHNRPRRDCVAEGKVCDPLCSSGGCWGPGPGQCLSCRNYSRGGVCVTHCNFLNGEPREFAHEAECFSCHPECQPMGGTATCNGSGSDTCAQCAHFRDGPHCVSSCPHGVLGAKGPIYKYPDVQNECRPCHENCTQGCKGPELQDCLGQTLVLIGKTHLTMALTVIAGLVVIFMMLGGTFLYWRGRRIQNKRAMRRYLERGESIEPLDPSEKANKVLARIFKETELRKLKVLGSGVFGTVHKGVWIPEGESIKIPVCIKVIEDKSGRQSFQAVTDHMLAIGSLDHAHIVRLLGLCPGSSLQLVTQYLPLGSLLDHVRQHRGALGPQLLLNWGVQIAKGMYYLEEHGMVHRNLAARNVLLKSPSQVQVADFGVADLLPPDDKQLLYSEAKTPIKWMALESIHFGKYTHQSDVWSYGVTVWELMTFGAEPYAGLRLAEVPDLLEKGERLAQPQICTIDVYMVMVKCWMIDENIRPTFKELANEFTRMARDPPRYLVIKRESGPGIAPGPEPHGLTNKKLEEVELEPELDLDLDLEAEEDNLATTTLGSALSLPVGTLNRPRGSQSLLSPSSGYMPMNQGNLGGSCQESAVSGSSERCPRPVSLHPMPRGCLASESSEGHVTGSEAELQEKVSMCRSRSRSRSPRPRGDSAYHSQRHSLLTPVTPLSPPGLEEEDVNGYVMPDTHLKGTPSSREGTLSSVGLSSVLGTEEEDEDEEYEYMNRRRRHSPPHPPRPSSLEELGYEYMDVGSDLSASLGSTQSCPLHPVPIMPTAGTTPDEDYEYMNRQRDGGGPGGDYAAMGACPASEQGYEEMRAFQGPGHQAPHVHYARLKTLRSLEATDSAFDNPDYWHSRLFPKANAQRT

SEQ ID NO: 323 - DNA, 4221 bp, Homo sapien
gtcggccgtcccctttaatttttaaatacacggtcccctcttttctctggggggggcaagcaagaaatcaaagaaggaggagacaagccgtcaattttctccaaaacaaaccccaccgggcaatttggtctcggggtagggggagacggggtgattgcaaattattccaggacgagatccagttctccagcgggaaaggggcaaaggaacgccgcgcgttggaagggccagggtacgcagctccccttgcagcgcccgcaggacccccgcaagctcgtgccggcgaaatcggagaccgccgatctgtcctcgttctctcctgcacgtctggctgcattcggaggaagacctggggcgcgagcgagcggcgacagcatgagcctgtgctgacctccgcgcggcgggccgagcccagggctttgtcgcggtacctgcgcccagcccgcgccgcaactctgtgcccagcttttgcaatcttttgttgcagcgctgaccgcaccaagttaaatgctcccttgcaatttttcttttttttgtttgtttgtttaatttttggagagctcgcgatcttggaaaagcctcagacgccatctacagttaaaacgtaggtaactgccctctcccgcaccccccccttacacgccccccaccctttccaccaaaaaaagggggtgcagcgcggattctggctgccgtgcgtcgccagccggtagacccgtgcttgtttcctttctctttttgtttggcttctaacgcgttgggactgagtcgccgccgtgagctccccgaagactgcacaaactaccgcgggctcctccgccccgtctgcgattcggaagccggcctgggggtcgcgtcgggagccctgcgctgcagctccgcaccttagcagcccgggtactcatccagatccacgccggggacacacacacagagtaactaaaagtgcggcgattctgcacatcgccgactgctttggggtaacaaaaagacccgagttgcctgccgaccgaggacccccgggagccgggctcggagcagacgaggtatccggcggcgcccatttgggggcttctaactctttctccacgcagcccctcttctgtcccctcccctctcgctcccttttaaaatcagtggcaccgaggcgcctgcagccgcactcgccagcgactcatctctccagcgggtttttttttgtttgtcgtgtgcgatcctcacactcatgaacatacacaggtctacccccatcacaatagcgagatatgggagatcgcggaacaaaacccaggatttcgaagagttgtcgtctataaggtccgcggagcccagccagagtttcagcccgaacctcggctccccgagcccgcccgagactccgaacttgtcgcattgcgtttcttgtatcgggaaatacttattgttggaacctctggagggagaccacgtttttcgtgccgtgcatctgcacagcggagaggagctggtgtgcaaggtgtttgatatcagctgctaccaggaatccctggcaccgtgcttttgcctgtctgctcatagtaacatcaaccaaatcactgaaattatcctgggtgagaccaaagcctatgtgttctttgagcgaagctatggggacatgcattccttcgtccgcacctgcaagaagctgagagaggaggaggcagccagactgttctaccagattgcctcggcagtggcccactgccatgacggggggctggtgctgcgggacctcaagctgcggaaattcatctttaaggacgaagagaggactcgggtcaagctggaaagcctggaagacgcctacattctgcggggagatgatgattccctctccgacaagcatggctgcccggcttacgtaagcccagagatcttgaacaccagtggcagctactcgggcaaagcagccgacgtgtggagcctgggggtgatgctgtacaccatgttggtggggcggtaccctttccatgacattgaacccagctccctcttcagcaagatccggcgtggccagttcaacattccagagactctgtcgcccaaggccaagtgcctcatccgaagcattctgcgtcgggagccctcagagcggctgacctcgcaggaaattctggaccatccttggttttctacagattttagcgtctcgaattcagcatatggtgctaaggaagtgtctgaccagctggtgccggacgtcaacatggaagagaacttggaccctttctttaactgagctcatgccccacggagacttagcaggttccaggagtgagcgagggcagcggaaaggagttcttccgggggacacgaattgcctggctgagtagcaagaaagacacactcttaagtttcttggttcagagcaggaaaaccttcaaggagctgactgaccacgtagcatgggggcaagaggcgtgggatggggattggggtgagatggatgggagcccgctggagcttgtcttccctaacatagcctgggagaccaccccttgccacttgggccacttccgcctaccccacttttcattttgttccaaaatagttgcagatcctgacagaatcaaaactctctgcctcaaacacacatcctggcatcgcactgttagcatttaacttcttgttaggattcagggaaggaacagttggccaagaattttttttcttttaaacaagccaaccacctagctggtaattaatgaggttcacttaaaaaaaaaattcggtgcacacagactgacatgaaacctgggtgctacagtaaaagaaaacaaaagtccagtttgtgtctcttaatcgctcacttcaactcatttcttctaaataaactatttaatatcctggtcaggaaatgacatgttaatgctttgctccctgaagggggaaaaaatctgtcctttaacaagctattctgttttgtgtcaattgggtccgtggcaaggaagctattaggaagtcaaacggtccaggatgcattacctgctaatccttaggtttaaagggggaaagaaaagggaagaagaaaggaaaagagaaatccaactcctttttcatgttttgcttttgaacaatgagggtttgtgtgacaggcattcctctttgctgagatgatagcaatggcctgagattttagcaagctcctggagtctgatgcttttgcagtactctgatcgcaactaaacatttgtctttgttttattagaaactagtgaaacaaagcaggttgtcccacatgtataaaatacagggcagctatttagttttctttacagagaatgatccttttaaggcttgtaaggccctctggtttggacaaaaaccctcagtagagacaagcgggaaggataattagctgaaagctatgatgatataaataaaaacagctctctatcccaatacgcacctttgtattttcaagaactcttctatttattaaggaaaatgtcacattgtgatgtattaagccagtacttcaattacgggttgacttgggatgacatattacatgctgtagttaacatttataattctttttccttgtttgagtatttctgtctctgaaataaccttttacttggcttttctagatagctttatttgatttcgagtggcaaaatgttttttattacggcttttctattgctgtatgatacagaactcttttggcataaatatttgtgttcccagtacctcacttgttcggatttgactgcctgtatatgttttgtgaaatggtcctgtttttgggtaggtgacacgtggactctagtatgtaaatgttacttgaatctgtgcttcataatagtgtgtggcatgtatgtgcagactcttggatgctttatgcctgcgcaccaggagccctgtcctcacgttcccaggagggcggcttcacccttcgtaaccaggagacaaggcggccatggatttgcccttgattctattttgctaatggaagatagaaaggagagaaggtttttttttttttttaacattctgaagatggtgctgtgtcaagaaggaccttttttttcccctctcccctattttttaagtaccttggaggaggagaggttggtgacatgcatggtggggatctatggcctctggtgctttgtcctgtatttggtttaatgtttttgtcctaatctcttcaatcaataaaattgtgcgtatttaactaaaaaaaaaaaaaaaaaa

SEQ ID NO: 324 - protein, 343 aa, Homo sapien
MNIHRSTPITIARYGRSRNKTQDFEELSSIRSAEPSQSFSPNLGSPSPPETPNLSHCVSCIGKYLLLEPLEGDHVFRAVHLHSGEELVCKVFDISCYQESLAPCFCLSAHSNINQITEIILGETKAYVFFERSYGDMHSFVRTCKKLREEEAARLFYQIASAVAHCHDGGLVLRDLKLRKFIFKDEERTRVKLESLEDAYILRGDDDSLSDKHGCPAYVSPEILNTSGSYSGKAADVWSLGVMLYTMLVGRYPFHDIEPSSLFSKIRRGQFNIPETLSPKAKCLIRSILRREPSERLTSQEILDHPWFSTDFSVSNSAYGAKEVSDQLVPDVNMEENLDPFFN

SEQ ID NO: 325 - DNA, 884 bp, Homo sapien
cgaggttcgggtcgtggggcggagggaagagcgggcgggcgggaggcgccggcgccagacgcggagggaaggagctacgagtagccgccgagaggccgcggagccagcgacgaccgacccagccgagccgccgccgccgccgcgcccccatggcggccgccaaggacactcatgaggaccatgatacttccactgagaatacagacgagtccaaccatgaccctcagtttgagccaatagtttctcttcctgagcaagaaattaaaacactggaagaagatgaagaggaactttttaaaatgcgggcaaaactgttccgatttgcctctgagaacgatctcccagaatggaaggagcgaggcactggtgacgtcaagctcctgaagcacaaggagaaaggggccatccgcctcctcatgcggagggacaagaccctgaagatctgtgccaaccactacatcacgccgatgatggagctgaagcccaacgcaggtagcgaccgtgcctgggtctggaacacccacgctgacttcgccgacgagtgccccaagccagagctgctggccatccgcttcctgaatgctgagaatgcacagaaattcaaaacaaagtttgaagaatgcaggaaagagatcgaagagagagaaaagaaagcaggatcaggcaaaaatgatcatgccgaaaaagtggcggaaaagctagaagctctctcggtgaaggaggagaccaaggaggatgctgaggagaagcaataaatcgtcttattttattttcttttcctctctttcctttcctttttttaaaaaattttaccctgcccctctttttcggtttgtttttattctttcatttttacaagggacgttatataaagaactgaactc

SEQ ID NO: 326 - protein, 201 aa, Homo sapien
MAAAKDTHEDHDTSTENTDESNHDPQFEPIVSLPEQEIKTLEEDEEELFKMRAKLFRFASENDLPEWKERGTGDVKLLKHKEKGAIRLLMRRDKTLKICANHYITPMMELKPNAGSDRAWVWNTHADFADECPKPELLAIRFLNAENAQKFKTKFEECRKEIEEREKKAGSGKNDHAEKVAEKLEALSVKEETKEDAEEKQ

SEQ ID NO: 327 - DNA, 2792 bp, Homo sapien
gggggcgtggccccgagaaggcggagacaagatggccgcccatagcgcttggaggacctaagaggcggtggccggggccacgccccgggcaggagggccgctctgtgcgcgcccgctctatgatgcttgcgcgcgtcccccgcgcgccgcgctgcgggcggggcgggtctccgggattccaagggctcggttacggaagaagcgcagcgccggctggggagggggctggatgcgcgcgcacccggggggaggccgctgctgcccggagcaggaggagggggagagtgcggcgggcggcagcggcgctggcggcgactccgccatagagcaggggggccagggcagcgcgctcgccccgtccccggtgagcggcgtgcgcagggaaggcgctcggggcggcggccgtggccgggggcggtggaagcaggcgggccggggcggcggcgtctgtggccgtggccggggccggggccgtggccggggacggggacggggccggggccggggccgcggccgtcccccgagtggcggcagcggccttggcggcgacggcggcggctgcggcggcggcggcagcggtggcggcggcgccccccggcgggagccggtccctttcccgtcggggagcgcggggccggggcccaggggaccccgggccacggagagcgggaagaggatggattgcccggccctcccccccggatggaagaaggaggaagtgatccgaaaatctgggctaagtgctggcaagagcgatgtctactacttcagtccaagtggtaagaagttcagaagcaagcctcagttggcaaggtacctgggaaatactgttgatctcagcagttttgacttcagaactggaaagatgatgcctagtaaattacagaagaacaaacagagactgcgaaacgatcctctcaatcaaaataagctgcgctggaacactcatcgtcctgcaccatggcatgcgctttcaagactctgcttgctcatacgctgtttgctctgcttggaatgtgcttacccccttccccttcatctggtgaactcctactcatccaagacccagcttcattgtctccatctctgggaagcctgccctgcatactccaggcagaaccaatcctttcctccataagggtaaaccagacttgaatacaacattgccaattagacaaacagcatcaattttcaaacaaccggtaaccaaagtcacaaatcatcctagtaataaagtgaaatcagacccacaacgaatgaatgaacagccacgtcagcttttctgggagaagaggctacaaggacttagtgcatcagatgtaacagaacaaattataaaaaccatggaactacccaaaggtcttcaaggagttggtccaggtagcaatgatgagacccttttatctgctgttgccagtgctttgcacacaagctctgcgccaatcacagggcaagtctccgctgctgtggaaaagaaccctgctgtttggcttaacacatctcaacccctctgcaaagcttttattgtcacagatgaagacatcaggaaacaggaagagcgagtacagcaagtacgcaagaaattggaagaagcactgatggcagacatcttgtcgcgagctgctgatacagaagagatggatattgaaatggacagtggagatgaagcctaagaatatgatcaggtaactttcgaccgactttccccaagagaaaattcctagaaattgaacaaaaatgtttccactggcttttgcctgtaagaaaaaaaatgtacccgagcacatagagctttttaatagcactaaccaatgcctttttagatgtatttttgatgtatatatctattattcaaaaaatcatgtttattttgagtcctaggacttaaaattagtcttttgtaatatcaagcaggaccctaagatgaagctgagcttttgatgccaggtgcaatctactggaaatgtagcacttacgtaaaacatttgtttcccccacagttttaataagaacagatcaggaattctaaataaatttcccagttaaagattattgtgacttcactgtatataaacatatttttatactttattgaaaggggacacctgtacattcttccatcatcactgtaaagacaaataaatgattatattcacagactgattggaattctttctgttgaaaagcacacacaataaagaacccctcgttagccttcctctgatttacattcaactctgatccctgggccttaggtttgacatggaggtggaggaagatagcgcatatatttgcagtatgaactattgcctctggacgttgtgagaattgtgctttcaccagaatttctaagaatttctgctaaatatcacctagcatgtgtaattttttttccttgcctgtgacttggacttttgatagttctataagaataaggctttttcttcccttgggcatgagtcagatacacaaggacccttcaggtgttactagaaggcgtccatgtttattgttttttaaagaatgtttggcactctctaacgtccactagcttactgagttatcaggtgcaggtcagactcttggctacagtgagaggcagcttctaggcagagttgcttaatgaaagggtttgtaatactttacaaaccattacctgtacctggcctggcctccaaaatattaacattctttttctgttgaaactcgcgagtgtaactttcataccacttgaatttattgatatttaattatgaaaactagcattacattattaaacgatttctaaaatc

SEQ ID NO: 328 - protein, 302 aa, Homo sapien
MRAHPGGGRCCPEQEEGESAAGGSGAGGDSAIEQGGQGSALAPSPVSGVRREGARGGGRGRGRWKQAGRGGGVCGRGRGRGRGRGRGRGRGRGRGRPPSGGSGLGGDGGGCGGGGSGGGGAPRREPVPFPSGSAGPGPRGPRATESGKRMDCPALPPGWKKEEVIRKSGLSAGKSDVYYFSPSGKKFRSKPQLARYLGNTVDLSSFDFRTGKMMPSKLQKNKQRLRNDPLNQNKLRWNTHRPAPWHALSRLCLLIRCLLCLECAYPLPLHLVNSYSSKTQLHCLHLWEACPAYSRQNQSFPP

SEQ ID NO: 329 - DNA, 5316 bp, Homo sapien
cggacgcgtgggaacgaagccacccattacggtatgatgatgtcaaacgtgatgctgatgctacagttacagcccctgctggcgcagcctctctgattctctctccctctccgcgtccagtgctgggctttttcagacaagtgcatctcctaaccaggtcacatttcagccgcgacccactctccgccagtcaccggaggcagaccgcgggaggagagctgaggacagccgcgtgcgcttcgccagcagcggggtgggaggaaggacattaaaatactgcagaagtcaagaccccccaggtcgaacccagaccacgatgcgcgccccgggctgcgggcggctggtgctgccgctgctgctcctggccgcggcagccctggccgaaggcgacgccaaggggctcaaggagggcgagacccccggcaatttcatggaggacgagcaatggctgtcgtccatctcgcagtacagcggcaagatcaagcactggaaccgcttccgagacgaagtggaggatgactatatcaagagctgggaggacaatcagcaaggagatgaagccctggataccaccaaggacccctgccagaaggtgaagtgcagccgccacaaggtgtgcattgcccagggctaccagcgggccatgtgcatcagtcgcaagaagctggagcacaggatcaagcagccgaccgtgaaactccatggaaacaaagactccatctgcaagccctgccacatggcccagcttgcctctgtctgcggctcagatggccacacttacagctctgtgtgtaagctggagcaacaggcgtgcctgagcagcaagcagctggcggtgcgatgcgagggcccctgcccctgccccacggagcaggctgccacctccaccgccgatggcaaaccagagacttgcaccggtcaggacctggctgacctgggagatcggctgcgggactggttccagctccttcatgagaactccaagcagaatggctcagccagcagtgtagccggcccggccagcgggctggacaagagcctgggggccagctgcaaggactccattggctggatgttctccaagctggacaccagtgctgacctcttcctggaccagacggagctggccgccatcaacctggacaagtacgaggtctgcatccgtcccttcttcaactcctgtgacacctacaaggatggccgggtctctactgctgagtggtgcttctgcttctggagggagaagcccccctgcctggcagagctggagcgcatccagatccaggaggccgccaagaagaagccaggcatcttcatcccgagctgcgacgaggatggctactaccggaagatgcagtgtgaccagagcagcggtgactgctggtgtgtggaccagctgggcctggagctgactggcacgcgcacgcatgggagccccgactgcgatgacatcgtgggcttctcgggggactttggaagcggtgtcggctgggaggatgaggaggagaaggagacggaggaagcaggcgaggaggccgaggaggaggagggcgaggcaggcgaggctgacgacgggggctacatctggtagacgccctcagaagccggctgccgggggggactcaacagcagagctctgagcagcagcaggcaacttcgagaacggatccagaaatgcagtcagaaggaccctgctccacctggggggactgggagtgtgagtgtgcatggcatgtgtgtggcacagatggctgggacgggtgacagtgtgagtgcatgtgtgcatgcatgtgtgtatgtgtgtgtgtgtgtggcatgcgctgacaaatgtgtccttgatccacactgctcctggcagagtgagtaacccaaaggccccttcggcctccttgtagctgttttctttccttttgttgttggttttaaaatacattcacacacaaatacaaattgacaggtcaaaatccatgaaatgagatcccccagccgtgtcctccagcccagccctgaccccttggtttctaccctggctccccttggtttctaccctggctcaaccgacccctgtctgcccttctccctcctgcttctgaggtcaagctctggcctgcgagcctgtccccattgcaaaggggagggaggggcagggagctgtctaccagctgaggtcctcccaaaactgggccgatgtggtgtgacatccccaccagcctcagatgagacgggccaggacgcccagccacagcaagccctgtccctttgccggatccccaaacactagagaagctctcctaacccaaggcggagaatgaaggtggtggcggcagaggaggagggcagcagctgagaggccagggacagggtgcctcgccaagctgtctgaggtctgtcccaggtggcccaggtggtgcaggtagaacagggtgaggagagggggtcggctcaacaggaggaggctgtggctgcagagcctggaggagcttttaggtgttgagatggggcagctctgaatcctagaccctggaatagcctgtcccttttctctgggtctcgtggtggagccatgatctgggctgctctcttggggacactgggtggtggttacacagttgacctctgcctggctcccccttggtgcaactcctgcctccatcccccttgctggggtcccctcatccacttgagggcgcctgagggccaggagcagcaggcaaggagcctgggtctaggctaagggggtgtgtgcccacctcctccctgacccttaacactcctgtcctgcccagaccaacagagagagctgtccctgagaccccggagagaagcagctgccgaaagctgcagcctttccgcactctgagaccatgatcttcctcctgccaggggagagccacccacaggccatgtccagccccacttccctcagcccccagggcttccttctggcccctctgaggattccctagggctgccccgcagaggggcttccccaagctctgttttgaagcctgcaatgtggaaaagtgagaagtcagagggaacaggacaggtgcagccgggctctgaggccacacctcacacctcgctgttccccaacatcccctgagcagtgtgagctcatctcaccagatgagaagaggccctgtgcatttcttttgtttgtttgttgctgttttcccccacccatccagttctcctcagcaaagcaaattccttaacacctttggtggagaatttcttacccagacttggggctgtgatgcccttcagtgcgtggtgagtgcagcgtgtgtgcgtgtgcctgtgtgtgaacctgggggccatcctggtggcctgggagcgtgaggagaggccccctgtgtgctgggtgagtggtgggtgtggggtcaatgcagtgaggctctctgggtgaggctcccaacctggcagtccccagcctcccagcatctgtgagcgtctgttggactttacagaagagcctcatcccgtctgcccctcactctgccctggaatcaacatcttccgagtccttcttgggggaaatagcagagccccacttaactccataaactgcttcccattccgcagcccagttctgattgttgaggtgtcgcgtcgttccaggtcccccagtcccctctttctcctgtcctctctctgtccttcacctccccactccagccccggctcagttcagggaaatgctgttccatatcagccctctgctctctgaggcagccgcgcctctgactcggagctacttgaaacttctgctcttgctaggattggagtctacctatctcttccatttgtcccagctggagttctggaactttcctcctcggggtgggggtgggggttgttaaggatgctggggggcctggggaaggaaggagttcagaggaagggtgtcccctgtcctcttgatgtcaccctccgctcctgggacacgtgctctctctgtctctgggtcttctggctgtgcacgtttgtgtgtccttgtaaatatgttttaggaagaaagcaaaagggactgaactagcctctggtaggattgcaggggtccagccttgcctgtttccgaagcccccacactgcctttcgccccactgagactggtcccctcaaaaggtagacaaaacagcagctccctgtggagctgaagggcggcctcaaagtggctttttgttagacaaggttaaggtttcctcatgagcaaggttgcagatcggtccttcctcagctccttgatttgtgaccttgaccaaggggcctgccacccagcccctccagtgccctctcctcgatgcctcgctccttcctgcccccactcccctggcttaggcaggtaggggaattagggccatgctggaagaagcttaaccatgtgttcaaagaacggtttcttgcttgcttggtcctggaactccccttggctgccccaggcctccttggcccatgggtgctgggggaggtggatgtcagatctggtaggttgcagcagagaaaataaatgtgccttgagagaccactcagagagggtccaagggtgatggagaaggaagcatggcctgggagcttggaagggaggggtggtgggtggcggcatcttgactgccccctgttgtcccacacgtggggggtggtcaccccccttcactccagcccgcctgccttcagccttccatgagcttcacctgcttccaacttcactttggagggggtggggtccgttggcatcaacacggggaccctctgcttcaccaaagcccgagccctcagcccctggggagaacaaatggctgagctttgatacctggggtcgtcgagaggctgcgggctggcggcagtcccaggggagagacaccacagaaggagacccagacatcccgaggaagttcccagcagagcaaactgctttccagcctgaagcctgcttaaactgtgtgatgtgcaataactgagcttagagttaggaattgtgttcaagtgcttggatttccgtctgtagatttaactgctgaaattgtatctctcagtaattttagatgtcttttaaaaaattgaaaaacaaagtgttagactgtgtgcgtgtgcgttgatgggcactcaagagtcccgtgagtcatccagccctgcctttcccctgcgcccccatcctctcacgtcccgccctgcctccacttggggaccctgcctcgtgtcgtctttatctgcctattactcagcctaaggaaacaagtacactccacacatgcataaaggaaatcaaatgttatttttaagaaaatggaaaataaaaactttataaacacc

SEQ ID NO: 330 - protein, 424 aa, Homo sapien
MRAPGCGRLVLPLLLLAAAALAEGDAKGLKEGETPGNFMEDEQWLSSISQYSGKIKHWNRFRDEVEDDYIKSWEDNQQGDEALDTTKDPCQKVKCSRHKVCIAQGYQRAMCISRKKLEHRIKQPTVKLHGNKDSICKPCHMAQLASVCGSDGHTYSSVCKLEQQACLSSKQLAVRCEGPCPCPTEQAATSTADGKPETCTGQDLADLGDRLRDWFQLLHENSKQNGSASSVAGPASGLDKSLGASCKDSIGWMFSKLDTSADLFLDQTELAAINLDKYEVCIRPFFNSCDTYKDGRVSTAEWCFCFWREKPPCLAELERIQIQEAAKKKPGIFIPSCDEDGYYRKMQCDQSSGDCWCVDQLGLELTGTRTHGSPDCDDIVGFSGDFGSGVGWEDEEEKETEEAGEEAEEEEGEAGEADDGGYIW

SEQ ID NO: 331 - DNA, 626 bp, Homo sapien
tcttgactcacgccttcgccgtagcatctttcgcagcggaccgaagagaagaaaagtaggccagagccgaactctcttcctgccaagatgtctattggtgtgccgattaaagtactgcatgaggccgagggccacattgtgacatgtgagacgaacaccggtgaggtatatcgggggaagctcattgaagcagaggacaacatgaactgccagatgtccaacatcacagtcacatacagagatggccgagtggcacagctggagcaggtatacatccgtggcagcaaaatccgctttctgattttgcctgacatgctgaagaacgcacccatgttaaagagcatgaaaaataaaaaccaaggctcaggggctggccgaggaaaagctgccattctcaaggcccaagtggccgcaagaggaagaggacgtggaatgggacgtggaaacatctttcaaaagcgaagataattttctaagttgaacagaactttgtccttttttctttcaggttatctgagttcattggagtgggtgcttgtgcatatatctaggtatcttttgccatctttctctttagatcaggggaaatgtttaagctaaataaatctggggggttttttgttctg

SEQ ID NO: 332 - protein, 126 aa, Homo sapien
MSIGVPIKVLHEAEGHIVTCETNTGEVYRGKLIEAEDNMNCQMSNITVTYRDGRVAQLEQVYIRGSKIRFLILPDMLKNAPMLKSMKNKNQGSGAGRGKAAILKAQVAARGRGRGMGRGNIFQKRR

SEQ ID NO: 333 - DNA, 628 bp, Homo sapien
cctgcgtggctgggctgctcgggttagatcgtcaggaaaagcctaaagattagactgtaagaaaagaaaatagaagccatgtttcgaagacctgtattacaggtacttcgtcagtttgtaagacatgagtccgaaacaactaccagtttggttcttgaaagatccctgaatcgtgtgcacttacttgggcgagtgggtcaggaccctgtcttgagacaggtggaaggaaaaaatccagtcacaatattttctctagcaactaatgagatgtggcgatcaggggatagtgaagtttaccaactgggtgatgtcagtcaaaagacaacatggcacagaatatcagtattccggccaggcctcagagacgtggcatatcaatatgtgaaaaaggggtctcgaatttatttggaagggaaaatagactatggtgaatacatggataaaaataatgtgaggcgacaagcaacaacaatcatagctgataatattatatttctgagtgaccagacgaaagagaaggagtagaaaggatgattcttctttggccatcatttggtacagtctcatttccaagtcatgtataatctttatggcttccaaggacaagaattaaaatactcttttacgt

SEQ ID NO: 334 - protein, 148 aa, Homo sapien
MFRRPVLQVLRQFVRHESETTTSLVLERSLNRVHLLGRVGQDPVLRQVEGKNPVTIFSLATNEMWRSGDSEVYQLGDVSQKTTWHRISVFRPGLRDVAYQYVKKGSRIYLEGKIDYGEYMDKNNVRRQATTIIADNIIFLSDQTKEKE

SEQ ID NO: 335 - DNA, 2701 bp, Homo sapien
ccgccgtagcgcgtcttgggtctcccggctgccgctgctgccgccgccgcctcgggtcgtggagccaggagcgacgtcaccgccatggcaggcatcaaagctttgattagtttgtcctttggaggagcaatcggactgatgtttttgatgcttggatgtgcccttccaatatacaacaaatactggcccctctttgttctatttttttacatcctttcacctattccatactgcatagcaagaagattagtggatgatacagatgctatgagtaacgcttgtaaggaacttgccatctttcttacaacgggcattgtcgtgtcagcttttggactccctattgtatttgccagagcacatctgattgagtggggagcttgtgcacttgttctcacaggaaacacagtcatctttgcaactatactaggctttttcttggtctttggaagcaaggacgacttcagctggcagcagtggtgaaaagaaattactgaactattgtcaaatggacttcctgtcatttgttggccattcacgcacacaggagatggggcagttaatgctgaatggtatagcaagcctcttgggggtattttaggtgctcccttctcacttttattgtaagcatactattttcacagagacttgctgaaggattaaaaggattttctcttttggaaaagcttgactgatttcacacttatctatagtatgctttttgtggtgtcctgctgaatttaaatatttatgtgtttttcctgttaggttgattttttttggaatcaatatgcaatgttaaacacttttttaatgtaatcatttgcattggttaggaattcagaattccgccggctctattactggtcaagtacatcttttctcttaaaattatttagcctccattattacaaaaaattataaaaataagttttcagtcagtcaggatgacatcactcccaatgttatgcagacatacagacggttggcatacgttatagactgtatactcagtgcaaatatagctgcatttatacctcagaggggccaagtgttaatgcccatgccctccgttaagggttgttggttttactggtagacagatgttttgtggattgaaaattattttatggaattgctacagaggagtgcttttcttctcaattgttagaagaatttatgttaaactttaaggtaagggtgtaaaaacatttttgagataaggtttttatttatgtttattattgttagagtgagttgcaatgtgggaagaaatgacattgaaattccagtttttgaatcctgtttctatttataagtgaaatttgtgatctcctatcaacctttcatgttttaccctgttaaaatggacatacatggaaccactactgatgagggacagttgtatgtttgcatcatatatgccagaaaaccttcctctgcttcctccttttgacttatttggtatgttgtatatattacataaaataacttttcaaatatagtttaataacacttagaagtgtttacttacctggaaaataattgctatgccgtacattcagagtgccccctcccctgcaaggccttgccatgattaacaagtaacttgttagtcttacagataattcatgcattaacagtttaagatttagaccatggtaatagtagttcttattctctaaggttatatcatatgtaatttaaaagtatttttaagccaagtttcctgtatacctctgaactgttttgattttgagttcatcatgatagatctgctgtttccttataaaaggcatttgttgtgtgagttaatgcaaagtagccaagtccagctatatagcagcttcagaaacatacctgaccaaaaaattcccagtaaccaggcatgatcaatttatagtggtcgtttacatctaataattatcaggacttttttcaggagtgggttataaaaacattcaagttggtctgacagtattttgttaaggatatttgtttgtatgtttattcagtatacttacataaaaattatttcgccatcagccaaaactcagtaatcatgacagctgtctgttgttttatgaagtttatttctcaagaaaatgggaataaatttgggatttgttcagcttttttactaaagatgcctaaagccacaggttttattgcctaacttaagccatgacttttagatatgagatgacgggaagcaggacgaaatatcggcgtgtggctggagccttcccactggaggctgaaagtggcttgtggtattataatgttcagatttcaagaggaaggtgcaggtacacatgagttagagagctggtgagacagttgggaactctttgtgcttgtgatctactggactttttttttgcaggaagtgcattctctggtccttccctattttctgttctggatgtcagtgcagtgcactgctactgttttatccacttggccacagactttttctaacagctgcgtattatttctatatactaattgcattggcagcattgtgtctttgaccttgtatactagcttgacatagtgctgtctctgatttctaggctagttacttgagatatgaattttccatagaatatgcactgatacaacattaccattcttctatggaaagaaaacttttgatgatgaaacaataaagattttaaatatcaaaaaaaaaaaaaaaaaa

SEQ ID NO: 336 - protein, 131 aa, Homo sapien
MAGIKALISLSFGGAIGLMFLMLGCALPIYNKYWPLFVLFFYILSPIPYCIARRLVDDTDAMSNACKELAIFLTTGIVVSAFGLPIVFARAHLIEWGACALVLTGNTVIFATILGFFLVFGSKDDFSWQQW

SEQ ID NO: 337 - DNA, 2758 bp, Homo sapien
ctatccgcgcgcgtcgccggcccagtcctgtcgctgacgggaggatctgaagccggccgcaggtcaaagagtaaaatgaagtacattctggttactggtggtgttatatcaggaattggaaaaggaatcattgccagcagtgtgggcacaatactcaagtcatgtggtttacatgtaacttcaatcaaaattgacccctacattaacattgatgcaggaacattctctccttatgagcatggtgaggtttttgtgctggatgatggtggggaagtagaccttgacctgggtaactatgagcggttccttgacatccgcctcaccaaggacaataatctgaccactggaaagatataccagtatgtcattaacaaggaacggaaaggagattacttggggaaaactgtccaagttgtccctcatatcacagatgcaatccaggagtgggtgatgagacaggcgttaatacctgtagatgaagatggcctggaacctcaagtgtgtgttattgagcttggtggaaccgtgggggacatagaaagcatgccctttattgaggccttccgtcagttccaattcaaggtcaaaagagagaacttttgtaacatccacgtcagtctagttccccagccaagttcaacaggggaacagaagactaaacctacccagaatagtgttcgggaacttagaggacttgggctttccccagatctggttgtatgcaggtgctcaaatccacttgacacatcagtgaaggagaaaatatcaatgttctgccatgttgagcctgaacaagtgatctgtgtccacgatgtctcatccatctaccgagtccccttgttgttagaggagcaaggggttgtagattattttcttcgaagacttgaccttcctattgagaggcagccaagaaaaatgctgatgaaatggaaagagatggctgacagatatgatcgcttgctggagacctgctctattgcccttgtggcgaaatacaccgagttctcagactcctatgcctctgtcattaaggctctggagcattctgcactggccatcaaccacaaattggaaatcaagtacatagattctgcggacttggagcccatcacctcgcaagaagagcccgtgcgctaccacgaagcttggcagaagctctgtagtgctcatggagtgctggttccaggaggatttggtgttcgaggaacagaaggaaaaatccaagcaattgcctgggctcggaatcagaaaaagccttttttgggcgtgtgcttagggatgcagttggcagtggttgaattctcaagaaacgtgctgggatggcaagatgccaattctacagagtttgaccctacgaccagtcatcccgtggtcgtagacatgccagaacacaacccagggcagatgggcggaaccatgaggctgggcaagaggagaaccctgttccagaccaagaactcagtcatgaggaaactctatggagacgcagactacttggaagagaggcaccgccaccgatttgaggtgaatccagtctggaaaaagtgtttggaagaacaaggcttgaagtttgttggccaagatgttgaaggagagagaatggaaattgtggagttagaagatcatcccttttttgttggggttcagtaccaccctgagttcctgtccaggcctatcaagccctccccaccatactttggcctcctcctggcctctgtggggcggctctcacattacctccagaaaggctgcaggctctcacccagggacacctatagtgacaggagtggaagcagctcccctgactctgaaatcaccgaactgaagtttccatcaataaatcatgactgatcttgtagcggatgattcttcaagagacccttcaaacttgggtagagtttacagctctgactttacactcggctttggagactttctttaaattatgtttttattaagattattttattatgcggaaaggtatttgggaaacttgtcacttgcatgtcccatcacgtgtactggctcctctgtggtgtctgcctgttgcgtgacactctccttgcagttcttgagttgcggcagaacatcgcgatgggaaccgatggtgggtggggctgcagatgtccccatcggtcaccttgtttctcaactacctcgcatcattgcagatcgtagcgcgttgcctgtcgctttcccttggatacctagaccgttataaagtgtgccacatggacttaccgagcatggagagaggattttagctaggatttgaacacttggtgctgggaacctcagggtattgcttgccactaagccatgaaaccagagacaaaatctctatactgccctgagttggggggaattctcagtgccaactgtggctggtcctcattcaaagggacggtcagtttggtgtcaacatgaaacaccaagatgtctgtctctgaagcgtgattttaaaatccccatgcctgtgcgtgcgcttcctatttctagggctgggaaacactccttgcatcaaggggtcacttacagaacaaagaatcttttgggggaaacttcctctaaaaccctctcatatatagacagctttgactggagggtccatttttcttccaggatggtgttactgcagttgaagggcaatatgaagttactttcttaatgtgacctagcaataggcatagctacgtggcactatattctggccagactcgatgtgtactctaacttaagaaataaatcagtaaggcag

SEQ ID NO: 338 - protein, 591 aa, Homo sapien
MKYILVTGGVISGIGKGIIASSVGTILKSCGLHVTSIKIDPYINIDAGTFSPYEHGEVFVLDDGGEVDLDLGNYERFLDIRLTKDNNLTTGKIYQYVINKERKGDYLGKTVQVVPHITDAIQEWVMRQALIPVDEDGLEPQVCVIELGGTVGDIESMPFIEAFRQFQFKVKRENFCNIHVSLVPQPSSTGEQKTKPTQNSVRELRGLGLSPDLVVCRCSNPLDTSVKEKISMFCHVEPEQVICVHDVSSIYRVPLLLEEQGVVDYFLRRLDLPIERQPRKMLMKWKEMADRYDRLLETCSIALVAKYTEFSDSYASVIKALEHSALAINHKLEIKYIDSADLEPITSQEEPVRYHEAWQKLCSAHGVLVPGGFGVRGTEGKIQAIAWARNQKKPFLGVCLGMQLAVVEFSRNVLGWQDANSTEFDPTTSHPVVVDMPEHNPGQMGGTMRLGKRRTLFQTKNSVMRKLYGDADYLEERHRHRFEVNPVWKKCLEEQGLKFVGQDVEGERMEIVELEDHPFFVGVQYHPEFLSRPIKPSPPYFGLLLASVGRLSHYLQKGCRLSPRDTYSDRSGSSSPDSEITELKFPSINHD

SEQ ID NO: 339 - DNA, 540 bp, Homo sapien
cctggactagccgggttgtatttggaaacgcggagtgagtttttccgtgctgtgtaggggctaacaatggacacccagaaggacgttcaacctccaaagcagcaaccaatgatatatatctgtggagagtgtcacacagaaaatgaaataaaatctagggatccaatcagatgcagagaatgtggatacagaataatgtacaagaaaaggactaaaagattggtcgtttttgatgctcgatgaatgctgggaattcagaggaatgtcttcacttatacttggatttgctctcttcccatttctgattgttgtatagctttcgattttgcttacagtagttcccccttatcttcgggagatacattccaaggcccccagtgaactcctgaaacctcaaacagtaccaaacctttatacactgttttttccatatatatatacctatgataaagtataatgtataaattaagcatagcaagagattaataataatgtaatagaacaatgataacatactataataaaagttatgtgaatgtg

SEQ ID NO: 340 - protein, 58 aa, Homo sapien
MDTQKDVQPPKQQPMIYICGECHTENEIKSRDPIRCRECGYRIMYKKRTKRLVVFDAR

SEQ ID NO: 341 - DNA, 1103 bp, Homo sapien
cttcggtcctgctgtagtgccttctgcgccaggcccggttcaatcagcggccacaactgtctagggctcagacaccaccagccaatgagggagggcacgtggagccgcgtctgggctcgcggctcctgaccaatggggaagtggcatgtgggagggcgccggggttccccccgccaatggggagctacggcgcgcggccgggacttggaggcggtgcggcgcggcgggtgcggttcagtcggtcggcggcggcagcggaggaggaggaggaggaggaggatgaggaggatgaggaggatgtgggccacgcaggggctggcggtgcgcgtggctctgagcgtgctgccgggcagccgggcgctgcggccgggcgactgcgaagtttgtatttcttatctgggaagattttaccaggacctcaaagacagagatgtcacattctcaccagccactattgaaaacgaacttataaagttctgccgggaagcaagaggcaaagagaatcggttgtgctactatatcggggccacagatgatgcagccaccaaaatcatcaatgaggtatcaaagcctctggcccaccacatccctgtggagaagatctgtgagaagcttaagaagaaggacagccagatatgtgagcttaagtatgacaagcagatcgacctgagcacagtggacctgaagaagctccgagttaaagagctgaagaagattctggatgactggggggagacatgcaaaggctgtgcagaaaagtctgactacatccggaagataaatgaactgatgcctaaatatgcccccaaggcagccagtgcaccgaccgatttgtagtctgctcaatctctgttgcacctgagggggaaaaaacagttcaactgcttactcccaaaacagcctttttgtaatttattttttaagtgggctcctgacaatactgtatcagatgtgaagcctggagctttcctgatgatgctggccctacagtacccccatgaggggattcccttccttctgttgctggtgtactctaggacttcaaagtgtgtctgggatttttttattaaagaaaaaaaatttctagctgtcaaaaaaaaaaa

SEQ ID NO: 342 - protein, 234 aa, Homo sapien
MGKWHVGGRRGSPRQWGATARGRDLEAVRRGGCGSVGRRRQRRRRRRRRMRRMRRMWATQGLAVRVALSVLPGSRALRPGDCEVCISYLGRFYQDLKDRDVTFSPATIENELIKFCREARGKENRLCYYIGATDDAATKIINEVSKPLAHHIPVEKICEKLKKKDSQICELKYDKQIDLSTVDLKKLRVKELKKILDDWGETCKGCAEKSDYIRKINELMPKYAPKAASAPTDL

SEQ ID NO: 343 - DNA, 736 bp, Homo sapien
cgagctggagaggtggtcggagaagtaggaacctcctgccgggctcgtggcggcttctgtccgctccgcggagggaagcgccttccccacaggacatcaatgcaagcttgaataagaaaaacaaattcttcctcctaagccatggcatatcagttatacagaaatactactttgggaaacagtcttcaggagagcctagatgagctcatacagtctcaacagatcaccccccaacttgcccttcaagttctacttcagtttgataaggctataaatgcagcactggctcagagggtcaggaacagagtcaatttcaggggctctctaaatacgtacagattctgcgataatgtgtggacttttgtactgaatgatgttgaattcagagaggtgacagaacttattaaagtggataaagtgaaaattgtagcctgtgatggtaaaaatactggctccaatactacagaatgaatagaaaaaatatgacttttttacaccatcttctgttattcattgcttttgaagagaagcatagaagagactttttatttattctagaattgcagaaatgactacactgtgctataccagagaattccagtagaaagaaacttgtaactctgtagcctcttacatcacctttattatacagcatgaaaaaccataacttttttttaaggacaaaagttgttgccttcctaagaaccttctttaataaactcattttaaaactctg

SEQ ID NO: 344 - protein, 109 aa, Homo sapien
MAYQLYRNTTLGNSLQESLDELIQSQQITPQLALQVLLQFDKAINAALAQRVRNRVNFRGSLNTYRFCDNVWTFVLNDVEFREVTELIKVDKVKIVACDGKNTGSNTTE

SEQ ID NO: 345 - DNA, 1633 bp, Homo sapien
gaattccccccccccccccagtgctccgcgcgctcttgacgtccggagcccctggagtaggcgcttccggccattcatactgcagtcggtcagtgttcggttgaaggattctgtgtgctgtcggacccagagggtgacggcgccgctaggatgaagctcgtgagatttttgatgaaattgagtcatgaaactgtaaccattgaattgaagaacggaacacaggtccatggaacaatcacaggtgtggatgtcagcatgaatacacatcttaaagctgtgaaaatgaccctgaagaacagagaacctgtacagctggaaacgctgagtattcgaggaaataacattcggtattttattctaccagacagtttacctctggatacactacttgtggatgttgaacctaaggtgaaatctaagaaaagggaagctgttgcaggaagaggcagaggaagaggaagaggaagaggacgtggccgtggcagaggaagagggggtcctaggcgataatgtctctcaagatttcaaagtcatatgagatttgggatattttttgtacaggttgtgtttgtttatgtcagtttttaataaacataaatgtgggacagagctgtctatttagtatatcaaagttttagtagtttcctccacattcacgaaattaccacagtgagagctaagcatttctactgggcagtttcatttttagttgatcaggttttaagtttttgaactaaaatttttctttttctttttatgatgaataaggttaaaataaaagccttagacaaattaaatttggcagagtttaattgagcaaaggacaattcacaaatcaggtagcccctgaaccataataggctcagaggcttcagcccagctgcatagttgaagatttatggacagaaggaaagtgatgtatggaaaatggaagtgagatacagcaacagccggattagttacagttcagcgtttgccttatttgaatatggtttgaacagttcgctgtctttggttggctgaaacttagtgattgccacaagagtagggtaccgtctgtttacacgtccagttaggctacagttctatgtactgagaaacctttaagctgaacttgagatatgtaaagagactttaggctaaacttaacaatatatataggaatatatcccttctacttcacatgcactgaatatgcattttattgctttactcttcattctgtggcacctacccacaggggaagtaagaagtttgttttggtatttcggaaactaaagtccttatgggatggggtctagaattgattctcctttcctgagttttactccacggagtcttaggtacctggtaaaaagttgtcttctaaattaagggtcattgctttgttgtctagctgctaatgtcttacttttgtttcttttgctttttaatcagttcttaataggatatagttttatgttttccaagttataacttggagttaatggtcactagattatcagttatgagcagtgttaaaatctcctattaatgtgtaatgtacctgtcagtgcctcctttattaaggggttctttgagaataaaagagaaaagacctactttatttgacagcaaaaaaaaaaaggaattc

SEQ ID NO: 346 - protein, 119 aa, Homo sapien
MKLVRFLMKLSHETVTIELKNGTQVHGTITGVDVSMNTHLKAVKMTLKNREPVQLETLSIRGNNIRYFILPDSLPLDTLLVDVEPKVKSKKREAVAGRGRGRGRGRGRGRGRGRGGPRR

SEQ ID NO: 347 - DNA, 2714 bp, Homo sapien
gagtggctgttgagcggcgccgcgggagttccgcaggtttcccgtgttcgcagcggagccggaggccagctgaacccggccgtgggatcccggataggaggaggaggggacccataggacgcgttaacatggacctggaaaacaaagtgaagaagatgggcttaggtcacgagcaaggatttggagccccttgtttaaaatgcaaagaaaaatgtgaaggattcgaactgcacttctggagaaaaatatgtcgtaactgcaagtgtggccaagaagagcatgatgtcctcttgagcaatgaagaggatcgaaaagtgggaaaactttttgaagacaccaagtataccactctgattgcaaaactaaagtcagatggaattcccatgtataaacgcaatgttatgatattgacgaatccagttgctgccaagaagaatgtctccatcaatacagttacctatgagtgggctcctcctgtccagaatcaagcattggccaggcagtacatgcagatgctacccaaggaaaagcagccagtagcaggctcagagggggcacagtaccggaagaagcagctggcaaagcagctccctgcacatgaccaggacccttcaaagtgccatgagttgtctcccagagaggtgaaggagatggagcagtttgtgaagaaatataagagcgaagctctgggagtaggagatgtcaaacttccctgtgagatggatgcccaaggccccaaacaaatgaacattcctggaggggatagaagcaccccagcagcagtgggggccatggaggacaaatctgctgagcacaaaagaactcaatattcctgctattgctgcaaactgagtatgaaagaaggtgacccagccatctatgccgaaagggctggctatgataaactgtggcacccagcttgttttgtctgcagcacctgccatgaactcctggttgacatgatttatttttggaagaatgagaagctatactgtggcagacattactgtgacagcgagaaaccccgatgtgctggctgtgacgagctgatattcagcaatgagtatacccaggcagaaaaccagaattggcacctgaaacacttctgctgctttgactgtgatagcattctagctggggagatatacgtgatggtcaatgacaagcccgtgtgcaagccctgctatgtgaagaatcacgctgtggtgtgtcaaggatgccacaatgccatcgacccagaagtgcagcgggtgacctataacaatttcagctggcatgcatccacagagtgctttctgtgctcttgctgcagcaaatgcctcattgggcagaagttcatgccagtagaagggatggttttctgttcagtggaatgtaagaagaggatgtcttaggaggagggcacccagaagtatcgagccatagctatccaaagtggtctgcatttctactgtaaaatgcaatttgaaaaaaataaaacgcaaaaaaagaaactgtaaaggaaaccaagagattttgtttaatttttttggccattttttcttcatcaattttttttcggtctcaacttttaaacttggtttaagcatttgatttgtaaaacagtaaataattgtatctttccatagcttttcaaatgtgaaatcatttttggaagcttggatctcattaaacttcatgtctctattccatttgtgccacacacttaaaagttagtgtactgaatggaaagatgagcattcctagttctacacttcttttttccccctcatgtgtaaaatgaaaagaaaactaaatttgccctaataccaagggcgctacgtttattgcctcgtcttattcactgacctttgtaatgatacacagtgaattctttttgacaaagagaaatgcagtgtagtatgcagagctgctgttttaatgccctatgcatttactctttcctgatttaggcagaggtggcattttctttattgcatttctctatttttttaatgtaccctaccttcagtattctctttgtaagttggtgacttgcatctgtggccttgaatattttattatcacatgtggcataacagtatccacactttttagttctttattttttttttttattttgagcaattctcctgcctcagcctcccaaatagctgggattacaggtgcatgccaccacacccagctaatttttgtatttttagtagagacaggttttcaccatgttagccaggctggtctcaaactcctgacctcagatgatccgcctgccttggcctcccaaagtgctgggattacaggtgtgggagccaccatgcctgacccacacactttttacttgtatagatgatttttggcttggacataaaagccaagccacccatttgcttttaatccaaagaacatgtatagtttttgtacccagagactatgatttatattgattgcacttgcctgccatgatttagataagattttttttgcatggtttttattctttcctaatggatcctgttttataatacttccaagcctgtccatggatatatcaaatgtcttcacttgtatgttttcatggctaggtatttctaatgtttattcttccctgtgtacttctacacatagctatgcactatgaaaattaaatggaatgaatgatatgtatattactcaaaataaagtttctttcactttaaaaaaaaaaaaaaaaaaaa

SEQ ID NO: 348 - protein, 421 aa, Homo sapien
MDLENKVKKMGLGHEQGFGAPCLKCKEKCEGFELHFWRKICRNCKCGQEEHDVLLSNEEDRKVGKLFEDTKYTTLIAKLKSDGIPMYKRNVMILTNPVAAKKNVSINTVTYEWAPPVQNQALARQYMQMLPKEKQPVAGSEGAQYRKKQLAKQLPAHDQDPSKCHELSPREVKEMEQFVKKYKSEALGVGDVKLPCEMDAQGPKQMNIPGGDRSTPAAVGAMEDKSAEHKRTQYSCYCCKLSMKEGDPAIYAERAGYDKLWHPACFVCSTCHELLVDMIYFWKNEKLYCGRHYCDSEKPRCAGCDELIFSNEYTQAENQNWHLKHFCCFDCDSILAGEIYVMVNDKPVCKPCYVKNHAVVCQGCHNAIDPEVQRVTYNNFSWHASTECFLCSCCSKCLIGQKFMPVEGMVFCSVECKKRMS

SEQ ID NO: 349 - DNA, 4565 bp, Homo sapien
gcactgctgctgccaccgccgtcgccgccgcgccgccgcgccgctgctgctgccggtgctaaggagttcgctggagccctttcctcagacccggcccggtcttcgcgcccggactcctggcgccagcgctaggcgcactcaccgctctgacgggtgcagacgcgggagttgtcccagactgtggagtggcgggcacggccccagccccccttcccttccctgaccccttcttgccatcgccccagacatggggaacgcggcgaccgccaagaaaggcagcgaggtggagagcgtgaaagagtttctagccaaagccaaagaagactttttgaaaaaatgggagaatccaactcagaataatgccggacttgaagattttgaaaggaaaaaaacccttggaacaggttcatttggaagagtcatgttggtaaaacacaaagccactgaacagtattatgccatgaagatcttagataagcagaaggttgttaaactgaagcaaatagagcatactttgaatgagaaaagaatattacaggcagtgaattttcctttccttgttcgactggagtatgcttttaaggataattctaatttatacatggttatggaatatgtccctgggggtgaaatgttttcacatctaagaagaattggaaggttcagtgagccccatgcacggttctatgcagctcagatagtgctaacattcgagtacctccattcactagacctcatctacagagatctaaaacctgaaaatctcttaattgaccatcaaggctatatccaggtcacagactttgggtttgccaaaagagttaaaggcagaacttggacattatgtggaactccagagtatttggctccagaaataattctcagcaagggctacaataaggcagtggattggtgggcattaggagtgctaatctatgaaatggcagctggctatcccccattctttgcagaccaaccaattcagatttatgaaaagattgtttctggaaaggtccgattcccatcccacttcagttcagatctcaaggaccttctacggaacctgctgcaggtggatttgaccaagagatttggaaatctaaagaatggtgtcagtgatataaaaactcacaagtggtttgccacgacagattggattgctatttaccagaggaaggttgaagctccattcataccaaagtttagaggctctggagataccagcaactttgatgactatgaagaagaagatatccgtgtctctataacagaaaaatgtgcaaaagaatttggtgaattttaaagaggaacaagatgacatctgagctcacactcagtgtttgcactctgttgagagataaggtagagctgagaccgtccttgttgaagcagttacctagttccttcattccaacgactgagtgaggtctttattgccatcatcccgtgtgcgcactctgcatccacctatgtaacaaggcaccgctaagcaagcattgtctgtgccataacacagtactagaccactttcttacttctctttgggttgtctttctcctctcctacatccatttcttccttttccaatttcattggttttctctaaacagtgctccattttattttgttggtgtttcagatgggcagtgttatggctacgtgatatttgaagggaaggataagtgttgctttcagtagttattgccaatattgttgttggtcaatggcttgaagataaactttctaataattattatttctttgagtagctcagacttggttttgccaaaactcttggtaatttttgaagatagactgtcttatcaccaaggaaatttatacaaattaagactaactttcttggaattcactattctggcaataaattttggtagactaatacagtacagctagacccagaaatttggaaggctgtagatcagaggttctagttccctttccctccttttatatcctcctctccttgagtaatgaagtgaccagcctgtgtagtgtgacaaacgtgtctcattcagcaggaaaaactaatgatatggatcatcacccagattctctcacttggtaccagcatttctgtaggtattagagaagagttctaagttttctaaaccttaactgttccttaaggattttagccagtattttaatagaacatgattaatgaaagtgacaaattttaaattttctctaatagtcctcatcataaactttttaaaggaaaataagcaaactaaaaagaacattggtttagataaatacttatactttgcaaagtcaaaaatggcttgatttttggaaacaatatagaggtattcatatttaaatgagggtttacatttgttttgttttgtaaccgttaaaaagaagttgtttccagctaattattgtggtgtactatatttgtgagcctagggtaggggcactgctgcaacttctgctttcatcccatgcctcatcaatgaggaaagggaacaaagtgtataaaactgccacaattgtattttaattttgaggtatgatattttcagatatttcataatttctaacctctgttctctcagtaaacagaatgtctgatcgatcatgcagatacaatgttggtatttgagaggttagtttttttcctacacttttttttgccaactgacttaacaacattgctgtcaggtggaaatttcaagcacttttgcacatttagttcagtgtttgttgagaatccatggcttaacccacttgttttgctatttttttctttgcttttaattttccccatctgattttatctctgcgtttcagtgacctaccttaaaacaacacacgagaagagttaaactgggttcattttaatgatcaatttacctgcatataaaatttatttttaatcaagctgatcttaatgtatataatcattctatttgctttattatcggtgcaggtaggtcattaacaccacttcttttcatctgtaccacaccctggtgaaacctttgaagacataaaaaaaacctgtctgagatgttctttctaccaatctatatgtctttcggttatcaagtgtttctgcatggtaatgtcatgtaaatgctgatattgatttcactggtccatctatatttaaaacgtgcaagaaaaaaataaaatactctgctctagcaagttttgtgtaacaaaggcatatcgtcatgttaataaatttaaaacatcattcgtataaaatattttaattttcttgtatttcatttagacccaagaacatgctgaccaatgtgttctatatgtaaactacaaattctatggtagctttgttgtatattattgtaaaattattttaataagtcatggggatgacaatttgattattacaatttagttttcagtaatcaaaaagatttctatgaattctaaaaaatatttttttctatgaaattactagtgcccagctgtagaatctaccttaggtagatgatccctagacatacgttggttttgagggctattcagccattccattttactctctatttaaaggccgtgagcaagcttgtcatgagcaaatatgtcaagggagtcaatttctgaccaatcaagtacactaaattagaatatttttaaagtatgtaacattcccagtttcagccacaatttagccaagaataagataaaaacttgaataagaagtaagtagcataaatcagtatttaacctaaaattacatatttgaaacagaagatattatgttatgctcagtaaataattaagagatggcattgtgtaagaaggagccctagactgaaagtcaagacatctgaatttcaggctggaaaactatcagtatgatctcagcctcagttctcttgtctgtaaaatggaagaactggattaggcagtttgtaagattcctcctaactttcacagtcgatgacaagattgtctttttatctgatattttgaagggtatattgctttgaagtaagtctcaataaggcaatatattttagggcatctttcttcttatctctgacagtgttcttaaaattatttgaatatcataagagccttggtgtctgtcctaattcctttctcactcaccgatgctgaatacccagttgaatcaaactgtcaacctaccaaaaacgatattgtggcttatgggtattgctgtctcattcttggtatattcttgtgttaactgcccattggcctgaaaatactcattgtaagcctgaaaaaaaaaatctttcccactgttttttctgcttgttgtaagaatcaaatgaaataatgtatgtgaaagcaccttgtaaactgtaacctatcaatgtaaaatgttaaggtgtgttgttatttcattaattacttctttgtttagaatggaatttcctatgcactactgtagctaggaaatgctgaaaacaactgtgttttttaattaatcaataactgcaaaattaaagtaccttcaatggataagccaaaaaaatctatgtcgggtgcggagaaagaggtaatgaaatggcaggaattcgatatcagcttatcatacc

SEQ ID NO: 350 - protein, 433 aa, Homo sapien
  unsure 74: unknown amino acid
HCCCHRRRRRAAAPLLLPVLRSSLEPFPQTRPGLRARTPGASARRTHRSDGCRRGSCPRLWSGGHGPSPPSLPXPLLAIAPDMGNAATAKKGSEVESVKEFLAKAKEDFLKKWENPTQNNAGLEDFERKKTLGTGSFGRVMLVKHKATEQYYAMKILDKQKVVKLKQIEHTLNEKRILQAVNFPFLVRLEYAFKDNSNLYMVMEYVPGGEMFSHLRRIGRFSEPHARFYAAQIVLTFEYLHSLDLIYRDLKPENLLIDHQGYIQVTDFGFAKRVKGRTWTLCGTPEYLAPEIILSKGYNKAVDWWALGVLIYEMAAGYPPFFADQPIQIYEKIVSGKVRFPSHFSSDLKDLLRNLLQVDLTKRFGNLKNGVSDIKTHKWFATTDWIAIYQRKVEAPFIPKFRGSGDTSNFDDYEEEDIRVSITEKCAKEFGEF

SEQ ID NO: 351 - DNA, 2945 bp, Homo sapien
ccagccccccttcccttccctgaccccttcttgccatcgccccagacatggggaacgcggcgaccgccaagaaaggcagcgaggtggagagcgtgaaagagtttctagccaaagccaaagaagactttttgaaaaaatgggagaatccaactcagaataatgccggacttgaagattttgaaaggaaaaaaacccttggaacaggttcatttggaagagtcatgttggtaaaacacaaagccactgaacagtattatgccatgaagatcttagataagcagaaggttgttaaactgaagcaaatagagcatactttgaatgagaaaagaatattacaggcagtgaattttcctttccttgttcgactggagtatgcttttaaggataattctaatttatacatggttatggaatatgtccctgggggtgaaatgttttcacatctaagaagaattggaaggttcagtgagccccatgcacggttctatgcagctcagatagtgctaacattcgagtacctccattcactagacctcatctacagagatctaaaacctgaaaatctcttaattgaccatcaaggctatatccaggtcacagactttgggtttgccaaaagagttaaaggcagaacttggacattatgtggaactccagagtatttggctccagaaataattctcagcaagggctacaataaggcagtggattggtgggcattaggagtgctaatctatgaaatggcagctggctatcccccattctttgcagaccaaccaattcagatttatgaaaagattgtttctggaaaggtccgattcccatcccacttcagttcagatctcaaggaccttctacggaacctgctgcaggtggatttgaccaagagatttggaaatctaaagaatggtgtcagtgatataaaaactcacaagtggtttgccacgacagattggattgctatttaccagaggaaggttgaagctccattcataccaaagtttagaggctctggagataccagcaactttgatgactatgaagaagaagatatccgtgtctctataacagaaaaatgtgcaaaagaatttggtgaattttaaagaggaacaagatgacatctgagctcacactcagtgtttgcactctgttgagagataaggtagagctgagaccgtccttgttgaagcagttacctagttccttcattccaacgactgagtgaggtctttattgccatcatccgtgtgcgcactctgcatccacctatgtaacaaggcaccgctaagcaagcattgtctgtgccataacacagtactagaccactttcttacttctctttgggttgtctttctcctctcctacatccatttcttccttttcaatttcattggttttctctaaacagtgctccattttattttgttggtgtttcagatgggcagtgttatggctacgtgatatttgaagggaaggataagtgttgctttcagtagttattgccaatattgttgttggtcaatggcttgaagataaactttctaataattattatttctttgagtagctcagacttggttttgccaaaactcttggtaatttttgaagatagactgtcttatcaccaaggaaatttatacaaattaagactaactttcttggaattcactattctggcaataaattttggtagactaatacagtacagctagacccagaaatttggaaggctgtagatcagaggttctagttccctttccctccttttatatcctcctctccttgagtaatgaagtgaccagcctgtgtagtgtgacaaacgtgtctcattcagcaggaaaaactaatgatatggatcatcacccagattctctcacttggtaccagcatttctgtaggtattagagaagagttctaagttttctaaaccttaactgttccttaaggattttagccagtattttaatagaacatgattaatgaaagtgacaaattttaaattttctctaatagtcctcatcataaactttttaaaggaaaataagcaaactaaaaagaacattggtttagataaatacttatactttgcaaagtcaaaaatggcttgatttttggaaacaatatagaggtattcatatttaaatgagggtttacatttgttttgttttgtaaccgttaaaaagaagttgtttccagctaattattgtggtgtactatatttgtgagcctagggtaggggcactgctgcaacttctgctttcatcccatgcctcatcaatgaggaaagggaacaaagtgtataaaacctgccacaattgtattttaattttgaggtatgatattttcagatatttcataatttctaacctctgttctctcagtaaacagaatgtctgatcgatcatgcagatacaatgttggtatttgagaggttagtttttttcctacacttttttttgccaactgacttaacaacattgctgtcaggtggaaatttcaagcacttttgcacatttagttcagtgtttgttgagaatccatggcttaacccacttgttttgctatttttttctttgcttttaattttccccatctgattttatctctgcgtttcagtgacctaccttaaaacaacacacgagaagagttaaactgggttcattttaatgatcaatttacctgcatataaaatttatttttaatcaagctgatcttaatgtatataatcattctatttgctttattatcggtgcaggtaggtcattaacaccacttcttttcatctgtaccacaccctggtgaaacctttgaagacataaaaaaaacctgtctgagatgttctttctaccaatctatatgtctttcggttatcaagtgtttctgcatggtaatgtcatgtaaatgctgatattgatttcactggtccatctatatttaaaacgtgc

SEQ ID NO: 352 - protein, 351 aa, Homo sapien
MGNAATAKKGSEVESVKEFLAKAKEDFLKKWENPTQNNAGLEDFERKKTLGTGSFGRVMLVKHKATEQYYAMKILDKQKVVKLKQIEHTLNEKRILQAVNFPFLVRLEYAFKDNSNLYMVMEYVPGGEMFSHLRRIGRFSEPHARFYAAQIVLTFEYLHSLDLIYRDLKPENLLIDHQGYIQVTDFGFAKRVKGRTWTLCGTPEYLAPEIILSKGYNKAVDWWALGVLIYEMAAGYPPFFADQPIQIYEKIVSGKVRFPSHFSSDLKDLLRNLLQVDLTKRFGNLKNGVSDIKTHKWFATTDWIAIYQRKVEAPFIPKFRGSGDTSNFDDYEEEDIRVSITEKCAKEFGEF

SEQ ID NO: 353 - DNA, 7522 bp, Homo sapien
cccgggcgagcccgccgtgcgcacagctctgcccgccgcccctggagcggatccccagccgtccctgggcgttctcccgggttctagcaaagccccccggggtgcccatcagtttccttgggtgactacagcgtgtgttttttctttcctctttcccctgcctgtgtgcccttctccaggatggcagaggcggaattgcacaaggaaaggctgcaagccatagcagaaaaaagaaagaggcagactgaaatagaaggcaagcgacaacagcttgacgagcagatacttctgctgcagcattccaagtccaaagtgcttcgggagaaatggctgctgcagggcatacccgctggaactgccgaagaggaggaagccaggaggcggcagtctgaagaggatgagttcagagtcaagcaacttgaagataacattcagaggctggagcaagaaatacaaacgctagaaagtgaagagtcccagatatctgccaaagagcaaatcatcctagagaaactgaaggaaacagaaaaatccttcaaggactttcagaagggtttctccagtacggatggagatgcagtaaattacatttcctcccagcttcccgacctgccaatcctctgttcacgaacagcagaaccatcacctgggcaggacgggaccagcagagcggctggagtcgggtgggagaatgtgctgctaaaggaaggtgagtcagcctcgaacgccacagaaacatccggcccagacatgactatcaagaagcctccccagctttctgaggatgatatctggctaaaaagcgagggagacaactatagtgccaccctcctggagcctgctgccagctctctttccccagatcacaaaaacatggaaattgaggtgtctgttgcagaatgtaaaagtgttcctggaatcacctctaccccacatcccatggaccatccctccgctttctattcacccccgcataatggcctccttactgatcaccacgaatccctggataatgatgttgccagagagatccgctatctagatgaggtgctagaggccaactgctgtgattctgctgtggatggaacgtacaatggaacatcctccccagagcctggtgcagtggttctggtgggcggcctaagcccccctgtccacgaggcgacccagccagaacccactgaaagaacagctagccggcaggcacctcctcacatcgagctcagtaatagcagccctgaccccatggcagaggcagaaagaacaaatggccattcccccagccagcctagagatgcgctgggggacagcctgcaggtgcctgtcagccccagctccacaaccagctcacggtgttcttcccgagatggagagttcactctcaccacactgaaaaaggaggccaagtttgagctgcgtgccttccatgaggacaagaagccctccaagctctttgaggatgacgagcatgagaaagaacaatactgcattagaaaagtgaggccttcagaggagatgctggagctggaaaaggagaggagagagctcatccgcagccaggccgtcaagaagaatcctggcattgcagcaaaatggtggaatcccccgcaggaaaaaaccatcgaggagcagctggacgaggaacatctggagtcgcacaaaaagtacaaggagcgcaaagagagaagggcacagcaggaacagttgctgctgcagaagcagttacagcagcagcagcagcagcccccatcgcagctctgcacagcccctgcctcttctcatgaacgcgcaagcatgattgacaaagcaaaggaggacattgtcacagagcagatagatttctctgctgctcgcaaacaatttcagctgatggagaattccaggcaagcggtggccaagggccagagtacacccaggctgttctccatcaagcctttctacaggcctctggggtcagtcaactcagacaagccactgactaatccgagaccaccttctgtcgggggacctccagaagacagtggtgcctcagccgccaagggacagaaatcccccggtgccctggagaccccatcggcagcaggaagccagggcaacacagcctctcaggggaaggaagggccctacagcgagccttctaaacgtgggcccttatctaaactgtgggctgaggatggagaatttacgagcgcccgggctgtcctcactgtggtcaaggatgatgaccatgggattttggatcagttctcaagatctgtcaatgtctccttgacccaagaggagcttgactctggtctggacgaattgtcggtgaggtctcaggataccacagtcctggagaccctatccaatgatttcagcatggacaacatcagtgacagcggggcatccaatgagacaaccaatgccctccaggaaaattcactggctgatttttctctgccccagacaccacaaactgacaacccctcagagggccgaggagaaggcgtctccaagtcatttagtgatcatggtttctattccccttcctccacgctgggggactctccgttggttgatgaccccttggagtatcaggctggcctcctggtgcagaatgccattcaacaagccatagccgagcaggtggataaagctgtgtccaaaaccagcagggatggagcagagcaacagggacctgaagcgactgtagaggaagctgaagctgcggctttcggctcagaaaagcctcagagcatgtttgagccacctcaggtgtcttctcctgttcaagagaaaagggatgtattaccaaagattctgcctgctgaagacagggcgctcagggaaagggggcccccccagccactgccagctgtgcagcccagtggcccgattaacatggaggagaccaggcccgaaggaagctatttcagcaagtactcggaggcagctgagctgagaagcacagcctccctcctggccactcaagaatctgacgtgatggttgggcctttcaagctgaggtccaggaaacagcggactttgtccatgattgaggaagagatccgagcagctcaggaaagggaagaggagctgaagaggcagagacaagtcttgcagagtacgcagagccccaggacaaagaatgccccatcactgccctccagaacatgctacaaaactgctccagggaaaatagagaaagtcaaacctcctccatcccccaccactgaaggccccagcttgcagcctgacttagcccctgaagaggctgccggaacccagcggcccaagaatctgatgcagaccctcatggaagactatgagacacacaaatctaaaaggcgcgagagaatggatgatagtagttacacttctaagttactgtcttgcaaggtgacttccgaggtcctcgaggccacacgggttaatcgaagaaagagcgcactggctttgcgctgggaagcagggatctatgccaaccaggaggaagaagacaacgaataaacttccttcaacccaggaagcgtctttggtgcttgggagaccaagaaaccaagaaattaacaactgaaagcattttaatggactatttattaaagtgcaaacaaactcagcaatccttatgtagaccagaagctgcaatatacaatgatgaaaatgaaacgaaaaggaagtccccccatcagactctggacacccaggaatcaaaagagaaaggacttttttggtgactcaatcccagtgtctggtttggggccaatctacaatggatccaaaaggacaaaacatgttacaagcaaatcaacatagttgctgcaggcggaactgagaccagcctctctgggcgatgaaggacaatggtggtagggccacttagagagcagtagggcccaggctggtgcagcctacatggcacaggatatttccctgcaccagtttcccacctgtcacttgcagcatcagagggtgttgcattaactccattttctccagcagccataaaatgaatggcgtttctctccatatttgcccagaagaggcagttatgattccacttctcctacatttaattatttttaattgagaacaactcatgatcacaattcataaaatccatattttaagacaatagttcttcatgtcacaaacacaatctattctacatgaggaggctgagaaaggggaagagaaaaacaaaccaaatggatgatgttagctttaggatcgtgtctgcttataatattcactgatctgcagtttatgagaacacattttcacagttatgtttcttcataggaaaactatatttagtgggcaacaactatttttatgatgggatgggggagtatatacacgtatagaatctgtacgcgttgaacaacttggttcaagatggtgggggcatttttagagcggcaataattgaaaaaaaaggcgaactctgccttggagaggtagatgataagaaataaaaaggtgtttataactattttgtattataaagtgggccttagagataggaagaagaatgatggattccttttggatcaatcagaaaggaaacacgaaagaaaagtcaggaaggtagagagagaaaaagggagggaaggagaaagaatgggaataaaataaggaggtaagagatactatttttgctgagcaaccagtgtgtttcaggatgatacaaagaaaaatatagaatagaaataagtgcaggcttggaatcagctacaaatcctaaagatggggtgtgtgtggatgtgtgtgtgtgtgtgtgtacaccattgtgtgtttgtaaaatgtgtatgttcatgagtaagggtgtgtgtgtgtgtgtattaaaattccagagtgaccgtggcacttgggtgtacaggtaattcctccagagctgtttgctggcttcaggagtggagtgagaatttcttttttatgaaaagggatataaaggcaccgagctgatgcagtatttgtaatattaagttgacctaacaaggtatttgcatgagtcacaattacaaagttttgagcggttttgtaatttgacatttaggagagtctcctatttattctcatactttacattcatgcttagtatactatagaggatgccagctttaatctttctgtcatttaaagcaatatgataagggtattcaataattgggtgccctaaatttctggatgagaaaattttcaattctggccatgagaaagaaaaaaaaataaacagccttctttttttttcctttgttttaaaactgtggttttttaaaaaagcaataattaactcagacctcactaaaaatcatttttgtttttatattgttatgtcataagctctattatgttattctaacaagtagcaatttcacaaaatttgtatgtagatgttaacgcacatttcctttgcttcttttattagactagtgttgactttggggggggacatttattcacaaatgagaagtaggcacaaagtaaaaaatggaaccatctactaacaaggatcctttaaaactgccaagggagctctaacttgaagccacatcctacagatggcagcccaaatagcacatgggcaattggcaccatctttatatggttgagtctcctgaatattttgaatgaattctcaacaaaatgtgctagccactggggacgcaaaacaagtaagatccctgttgcaagaaattcattttatagtgagggaggttggcatggagactaaaattctcaggaaaatgagatccgtgttagattagaagtcctgatgtgaaatgggaggactcaggaaggaggatcgtctttacctgaggatttctagccagaggtcccagatgcctgggctgagaacccagcgataagggggcgttcccaaagcagacacagggataagaacagaggaggcagcagcattgcacagccccaggcacagtggcagttaggatggctggagagtaggatagttctatgggttgcccaaaaaatgtgatgcgcttcatgttttctctgactcatggatctggtagagaccatagacatgatatagactaacttccccatttttcacaagaggaaaccatccttatgacttaccttaaagttttttgttctgttttgaaggaaaccatgtgcttcatgaaacctacagttgacaagagaatgtacagctaagagaaaagcttaagaggccacactattcgcggaatggctttagaggcagatgaagtggtctttgaccacagttgattgaaccagagcacttattgcttaaagaataacagagttctagagctgggggttcttgggccatgctccgtgtgtggataaggaaagaaatactgtttctgggactctcccacagtcacaaagctgttttcactgtggcccctacatctcttaacttttgctattactcctatgctgccttccggattactgctgtctatcttcttgctccactcactgaagatcctattataatcccatgaaaatgtaaattacagtttacttgggagagccagattttctctgtgctcttgagttttttattcattcaagaaaccttgggccaccgctttgtacatagcaccgtgctaggctctgggatcccaaatggacccttttaactttctgaagatgggaccgtcccctggaggaaagtcattcctgcctaatccatcgagagaaagaggcttacgaaaaactttgcctctgatgctcagccccacccccaaatagcacacaagcttgttaaccccacctcttacaaaatgtttagattctgtaggtgttaaaagcctttctggaagtattgcattctgccgtgtttataggtgttcactttcctccagagctgattaactactgacatgacttggctttctcatccagaaattatggaaacagggtctgtcagtggcaggaggccgtgctgtgttttacttggatgacacaatgcagtttacttgcctcttcatacccatgcatgctgctcaccctagacaatgacatataagccgtatatagatcaatgtccacatatatatacacacacacatatatatatataaagtgtaacaaggaacactaaaacagtgttgattcttgtctctgaagacaaataattaaaccttttttttcccaactaaagaatggatttaattaaactatgtattgaaaaaaaagtagcctaagtgttagagatggtgaatatattccattttagttaaagaacaaatttcctgaattttaagcattcagtgagctgccaattttgattttgtgttgctctttacccaaattattttttctttgtttttctttttttgggggaggaggggaaaaaagcagcaatactgtgtttggaaattatactctgtatctggttttcctgtgtatgttaaccacttaaatgttattatcctgctttggttttagagtgattgtgaggcattcaatgcaagtatacagttattttctcattaaaatccaatgtgtgttgagtttttataaaaaaaaaaaaaaaaaa

SEQ ID NO: 354 - protein, 1103 aa, Homo sapien
MAEAELHKERLQAIAEKRKRQTEIEGKRQQLDEQILLLQHSKSKVLREKWLLQGIPAGTAEEEEARRRQSEEDEFRVKQLEDNIQRLEQEIQTLESEESQISAKEQIILEKLKETEKSFKDFQKGFSSTDGDAVNYISSQLPDLPILCSRTAEPSPGQDGTSRAAGVGWENVLLKEGESASNATETSGPDMTIKKPPQLSEDDIWLKSEGDNYSATLLEPAASSLSPDHKNMEIEVSVAECKSVPGITSTPHPMDHPSAFYSPPHNGLLTDHHESLDNDVAREIRYLDEVLEANCCDSAVDGTYNGTSSPEPGAVVLVGGLSPPVHEATQPEPTERTASRQAPPHIELSNSSPDPMAEAERTNGHSPSQPRDALGDSLQVPVSPSSTTSSRCSSRDGEFTLTTLKKEAKFELRAFHEDKKPSKLFEDDEHEKEQYCIRKVRPSEEMLELEKERRELIRSQAVKKNPGIAAKWWNPPQEKTIEEQLDEEHLESHKKYKERKERRAQQEQLLLQKQLQQQQQQPPSQLCTAPASSHERASMIDKAKEDIVTEQIDFSAARKQFQLMENSRQAVAKGQSTPRLFSIKPFYRPLGSVNSDKPLTNPRPPSVGGPPEDSGASAAKGQKSPGALETPSAAGSQGNTASQGKEGPYSEPSKRGPLSKLWAEDGEFTSARAVLTVVKDDDHGILDQFSRSVNVSLTQEELDSGLDELSVRSQDTTVLETLSNDFSMDNISDSGASNETTNALQENSLADFSLPQTPQTDNPSEGRGEGVSKSFSDHGFYSPSSTLGDSPLVDDPLEYQAGLLVQNAIQQAIAEQVDKAVSKTSRDGAEQQGPEATVEEAEAAAFGSEKPQSMFEPPQVSSPVQEKRDVLPKILPAEDRALRERGPPQPLPAVQPSGPINMEETRPEGSYFSKYSEAAELRSTASLLATQESDVMVGPFKLRSRKQRTLSMIEEEIRAAQEREEELKRQRQVLQSTQSPRTKNAPSLPSRTCYKTAPGKIEKVKPPPSPTTEGPSLQPDLAPEEAAGTQRPKNLMQTLMEDYETHKSKRRERMDDSSYTSKLLSCKVTSEVLEATRVNRRKSALALRWEAGIYANQEEEDNE

SEQ ID NO: 355 - DNA, 890 bp, Homo sapien
ggcggaccgaagaacgcaggaagggggccggggggacccgcccccggccggccgcagccatgaactccaacgtggagaacctacccccgcacatcatccgcctggtgtacaaggaggtgacgacactgaccgcagacccacccgatggcatcaaggtctttcccaacgaggaggacctcaccgacctccaggtcaccatcgagggccctgaggggaccccatatgctggaggtctgttccgcatgaaactcctgctggggaaggacttccctgcctccccacccaagggctacttcctgaccaagatcttccacccgaacgtgggcgccaatggcgagatctgcgtcaacgtgctcaagagggactggacggctgagctgggcatccgacacgtactgctgaccatcaagtgcctgctgatccaccctaaccccgagtctgcactcaacgaggaggcgggccgcctgctcttggagaactacgaggagtatgcggctcgggcccgtctgctcacagagatccacgggggcgccggcgggcccagcggcagggccgaagccggtcgggccctggccagtggcactgaagcttcctccaccgaccctggggccccagggggcccgggaggggctgagggtcccatggccaagaagcatgctggcgagcgcgataagaagctggcggccaagaaaaagacggacaagaagcgggcgctgcgggcgctgcggcggctgtagtgggctctcttcctccttccaccgtgaccccaacctctcctgtcccctccctccaactctgtctctaagttatttaaattatggctggggtcggggagggtacagggggcactgggacctggatttgtttttctaaataaagttggaaaagca

SEQ ID NO: 356 - protein, 225 aa, Homo sapien
MNSNVENLPPHIIRLVYKEVTTLTADPPDGIKVFPNEEDLTDLQVTIEGPEGTPYAGGLFRMKLLLGKDFPASPPKGYFLTKIFHPNVGANGEICVNVLKRDWTAELGIRHVLLTIKCLLIHPNPESALNEEAGRLLLENYEEYAARARLLTEIHGGAGGPSGRAEAGRALASGTEASSTDPGAPGGPGGAEGPMAKKHAGERDKKLAAKKKTDKKRALRALRRL

SEQ ID NO: 357 - DNA, 3981 bp, Homo sapien
tcggagtgccgcccgcggccccgagtcggtctcgagccgccggccggccgtgccggtgtccgtaggcgctgcgccctcggccgggcccatgtgtgtgcggcccgcccgaggccgcccgggctttgcctccaccagcgccctggcctccgctcgggcctccacacgggcctccgaagagctgccgcgacgcccggcccgcagggcaggtaaagagattataaatcttccactgaatgaaaaaaattttcttaaagctgcatatactccaagaaaaaaaccacaaatgtttttctgttttgcctgaatacatgatttaaacaagagatttccacagaagctctgcggccgtcacgatgttctggaagtttgacttgaacaccacgtcccatgttgacaagctgctggacaaggagcatgtgacgctgcaggagttaatggatgaagatgacatcttgcaggagtgtaaggctcagaaccagaagctgctggacttcctgtgcaggcagcagtgcatggaggagctggtgagcctcatcacacaggatccgcccctggacatggaggagaaggtccgcttcaaatatccaaacacagcctgtgagcttctgacttgtgatgtgccgcagatcagcgaccgcctcggtggggacgagagcctgctgagcctcctgtacgacttcttggaccatgagccgcctctcaatcctctgctcgccagttttttcagcaagaccattggcaatctcattgcaagaaaaaccgaacaggtgattacgtttttgaagaagaaggacaagttcatcagcctggtgttgaagcacatcggcacctcagcgcttatggacctgctgctgcgcctggtcagctgtgtggagccagccgggctccggcaggacgtcctgcactggctgaatgaagagaaggtcatccagaggcttgtggagttgatccacccgagccaggatgaagataggcagtcaaatgcttctcagactctctgtgacatagttaggctgggcagagaccagggcagtcagctgcaagaggctctggagccagacccgctcctcacagcgctggagtcgcaggactgtgtggagcagcttctgaagaacatgtttgatggagaccggacggagagctgcctcgtcagtgggactcaggtgttactcaccttgctggaaaccaggcgggttgggacagagggcttggtggactccttttctcagggactggaaaggtcatacgctgtcagcagcagcgtactacacggcatcgagcctcggctgaaggacttccaccagctcctgctcaacccgcccaagaagaaagcgatcctgaccaccattggtgtgctggaggagcccctggggaatgcccgtctgcatggcgcccgcctcatggcagcactgctgcacacaaacacacccagcatcaaccaggagctctgccggctcaacacgatggacttactgctggacttgttctttaagtacacctggaataactttttgcacttccaagtggaactatgcatagccgctattctctcccacgctgcccgtgaggagaggacagaagccagcggatccgagagcagggtggagcctccgcatgagaacgggaaccggagcctggagactccccagccggccgccagcctccctgacaacacaatggtgacccacctgttccagaagtgctgcctggtgcagaggatcctggaggcctgggaagccaacgaccacacgcaggcagcgggtggcatgagacgtgggaacatgggccacctcacacggatcgccaacgcggtggtgcagaacctggagcggggccctgtgcagacgcacatcagcgaggtcatccgagggctccctgcggactgccgtggccgctgggagagcttcgtggaggagacgctgacggagacgaaccgcaggaacactgtggacctggccttctctgactaccagatccagcagatgacagccaacttcgtggatcagtttggcttcaatgatgaggagtttgccgaccaggacgacaacatcaatgccccgtttgacaggatcgcagagatcaacttcaacatcgacgctgacgaggacagtcccagcgcagctctgtttgaggcctgctgcagtgaccgcatccagccctttgatgatgatgaggacgaggacatctgggaggacagtgacactcgctgtgctgcccgggtgatggccagacccaggtttggagccccccatgcttcagagagttgctcaaagaatggcccagagcgtggaggccaggatgggaaggcgagcttggaagcacacagagatgcacctggggcaggtgccccaccggcccccgggaagaaggaagccccccctgtggagggtgactcagaagcaggcgccatgtggacggcagtgtttgatgagccagcgaactcaacgcccacagccccaggagtggtgagggacgtgggttccagtgtgtgggcagctggcacctcagctccagaggagaaaggctgggccaagttcactgacttccaacctttctgctgctccgagtcagggcccaggtgcagctctccggtggacacagaatgcagccatgctgagggcagccggagccaaggccctgagaaagccttcagcccggcttctccatgtgcctggaacgtgtgtgtcaccaggaaggcccccctgctggcctctgacagtagctcctctgggggctcccacagcgaggatggcgaccagaaggcagcgagtgccatggatgcggtgagcaggggtcccggccgggaggcccccccgctgcccacagtggccaggacagaggaggcggtcggcagggtcgggtgtgctgacagccggctgttaagccctgcctgccccgcgccaaaggaagtgactgctgccccagccgtggctgtgccccccgaggctactgtggccatcaccacagcactgagcaaggctggccccgccatacccaccccagcagtctcttctgcactggccgtggcggtccccctagggcccatcatggcagtcacagcagccccagccatggtggccaccctggggacagtgacaaaggacggacagatgccccgccagaaggagctgccttaaatggcccagtgtgatgctgctgccgcccggccacggcccaccctggtcaggctgcctccttaatcgagaaaactacctggtgatgcaatctttttttttttaatttaatttaattttaaaataaatgctgcattggtaaagctggcagttgaaaccagttggacggcccagcttgcgtctcttctgcctgagtgggcctctcaggtcactcgtgccctgctggaggacagaggggcacctcagccgcccccaagcccagagcacagcaataaggtcggcctgcaggagccggggtgggggtggggggggcaggaccctgagatgccaccaggacctgatgggccaggaagggcgtggacatggaggctgtttttacagtttttttttgttgttgttttgtttttaaagaatacagaaggagccaagcttttttgcactttgtatccagctgcaagctcagggcagagtcaagggcctgggttggaaaaacctgactcacaggaatgcataattgacccttgcagctacccaatagcccttggagctggcactgaaccaggctgcaagatttgactgccttaaaaacacaaggccctctaggcctggcagggatgtccctgtgcccagcacagggtgcctggcagggggagaccacaggtatgcaggtggggggacatggtgtggcactgggggctcgaagactggtttctagcactaccggtcacggccatgtcgtcctagaagggtccagaagattattttacgttgagtccatttttaatgttctgatcacctgacagggcaccccaaacccccaactcccaataaaagccgtgacgttcgg

SEQ ID NO: 358 - protein, 927 aa, Homo sapien
MFWKFDLNTTSHVDKLLDKEHVTLQELMDEDDILQECKAQNQKLLDFLCRQQCMEELVSLITQDPPLDMEEKVRFKYPNTACELLTCDVPQISDRLGGDESLLSLLYDFLDHEPPLNPLLASFFSKTIGNLIARKTEQVITFLKKKDKFISLVLKHIGTSALMDLLLRLVSCVEPAGLRQDVLHWLNEEKVIQRLVELIHPSQDEDRQSNASQTLCDIVRLGRDQGSQLQEALEPDPLLTALESQDCVEQLLKNMFDGDRTESCLVSGTQVLLTLLETRRVGTEGLVDSFSQGLERSYAVSSSVLHGIEPRLKDFHQLLLNPPKKKAILTTIGVLEEPLGNARLHGARLMAALLHTNTPSINQELCRLNTMDLLLDLFFKYTWNNFLHFQVELCIAAILSHAAREERTEASGSESRVEPPHENGNRSLETPQPAASLPDNTMVTHLFQKCCLVQRILEAWEANDHTQAAGGMRRGNMGHLTRIANAVVQNLERGPVQTHISEVIRGLPADCRGRWESFVEETLTETNRRNTVDLAFSDYQIQQMTANFVDQFGFNDEEFADQDDNINAPFDRIAEINFNIDADEDSPSAALFEACCSDRIQPFDDDEDEDIWEDSDTRCAARVMARPRFGAPHASESCSKNGPERGGQDGKASLEAHRDAPGAGAPPAPGKKEAPPVEGDSEAGAMWTAVFDEPANSTPTAPGVVRDVGSSVWAAGTSAPEEKGWAKFTDFQPFCCSESGPRCSSPVDTECSHAEGSRSQGPEKAFSPASPCAWNVCVTRKAPLLASDSSSSGGSHSEDGDQKAASAMDAVSRGPGREAPPLPTVARTEEAVGRVGCADSRLLSPACPAPKEVTAAPAVAVPPEATVAITTALSKAGPAIPTPAVSSALAVAVPLGPIMAVTAAPAMVATLGTVTKDGQMPRQKELP

SEQ ID NO: 359 - DNA, 2676 bp, Homo sapien
gttccggcgaggaggccgcgccagtgacagcgatggcggcggagtcggcgctccaagttgtggagaagctgcaggcgcgcctggccgcgaacccggaccctaagaagctattgaaatatttgaagaaactctccaccctgcctattacagtagacattcttgcggagactggggttgggaaaacagtaaatagcttgcgaaaacacgagcatgttggaagctttgccagggacctagtggcccagtggaagaagctggttcctgtggaacgaaatgctgagcctgatgaacaggactttgagaagagcaattcccgaaagcgccctcgggatgccctgcagaaggaggaggagatggagggggactaccaagaaacctggaaagccacggggagccgatcctatagccctgaccacaggcagaagaaacataggaaactctcggagctcgagagacctcacaaagtgtctcacggtcatgagaggagagatgagagaaagaggtgtcacagaatgtcaccaacttactcttcagaccctgagtcttctgattatggccatgttcaatcccctccatcttgtaccagtcctcatcagatgtacgtcgaccactacagatccctggaggaggaccaggagcccattgtttcacaccagaagcctgggaaaggccacagcaatgcctttcaggacagactcggggccagccaagaacgacacctgggtgaaccccatgggaaaggggttgtgagtcaaaacaaggagcacaaatcttcccacaaggacaaacgccccgtggatgccaagagtgatgagaaggcctctgtggtgagcagagagaaatcacacaaggccctctccaaagaggagaaccgaaggccaccctcaggggacaatgcaagggagaaaccgccctctagtggcgtaaagaaagagaaggacagagagggcagcagcctgaagaagaagtgtttgcctccctcagaggccgcttcagacaaccacctgaaaaagccaaagcacagagacccagagaaagccaaattggacaaaagcaagcaaggtctggacagctttgacacaggaaaaggagcaggagacctgttgcccaaggtaaaagagaagggttctaacaacctaaagactccagaagggaaagtcaaaactaatttggatagaaagtcactgggctccctccctaaagttgaggagacagatatggaggatgaattcgagcagccaaccatgtcttttgaatcctacctcagctatgaccagccccggaagaaaaagaaaaagattgtgaaaacttcagccacggcacttggagataaaggacttaaaaaaaatgactctaaaagcactggtaaaaacttggactcagttcagaaattacccaaggtgaacaaaaccaagtcagagaagccggctggagctgatttagccaagctgagaaaggtgcctgatgtgttgccagtgttgccagacctcccgttacccgcgatacaggccaattaccgtccactgccttccctcgagctgatatcctccttccagccaaagcgaaaagcgttctcttcaccccaggaagaagaagaagctggatttactgggcgcagaatgaattccaagatgcaggtgtattctggttccaagtgtgcctatctccctaaaatgatgaccttgcaccagcaatgcatccgagtacttaaaaacaacatcgattcaatctttgaagtgggaggagtcccatactctgttcttgaacccgttttggagaggtgtacacctgatcagctgtatcgcatagaggaatacaatcatgtattaattgaagaaacagatcaattatggaaagttcattgtcaccgagactttaaggaagaaagacccgaagagtatgagtcgtggcgagagatgtacctgcggcttcaggacgcccgagagcagcggctacgagtactaacaaagaatatccagttcgcacatgccaataagcccaaaggccgacaagcaaagatggcctttgtcaactctgtggccaagccacctcgtgacgtccggaggaggcaggaaaagtttggaacgggaggagcagctgtccctgagaaaatcaagatcaagccagccccgtaccccatgggaagcagccatgcttccgccagtagcatcagctttaaccccagccctgaggagccggcctatgatggcccaagcaccagcagtgcccacttggcaccagtggtcagcagcactgtttcctatgatcctaggaaacccactgtgaagaaaattgccccaatgatggccaagacaattaaagctttcaagaacagattctcccgacgataaactgaggacttgccttggaaatggaatctggggaggcaggaatacaaggacagtgggggttggggaatggaattctacaggagactggagtcttgctttgtggatccttttggtctccgagtctgcagtctgcaggtgctgcccctgggaacctgcgtgccacagccccgcctccctgcctggagcacactttagaattctgaagatgtgaagcctctgtctcactgaggattttaaaggtcaattatacttttgttgttcattagcatctttgtaaactataagacgtagttttaattaataaatattgcccccagatgttaaa

SEQ ID NO: 360 - protein, 772 aa, Homo sapien
MAAESALQVVEKLQARLAANPDPKKLLKYLKKLSTLPITVDILAETGVGKTVNSLRKHEHVGSFARDLVAQWKKLVPVERNAEPDEQDFEKSNSRKRPRDALQKEEEMEGDYQETWKATGSRSYSPDHRQKKHRKLSELERPHKVSHGHERRDERKRCHRMSPTYSSDPESSDYGHVQSPPSCTSPHQMYVDHYRSLEEDQEPIVSHQKPGKGHSNAFQDRLGASQERHLGEPHGKGVVSQNKEHKSSHKDKRPVDAKSDEKASVVSREKSHKALSKEENRRPPSGDNAREKPPSSGVKKEKDREGSSLKKKCLPPSEAASDNHLKKPKHRDPEKAKLDKSKQGLDSFDTGKGAGDLLPKVKEKGSNNLKTPEGKVKTNLDRKSLGSLPKVEETDMEDEFEQPTMSFESYLSYDQPRKKKKKIVKTSATALGDKGLKKNDSKSTGKNLDSVQKLPKVNKTKSEKPAGADLAKLRKVPDVLPVLPDLPLPAIQANYRPLPSLELISSFQPKRKAFSSPQEEEEAGFTGRRMNSKMQVYSGSKCAYLPKMMTLHQQCIRVLKNNIDSIFEVGGVPYSVLEPVLERCTPDQLYRIEEYNHVLIEETDQLWKVHCHRDFKEERPEEYESWREMYLRLQDAREQRLRVLTKNIQFAHANKPKGRQAKMAFVNSVAKPPRDVRRRQEKFGTGGAAVPEKIKIKPAPYPMGSSHASASSISFNPSPEEPAYDGPSTSSAHLAPVVSSTVSYDPRKPTVKKIAPMMAKTIKAFKNRFSRR

SEQ ID NO: 361 - DNA, 1639 bp, Homo sapien
agcagagcacacaagcttctaggacaagagccaggaagaaaccaccggaaggaaccatctcactgtgtgtaaacatgacttccaagctggccgtggctctcttggcagccttcctgatttctgcagctctgtgtgaaggtgcagttttgccaaggagtgctaaagaacttagatgtcagtgcataaagacatactccaaacctttccaccccaaatttatcaaagaactgagagtgattgagagtggaccacactgcgccaacacagaaattattgtaaagctttctgatggaagagagctctgtctggaccccaaggaaaactgggtgcagagggttgtggagaagtttttgaagagggctgagaattcataaaaaaattcattctctgtggtatccaagaatcagtgaagatgccagtgaaacttcaagcaaatctacttcaacacttcatgtattgtgtgggtctgttgtagggttgccagatgcaatacaagattcctggttaaatttgaatttcagtaaacaatgaatagtttttcattgtaccatgaaatatccagaacatacttatatgtaaagtattatttatttgaatctacaaaaaacaacaaataatttttaaatataaggattttcctagatattgcacgggagaatatacaaatagcaaaattgagccaagggccaagagaatatccgaactttaatttcaggaattgaatgggtttgctagaatgtgatatttgaagcatcacataaaaatgatgggacaataaattttgccataaagtcaaatttagctggaaatcctggatttttttctgttaaatctggcaaccctagtctgctagccaggatccacaagtccttgttccactgtgccttggtttctcctttatttctaagtggaaaaagtattagccaccatcttacctcacagtgatgttgtgaggacatgtggaagcactttaagttttttcatcataacataaattattttcaagtgtaacttattaacctatttattatttatgtatttatttaagcatcaaatatttgtgcaagaatttggaaaaatagaagatgaatcattgattgaatagttataaagatgttatagtaaatttattttattttagatattaaatgatgttttattagataaatttcaatcagggtttttagattaaacaaagaaacaattgggtacccagttaaattttcatttcagataaacaacaaataattttttagtataagtacattattgtttatctgaaagttttaattgaactaacaatcctagtttgatactcccagtcttgtcattgccagctgtgttggtagtgctgtgttgaattacggaataatgagttagaactattaaaacagccaaaactccacagtcaatattagtaatttcttgctggttgaaacttgtttattatgtacaaatagattcttataatattatttaaatgactgcatttttaaatacaaggctttatatttttaactttaagatgtttttatgtgctctccaaattttttttactgtttctgattgtatggaaatataaaagtaaatatgaaacatttaaaatataatttgttgtcaaagtaaaaaaaaaaaaaaa

SEQ ID NO: 362 - protein, 99 aa, Homo sapien
MTSKLAVALLAAFLISAALCEGAVLPRSAKELRCQCIKTYSKPFHPKFIKELRVIESGPHCANTEIIVKLSDGRELCLDPKENWVQRVVEKFLKRAENS

SEQ ID NO: 363 - DNA, 1999 bp, Homo sapien
gccgggagcgccgctccagcgaggcgcgggctgtggggccgccgcgtgcctggccccgctcgcccgtgccggccgctcgcccgccatgcctggcttcgactacaagttcctggagaagcccaagcgacggctgctgtgcccactgtgcgggaagcccatgcgcgagcctgtgcaggtttccacctgcggccaccgtttctgcgatacctgcctgcaggagttcctcagtgaaggagtcttcaagtgccctgaggaccagcttcctctggactatgccaagatctacccagacccggagctggaagtacaagtattgggcctgcctatccgctgcatccacagtgaggagggctgccgctggagtgggccactacgtcatctacagggccacctgaatacctgcagcttcaatgtcattccctgccctaatcgctgccccatgaagctgagccgccgtgatctacctgcacacttgcagcatgactgccccaagcggcgcctcaagtgcgagttttgtggctgtgacttcagtggggaggcctatgagagccatgagggtatgtgcccccaggagagtgtctactgtgagaataagtgtggtgcccgcatgatgcggcggctgctggcccagcatgccacctctgagtgccccaagcgcactcagccctgcacctactgcactaaggagttcgtctttgacaccatccagagccaccagtaccagtgcccaaggctgcctgttgcctgccccaaccaatgtggtgtgggcactgtggctcgggaggacctgccaggccatctgaaggacagctgtaacaccgccctggtgctctgcccattcaaagactccggctgcaagcacaggtgccctaagctggcaatggcacggcatgtggaggagagtgtgaagccacatctggccatgatgtgtgccctggtgagccggcaacggcaggagctgcaggagcttcggcgagagctggaggagctatcagtgggcagtgatggcgtgctcatctggaagattggcagctatggacggcggctacaggaggccaaggccaagcccaaccttgagtgcttcagcccagccttctacacacataagtatggttacaagctgcaggtgtctgcattcctcaatggcaatggcagtggtgagggcacacacctctcactgtacattcgtgtgctgcctggtgcctttgacaatctccttgagtggccctttgcccgccgtgtcaccttctccctgctggatcagagcgaccctgggctggctaaaccacagcacgtcactgagaccttccaccccgacccaaactggaagaatttccagaagccaggcacgtggcggggctccctggatgagagttctctgggctttggttatcccaagttcatctcccaccaggacattcgaaagcgaaactatgtgcgggatgatgcagtcttcatccgtgctgctgttgaactgccccggaagatcctcagctgagtgcaggtggggttcgaggggaaaggacgatggggcatgacctcagtcaggcactggctgaacttggagagggggccggacccccgtcagctgcttctgctgcctaggttctgttaccccatcctccctcccccagccaccaccctcaggtgcctccaattggtgcttcagccctggcccctgtggggaacaggtcttggggtcatgaagggctggaaacaagtgaccccagggcctgtctcccttcttgggtagggcagacatgccttggtgccggtcacactctacacggactgaggtgcctgctcaggtgctatgtcccaagagccataagggggtgggaattggggagggagaaagggtagttcaaagagtctgtcttgagatctgattttttccccctttacctagctgtgccccctctggttatttatttccttagtgccaggagggcacagcaggggagccctgatttttaataaatccggaattgtatttatt

SEQ ID NO: 364 - protein, 470 aa, Homo sapien [sequence omitted]

SEQ ID NO: 365 - DNA, 896 bp, Homo sapien
cagaggtcagacggtctagcgctgcgtgggccatggtgcagctccgaccgcgagcgtctcgcgccccggcgtcggcggaggcgatggtggacgagggccagctggcctcggaggaggaggaggcggagcacgggctgttgctcgggcagcccagcagcggcgcggccgccgagcccctggaggaagacgaggaaggggacgatgagtttgacgatgaggccccggaggagctgactttcgccagcgcccaggcggaagcgagagaagaggagcggcgagtgcgggagaccgtgcgcagggataaaacgctcctgaaggagaagaggaagcgacgcgaggagctgttcatcgaacagaagaaaagaaaactccttccagacactattttggagaagttaaccacagcttcacagactaacatcaagaaatcgccaggaaaggtgaaagaagttaatttgcaaaagaaaaatgaagactgtgaaaaaggaaatgactccaagaaagttaaagtacaaaaagtacagtctgtcagccagaataaaagctacttggccgtaaggctaaaagaccaagatctgagagattcaaggcaacaagcagcacaagccttcatacataattcattatatgggccaggaaccaacaggactactgtaaataagttcctgtctcttgccaacaagaggttaccagtgaaaagagctgctgtccagtttttgaataatgcttggggaatccaaaaaaaacaaaatgccaagaggtttaaaagacggtggatggtcagaaagatgaaaactaagaagtaaatcaatgctaaatgaagaatctgtactttgtatgtatagaatttatctaataaatcattcatagatcaaaaaaaaaaaaaaaaaaaaaaa

SEQ ID NO: 366 - protein, 257 aa, Homo sapien
MVQLRPRASRAPASAEAMVDEGQLASEEEEAEHGLLLGQPSSGAAAEPLEEDEEGDDEFDDEAPEELTFASAQAEAREEERRVRETVRRDKTLLKEKRKRREELFIEQKKRKLLPDTILEKLTTASQTNIKKSPGKVKEVNLQKKNEDCEKGNDSKKVKVQKVQSVSQNKSYLAVRLKDQDLRDSRQQAAQAFIHNSLYGPGTNRTTVNKFLSLANKRLPVKRAAVQFLNNAWGIQKKQNAKRFKRRWMVRKMKTKK

SEQ ID NO: 367 - DNA, 1760 bp, Homo sapien
gcagcaggccaagggggaggtgcgagcgtggacctgggacgggtctgggcggctctcggtggttggcacgggttcgcacacccattcaagcggcaggacgcacttgtcttagcagttctcgctgaccgcgctagctgcggcttctacgctccggcactctgagttcatcagcaaacgccctggcgtctgtcctcaccatgcctagcctttgggaccgcttctcgtcgtcgtccacctcctcttcgccctcgtccttgccccgaactcccaccccagatcggccgccgcgctcagcctgggggtcggcgacccgggaggaggggtttgaccgctccacgagcctggagagctcggactgcgagtccctggacagcagcaacagtggcttcgggccggaggaagacacggcttacctggatggggtgtcgttgcccgacttcgagctgctcagtgaccctgaggatgaacacttgtgtgccaacctgatgcagctgctgcaggagagcctggcccaggcgcggctgggctctcgacgccctgcgcgcctgctgatgcctagccagttggtaagccaggtgggcaaagaactactgcgcctggcctacagcgagccgtgcggcctgcggggggcgctgctggacgtctgcgtggagcagggcaagagctgccacagcgtgggccagctggcactcgaccccagcctggtgcccaccttccagctgaccctcgtgctgcgcctggactcacgactctggcccaagatccaggggctgtttagctccgccaactctcccttcctccctggcttcagccagtccctgacgctgagcactggcttccgagtcatcaagaagaagctgtacagctcggaacagctgctcattgaggagtgttgaacttcaacctgagggggccgacagtgccctccaagacagagacgactgaacttttggggtggagactagaggcaggagctgagggactgattccagtggttggaaaactgaggcagccacctaaggtggaggtgggggaatagtgtttcccaggaagctcattgagttgtgtgcgggtggctgtgcattggggacacatacccctcagtactgtagcatggaacaaaggcttaggggccaacaaggcttccagctggatgtgtgtgtagcatgtaccttattatttttgttactgacagttaacagtggtgtgacatccagagagcagctgggctgctcccgccccagcctggcccagggtgaaggaagaggcacgtgctcctcagagcagccggagggaggggggaggtcggaggtcgtggaggtggtttgtgtatcttactggtctgaagggaccaagtgtgtttgttgtttgttttgtatcttgtttttctgatcggagcatcactactgacctgttgtaggcagctatcttacagacgcatgaatgtaagagtaggaaggggtgggtgtcagggatcacttgggatctttgacacttgaaaaattacacctggcagctgcgtttaagccttcccccatcgtgtactgcagagttgagctggcaggggaggggctgagagggtgggggctggaacccctccccgggaggagtgccatctgggtcttccatctagaactgtttacatgaagataagatactcactgttcatgaatacacttgatgttcaagtattaagacctatgcaatattttttacttttctaataaacatgtttgttaaaacaaaaaaaaaaaaaaaaa

SEQ ID NO: 368 - protein, 232 aa, Homo sapien
MPSLWDRFSSSSTSSSPSSLPRTPTPDRPPRSAWGSATREEGFDRSTSLESSDCESLDSSNSGFGPEEDTAYLDGVSLPDFELLSDPEDEHLCANLMQLLQESLAQARLGSRRPARLLMPSQLVSQVGKELLRLAYSEPCGLRGALLDVCVEQGKSCHSVGQLALDPSLVPTFQLTLVLRLDSRLWPKIQGLFSSANSPFLPGFSQSLTLSTGFRVIKKKLYSSEQLLIEEC

SEQ ID NO: 369 - DNA, 528 bp, Homo sapien
atgcatcgtgattcctgtccattggactgtaaggtttatgtaggcaatcttggaaacaatggcaacaagacggaattggaacgggcttttggctactatggaccactccgaagtgtgtgggttgctagaaacccacccggctttgcttttgttgaatttgaagatccccgagatgcagctgatgcagtccgagagctagatggaagaacactatgtggctgccgtgtaagagtggaactgtcgaatggtgaaaaaagaagtagaaatcgtggcccacctccctcttggggtcgtcgccctcgagatgattatcgtaggaggagtcctccacctcgtcgcagatctccaagaaggagaagcttctctcgcagccggagcaggtccctttctagagataggagaagagagagatcgctgtctcgggagagaaatcacaagccgtcccgatccttctctaggtctcgtagtcgatctaggtcaaatgaaaggaaatagaagaccagtttgcaaaagtggtgtagaggatcc

SEQ ID NO: 370 - protein, 164 aa, Homo sapien
MHRDSCPLDCKVYVGNLGNNGNKTELERAFGYYGPLRSVWVARNPPGFAFVEFEDPRDAADAVRELDGRTLCGCRVRVELSNGEKRSRNRGPPPSWGRRPRDDYRRRSPPPRRRSPRRRSFSRSRSRSLSRDRRRERSLSRERNHKPSRSFSRSRSRSRSNERK

SEQ ID NO: 371 - DNA, 428 bp, Homo sapien
atgtctcttgtcagctgtctttcagaagacctggtggggcaagtccgtgggcatcatgttgaccgagctggagaaagccttgaactctatcatcgacgtctaccacaagtactccctgataaaggggaatttccatgccgtctacagggatgacctgaagaaattgctagagaccgagtgtcctcagtatatcaggaaaaagggtgcagacgtctggttcaaagagttggatatcaacactgatggtgcagttaacttccaggagttcctcattctggtgataaagatgggcgtggcagcccacaaaaaaagccatgaagaaagccacaaagagtagctgagttactgggcccagaggctgggcccctggacatgtacctgcagaataataaagtcatcaatacctcaaaaaaaaaaaaaaaaaaaaa

SEQ ID NO: 372 - protein, 93 aa, Homo sapien
MLTELEKALNSIIDVYHKYSLIKGNFHAVYRDDLKKLLETECPQYIRKKGADVWFKELDINTDGAVNFQEFLILVIKMGVAAHKKSHEESHKE

SEQ ID NO: 373 - DNA, 5640 bp, Homo sapien
atggcccgaccgccgccactaccggggcctgagggggcctggcggagcccgagcgcggcccggcccgcagcgtggggccccgagcgcggtgaagagattgttttctgaaagctgcgttggaggctgtgacagagctgagagcctgtgtggagcggatggggaggctttctcaataacatggccctttgccattagccttgccatgaccacatttttcaccagcgtccccccctggattcaagatgcaaagcaggaggaggaagtgggctggaaactagttcccaggcctcggggccgggaggcggagagtcaagtgaagtgccaatgtgaaatttcgggaacacctttctcaaatggggagaagctgaggcctcacagcctcccgcaaccagagcagagaccatatagctgccctcagctgcactgtggcaaggcttttgcttccaaatacaagctgtataggcacatggccacccactcagcccagaaaccccaccagtgtatgtactgtgataagatgtttcaccgcaaggaccatctgcggaaccatctgcagacccatgatcctaacaaagaggccctccactgctctgagtgcggtaagaattacaatacgaagctgggctaccggcgccacctggccatgcatgctgccagcagcggtgacctcagctgcaaggtgtgcctgcagacctttgagagtacccaggccctgctagagcacctgaaggcccactcacgccgggtagcaggcggtgccaaggagaagaagcacccctgtgaccactgcgaccggcggttctatactcgtaaggatgtacggcggcacctagtggtgcacacaggccgtaaggacttcctgtgccagtactgtgcccagcggtttggccgtaaggaccacctgacgcgtcatgtcaagaagagccactcgcaggagctgctcaagatcaagacagagcccgtggacatgttaggcctactcagctgcagctccacagtcagtgtgaaggaagagctgagccctgtgctgtgcatggcctctcgggacgtaatggggaccaaggccttccctggcatgttgcccatgggcatgtatggtgcccacatccctaccatgcccagcacgggcgtgccacactccctggtgcacaacacgctgcccatgggtatgagctaccctctggaatcctcacctatctcttccccagctcagctccctccaaaataccagcttggatctacctcatacttgcccgacaaattgcccaaagtggaggtggatagttttctggcggagcttcctggaagcctgtctctctcatccgctgaaccccagcccgcctcacctcagccggcggcagctgcggccctcctagatgaagcactgcttgccaagagccccgccaacctctctgaggccctctgcgctgctaatgtggacttctcccacctactgggctttcttccactcaacctgcccccgtgtaacccacctggggccacaggaggcctggtcatgggctactcccaggctgaggcacagcccctgcttaccactttgcaagctcagcctcaagattccccaggagctgggggaccactgaactttgggcctctgcactccttgcctcctgtcttcacgtctggcctgagtagcaccaccctgcctcgtttccatcaagcattccagtagcccccacagaggccctcagctcagtttttggctctgttatggagccttagtacccaccccgtctgtgtcccccatgaaggcagctgagctttcagagctgggttcaaaaaaaaaaattccagtgtctgtatacaggagcacttggtttgggggttcaggctctaggatcgattccagaaggagccttgagccccaaccccgtgaaaagatctcataccgtaggacttcaggtattatttacttttatttttttgacctgaatcgggagccacacttggccctcttcctctccaaagcgccagaacctccttctctttggagaatggggaggcctcttggagacacagagggtttcaccttggatgacctctagagaaattgcccaagaagcccaccttctggtcccaacctgcagaccccacagcagtcagttggtcaggccctgctgtagaaggtcacttggctccattgcctgcttccaaccaatgggcaggagagaaggcctttatttctcgcccacccattcctcctgtaccagcacctccgttttcagtcagtgttgtccagcaacggtaccgtttacacagtcacctcagacacaccatttcacctcccttgccaagctgttagccttagagtgattgcagtgaacactgtttacacaccgtgaatccattcccatcagtccattccagttggcaccagcctgaaccatttggtacctggtgttaactggagtcctgtttacaaggtggagtcggggcttgctgacttctcttcatttgaggtcacatttttcccccgtggggaaataaactgactttggactgcttcagtctctgccatcttccatgactgcatttgttcctgcctgcctcggcggtatccacagaagacaggcaagaggattggagcagttttctcacaggtctgcaattctgtttttctccaagtacattatgaccccctcatccttctcttgaactggagaggggaagaaatgaaaggcatgcccacgtccgtcacctccccatcccctagtccccaccttgaacatcatgagctgttgttattagtcttggaagcagagtctgggttggtgtggatagcaaaggaggaagtctgagcccctcattggtcttcctcccacctgtcccttttccgggaagttgtggaattgttggaagaagagtttgcagaaggttaggaatgggtagatagctaagtcctaatctatgggtacattgttgtgtcccaaaccaaaattttccttatccacaatgtcccttctgtctcttccactttacagtggactcggccactgtgcataggcttctctgctctccatcaaatcacttccactttcctgtgcccccacccccgcctccagttttccgctagtatccggcaaggtttcttgcaacaaatgattagttcttttcttctgactcgtggggctccctgctgcagagagcacagcccttgcctggagcccaggaaccccatccttgcttcatctcagttcttcatgggcttcactcttcccactcacggaagggaggtagctcagggacctccactgtgggacccttgagatgcttccactctgattcagaaacacacttctacctctttactgttaactcttaacagatgcagtcagcagtttctgggcacttctctcagtaggtgcctcatgctgacttctccactagggtttcaggacaaactaccaaggaattgcctcagcctcctaccagtcctccctcacccaccttctgtctaggttcacttggtttgtcatcaggaactgagcaggtccaggactcagctttctgcttcagcctaagccagtactccttgtttgaggtaaaagccttaaaatttagctccctagctcttgattagaagcaatttggagtaagtgtgttttgatttaggcagggtagcttgggatacctttttaaaaacaccagatattaaaatgtctggcaaggttagaatcagactagatgatttgcttctaaaaattagtttcagtgagtcccagggactaattaaggtttattttaaaaagtgtctaccttggtacgcagccacctcctgcatgctgtgcatgttattgggacttgtattataggcgatggtatgtgagaatccagttgggactcgctgttgccatcctctttgttgtatctggttttcatcactagactcagcaacccttctcaccttaactgccaccttccctacactctcagtttacagaggccactgggcctctggctgcagaatacaaagtcccgggctgttagaggagtcctttcctctctgcctgccctttcctgtccctccctgaattctctctccccgtaagtgatgctggaaaagtcataggactggcaaagcaactgtttaaaccctttgtaaccggggccttgcccccacctcctgtcttttctccttgccttccccactcctgtgtcctcccatctatcctgtctttcctttcctcctctcagtgtcctcagcacccacaaggaattttcctatcactgtgaactttgctggtacagaggaataatatctgccttcacctttttttttttggaccatagctagccagtcatttcttaaacctcccttcctaaaatctggggggtcggggggaaagaaaaaaaaagccttagtggcctggttgttcaaaggataagaatagctttatcctgcactcagtacccgaactcacttcagtatgcttactgaggccatgagaacctgaggggcatctgcccaggacagaagccatggcatatgacaaagaccaatgagggaccaggaaaaaaagtgatgtcccctttccctgccacctccagcctctgccagcaatgagctgtccccctcccaccctacacagtagctggtcagggctgagtacagtcctgggggtaaggggatgacatgcccaggtgtcagctcaaaggatctctgcatcatcttgaggtgggaggcagggaaaggagcgccaatgaggttccctgcaacccccgccctccagcccaccgcccagccttttacaaatggcattttcttaattgaaaatccgggaagcaggtgtgattacttttttgctcgtagatattgtcctaagttggaattctcccactgccctaaaactttccctagtagtcctttaaactcccccctccctttttggtagctgtttctccgtcctctctccacctgccctcttatctaggagctgtttgtaagcacgatttttttaacaggttatattgtacaggatcaatattttgctttttaacaaggatatttatgtaataagaaactttgccttaggcaggtgttggccagaaaagtccagattcctctgggatcccaccctggcctctcctggaactctgaacctgctgtggaaggaattggccatgaccttcacctctggagagtagggtctatggcgagggaaaagggtgttcaccatgataacctagtgcctccatagaggggtttggaaaaattccagtccgatttctttgtgtgtcagctgacttccttagctgattgttcccacttgcacctctccacctttggcactagaactcctgagacaccacttctcatgcttctccctccctaccagcggtcaaggctttggagccactcttttgtaactccagattatttaaagagaaaagtacaagacagaaatcttctagcactttgtaaacacagtgaataacctcttggagtatttttggctttatataaaacaaggtttttaattgtaaagtataagtgccattagaaaatgcacagggcatatctttgttaaagtagatttttcaatgttttacagaattacattttcaaaaaaaggtttttataatgaagttgtttattaaaaacttctgaatgatgtgttc

SEQ ID NO: 374 - protein, 496 aa, Homo sapien
MTTFFTSVPPWIQDAKQEEEVGWKLVPRPRGREAESQVKCQCEISGTPFSNGEKLRPHSLPQPEQRPYSCPQLHCGKAFASKYKLYRHMATHSAQKPHQCMYCDKMFHRKDHLRNHLQTHDPNKEALHCSECGKNYNTKLGYRRHLAMHAASSGDLSCKVCLQTFESTQALLEHLKAHSRRVAGGAKEKKHPCDHCDRRFYTRKDVRRHLVVHTGRKDFLCQYCAQRFGRKDHLTRHVKKSHSQELLKIKTEPVDMLGLLSCSSTVSVKEELSPVLCMASRDVMGTKAFPGMLPMGMYGAHIPTMPSTGVPHSLVHNTLPMGMSYPLESSPISSPAQLPPKYQLGSTSYLPDKLPKVEVDSFLAELPGSLSLSSAEPQPASPQPAAAAALLDEALLAKSPANLSEALCAANVDFSHLLGFLPLNLPPCNPPGATGGLVMGYSQAEAQPLLTTLQAQPQDSPGAGGPLNFGPLHSLPPVFTSGLSSTTLPRFHQAFQ

SEQ ID NO: 375 - DNA, 2210 bp, Homo sapien
cgcgcccctccctcctcgcggacctggcggtgccggcgcccggagtggccctttaaaaggcagcttattgtccggagggggcgggcggggggcgccgaccgcggcctgaggcccggcccctcccctctccctccctctgtccccgcgtcgctcgctggctagctcgctggctcgctcgcccgtccggcgcacgctccgcctccgtcagttggctccgctgtcgggtgcgcggcgtggagcggcagccggtctggacgcgcggccggggctgggggctgggagcgcggcgcgcaagatctccccgcgcgagagcggcccctgccaccgggcgaggcctgcgccgcgatggcagagatgggcagtaaaggggtgacggcgggaaagatcgccagcaacgtgcagaagaagctcacccgcgcgcaggagaaggttctccagaagctggggaaggcagatgagaccaaggatgagcagtttgagcagtgcgtccagaatttcaacaagcagctgacggagggcacccggctgcagaaggatctccggacctacctggcctccgtcaaagccatgcacgaggcttccaagaagctgaatgagtgtctgcaggaggtgtatgagcccgattggcccggcagggatgaggcaaacaagatcgcagagaacaacgacctgctgtggatggattaccaccagaagctggtggaccaggcgctgctgaccatggacacgtacctgggccagttccccgacatcaagtcacgcattgccaagcgggggcgcaagctggtggactacgacagtgcccggcaccactacgagtcccttcaaactgccaaaaagaaggatgaagccaaaattgccaaggccgaggaggagctcatcaaagcccagaaggtgtttgaggagatgaatgtggatctgcaggaggagctgccgtccctgtggaacagccgcgtaggtttctacgtcaacacgttccagagcatcgcgggcctggaggaaaacttccacaaggagatgagcaagctcaaccagaacctcaatgatgtgctggtcggcctggagaagcaacacgggagcaacaccttcacggtcaaggcccagcccagaaagaaaagtaaactgttttcgcggctgcgcagaaagaagaacagtgacaacgcgcctgcaaaagggaacaagagcccttcgcctccagatggctcccctgccgccacccccgagatcagagtcaaccacgagccagagccggccggcggggccacgcccggggccaccctccccaagtccccatctcagccagcagaggcctcggaggtggcgggtgggacccaacctgcggctggagcccaggagccaggggagacggcggcaagtgaagcagcctccagctctcttcctgctgtcgtggtggagaccttcccagcaactgtgaatggcaccgtggagggcggcagtggggccgggcgcttggacctgcccccaggtttcatgttcaaggtacaggcccagcacgactacacggccactgacacagacgagctgcagctcaaggctggtgatgtggtgctggtgatccccttccagaaccctgaagagcaggatgaaggctggctcatgggcgtgaaggagagcgactggaaccagcacaaggagctggagaagtgccgtggcgtcttccccgagaacttcactgagagggtcccatgacggcggggcccaggcagcctccgggcgtgtgaagaacacctcctcccgaaaaatgtgtggttcttttttttgttttgttttcgtttttcatcttttgaagagcaaagggaaatcaagaggagacccccaggcagaggggcgttctcccaaagattaggtcgttttccaaagagccgcgtcccggcaagtccggcggaattcaccagtgttcctgaagctgctgtgtcctctagttgagtttctggcgcccctgcctgtgcccgcatgtgtgcctggccgcagggcggggctgggggctgccgagccaccatgcttgcctgaagcttcggccgcgccacccgggcaagggtcctcttttcctggcagctgctgtgggtggggcccagacaccagcctagcctggctctgccccgcagacggtctgtgtgctgtttgaaaataaatcttagtgttcaaaacaaaatgaaacaaaaaaaaaatgataaaaactctcaaaaaaa

SEQ ID NO: 376 - protein, 409 aa, Homo sapien
MAEMGSKGVTAGKIASNVQKKLTRAQEKVLQKLGKADETKDEQFEQCVQNFNKQLTEGTRLQKDLRTYLASVKAMHEASKKLNECLQEVYEPDWPGRDEANKIAENNDLLWMDYHQKLVDQALLTMDTYLGQFPDIKSRIAKRGRKLVDYDSARHHYESLQTAKKKDEAKIAKAEEELIKAQKVFEEMNVDLQEELPSLWNSRVGFYVNTFQSIAGLEENFHKEMSKLNQNLNDVLVGLEKQHGSNTFTVKAQPSDNAPAKGNKSPSPPDGSPAATPEIRVNHEPEPAGGATPGATLPKSPSQSSLPAVVVETFPATVNGTVEGGSGAGRLDLPPGFMFKVQAQHDYTATDTDELQLKAGDVVLVIPFQNPEEQDEGWLMGVKESDWNQHKELEKCRGVFPENFTERVP

SEQ ID NO: 377 - DNA, 2244 bp, Homo sapien
acaccatcctcttagttgctcagactgaaaagctagcagccatcctggatttctctcacactgcctattcaacgtgtgaatgcatgagtggaaagctgagttcgcactcgtgactggccggggtcgactctgacattcactcccactttggcgcgctgatttgcctctgagcggatgaaggttgagccatggcgggcggggccggggaggcgggcttggagcgagggggcggggcaggcgccacaaaaacgcgctcgcgccggcgccgaaccgcaactcccggcgacccccgcgctcccgggtggcaagatggtggcgcgcaggaggaagtgcgcgcgcgggacccggagaccgtatcccgagcccactgcgtacgcagctattccaatcaagttctctgaaaagcaacaggcttctcactacctctatgtgagagcacacggcgttcgacaaggcaccaagtccacctggcctcagaagaggactctttttgtcctcaatgtgcccccatactgcacagaggagagcctgtcccgcctcctgtccacctgtggcctcgtccagtctgtagagttgcaggagaagccggacctggctgagagcccaaaggagtcaaggtcgaagttttttcatcccaagccagttccgggtttccaggtagcctatgtggtgttccagaagccaagtggggtgtcagcggccttggccctgaagggccccctgctggtgtccacagagagccaccctgtgaagagtggcattcacaagtggatcagtgactacgcagactctgtgcccgaccctgaggccctgagggtggaagtggacacgttcatggaggcatatgaccagaagatcgctgaggaagaagctaaggccaagggggaggagggggtccctgacgaggagggctgggtgaaggtgacccgccggggccggcgcctgtgctcccccggactgaggcagccagcttgcgggtgctggagagggagagacggaagcgcagcgaaaagagctgctcaacttctacgcctggcagcatcgagagagcaagatggagcatctagcgcagctcgcaagaagttcgaggaggacaagcagaggatcgagctgctgcgggcccagcgcaaattccgaccgtactgagctgtgagagccgcagtgaatggctggaggtgcagggccaggaggaggcgaggcagggcctgcagcggtctctgagaggccgagctctggccaacgggccccaggttgaaggccaccgcgtccaacagccccatcagagtccacacaggccaggagggaaggaccaggccacccctcgggtcttgtgcttcagcagtcctggggacccaggcgtgccgagaggaggacttgtccttcctgcttcttgcctccacaccctcctctccaggaccctggatgaatccgttctgtgcttccttttccctcaatgcaaaagcccttgctggcaacgaaaaagcctcaaaagcagtgagaatacaagaaccttttattttccatccagttgggcagcagggaaaggctaggtgggcccagcctgcccttccttcctccagctggctggatatttattattagccaggagaaagcagccctggaacccagactctgtctccctcttgaggtcacagatgttgaagttggaatctcgctccttcccctgactaccatcctaggctgggctcaagactagtgaggcctgtccccaccatccctggccttgttgtggggctcaggaactcagagtcccagtgttgagtctgggagcactaggtcttcatagttccaggcccagagctacagctgggctgggagcatgtgtgtgcactgtaagaaggagctgatgatactggccacgtgctggggttcgctcatgtggacacagtgattgcctgggacttccacaaactggaactgctctttgagggtggatttcatcgtgtctatcatgaacgacagggactccttctcagagtaattctgtcttgaatcaaaatatccgtggactgctttgatcaacaggacatggcctgcagcttcctgatggaatgcgcacacagctccctgctgatgaagtcaatgctgttctctgcccaggcgagcctctggtctctgttcagaaccagacctgtgggcaccttcgtggttcctctttgcaggagaactccccgcactcctcactcaagtggctattgctcttcagtaacctctgcagcagct

SEQ ID NO: 378 - protein, 323 aa, Homo sapien
MKVEPWRAGPGRRAWSEGAGQAPQKRARAGAEPQLPATPALPGGKMVARRRKCARGTRRPYPEPTAYAAIPIKFSEKQQASHYLYVRAHGVRQGTKSTWPQKRTLFVLNVPPYCTEESLSRLLSTCGLVQSVELQEKPDLAESPKESRSKFFHPKPVPGFQVAYVVFQKPSGVSAALALKGPLLVSTESHPVKSGIHKWISDYADSVPDPEALRVEVDTFMEAYDQKIAEEEAKAKGEEGVPDEEGWVKVTRRGRRLCSPGLRQPACGCWRGRDGSAAKRAAQLLRLAASREQDGASSAARKKFEEDKQRIELLRAQRKFRPY

SEQ ID NO: 379 - DNA, 827 bp, Homo sapien
ggaacagtgtggcccgccatgttcttctccgcggcgctccgggcccgggcggctggcctcaccgcccactggggaagacatgtaaggaatttgcataagacagctatgcaaaatggagctggaggagctttatttgtgcacagagatactcctgagaataaccctgatactccatttgatttcacaccagaaaactataagaggatagaggcaattgtaaaaaactatccagaaggccataaagcagcagctgttcttccagtcctggatttagcccaaaggcagaatgggtggttgcccatctctgctatgaacaaggttgcagaagttttacaagtacctccaatgagagtatatgaagtagcaactttttatacaatgtataatcgaaagccagttggaaagtatcacattcaggtctgcactactacaccctgcatgcttcgaaactctgacagcatactggaggccattcagaaaaagcttggaataaaggttggggagactacacctgacaaacttttcactcttatagaagtggaatgtttaggggcctgtgtgaacgcaccaatggttcaaataaatgacaattactatgaggatttgacagctaaggatattgaagaaattattgatgagctcaaggctggcaaaatcccaaaaccagggccaaggagtggacgcttctcttgtgagccagctggaggtcttacctctttgactgaaccacccaagggacctggatttggtgtacaagcaggcctttaatttatattgaactgtaaatatgtcactagagaaataaaatatggacttccaatctacgt

SEQ ID NO: 380 - protein, 249 aa, Homo sapien
MFFSAALRARAAGLTAHWGRHVRNLHKTAMQNGAGGALFVHRDTPENNPDTPFDFTPENYKRIEAIVKNYPEGHKAAAVLPVLDLAQRQNGWLPISAMNKVAEVLQVPPMRVYEVATFYTMYNRKPVGKYHIQVCTTTPCMLRNSDSILEAIQKKLGIKVGETTPDKLFTLIEVECLGACVNAPMVQINDNYYEDLTAKDIEEIIDELKAGKIPKPGPRSGRFSCEPAGGLTSLTEPPKGPGFGVQAGL

SEQ ID NO: 381 - DNA, 3593 bp, Homo sapien
ctcggccccgggctgccgcgccagcccgtctccgcggcgggggaccgggctgccttggcccctcagcgctcgcgtcttttccggcagttggaacgcttcctgttgtcctcacccgtaaccgcctgttgccccctgtctcagagtccctcacgcgtcccctcccgtctttggctcgttggctgccgccgccggggcttcgccagccttcaagtcgagactactggccgaaggggcgtctgcggctctccgccgtccccagccctgcctctccctgggctctgcagccatggcaatgacaggctcaacaccttgctcatccatgagtaaccacacaaaggaaagggtgacaatgaccaaagtgacactggagaatttttatagcaaccttatcgctcaacatgaagaacgagaaatgagacaaaagaagttagaaaaggtgatggaagaagaaggcctaaaagatgaggagaaacgactccggagatcagcacatgctcggaaggaaacagagtttcttcgtttgaagagaacaagacttggattggaagattttgagtccttaaaagtaataggcagaggagcatttggtgaggtacggcttgttcagaagaaagatacgggacatgtgtatgcaatgaaaatactccgtaaagcagatatgcttgaaaaagagcaggttggccacattcgtgcggagcgtgacattctagtggaggcagacagtttgtgggttgtgaaaatgttctatagttttcaggataagctaaacctctacctaatcatggagttcctgcctggaggggacatgatgaccttgttgatgaaaaaagacactctgacagaagaggagactcagttttatatagcagaaacagtattagccatagactctattcaccaacttggattcatccacagagacatcaaaccagacaaccttcttttggacagcaagggccatgtgaaactttctgactttggtctttgcacaggactgaaaaaagcacataggacagaattttataggaatctgaaccacagcctccccagtgatttcactttccagaacatgaattccaaaaggaaagcagaaacctggaaaagaaatagacgtcagctagccttctccacagtaggcactcctgactacattgctcctgaggtgttcatgcagaccgggtacaacaagctctgtgattggtggtcgcttggggtgatcatgtatgagatgctcatcggctacccacctttctgttctgagacccctcaagagacatataagaaggtgatgaactggaaagaaactttgacttttcctccagaagttcccatctctgagaaagccaaggatctaattttgaggttctgctgtgaatgggaacatagaattggagctcctggagttgaggaaataaaaagtaactctttttttgaaggcgttgactgggaacatatcagagagagacctgctgcaatatctattgaaatcaaaagcattgatgatacctcaaacttcgatgagtttccagaatctgatattcttaagccaacagtggccacaagtaatcatcctgagactgactacaagaacaaagactgggtcttcatcaattacacgtacaagcgctttgagggcctgactgcaaggggggcaataccttcctacatgaaagcagcaaaatagtactcttgccacggaatcctatgtggagcagagttctttgtataacatcatgcttttcctctcacactcttgaagagcttccaagaagttgatggaacccaccaatatgtcatagtaaagtctcctgaaatgtggtagtaagaggattttcttccataatgcatctgaaaaactgtaaacaaagacaaccatttctactacgtcggccataaacagctatcctgctttggaagagaagcatcatgagccaatttgataggtgttttaaaaataacttgagttttcctaagttcatcagaatgaaggggaaaaacagccatcatccaacattattgagattgtcgtgtatagtcatcgaatatcagccagttcctgtaattttgtgacacgctctctgccaagcccaccaagtatttcctttatagctaaaagttccatagtactaaggaaataaagcaataaagacagtctcagcagccaggattctggctgaaggaaatgatccgccaccctgagggtggtgatggtagtttctacccatacctcagcctcaggcgagtggcttatagcctccattcatggtgcactttatttatggtactaagataaagactgtcaatccattgatttatctcctcctgtcccccatctaaaatacccatgctgcttttctgagtgttgatgggggttaccagcttgatccactgttgctcttagaaggcccagaaagtctttgggcattgccaagaaatcccggattatgtggaaaaccctcactttctcttcacggctgtaccagaaaatccctaagacagatcttgccgtggactagcaatacctgcaagtgctgccaatgggaactcaatttattcctgggaacctaacgaggagagcccaggcctaggcaggaggcctggaaccctcttggctaaggtgctgttcctgttcctgcaaggtctccagaacccctttggaaatggtgaaggaaccagcccaatagaagtacagagccagctgacaagtccttgtaaagctcactcctcagtccttggcacagccatgttttgtcttctctcttggtatttcttctctcccaactttagccattttgccttggaatcatgattacaattttttcctttgcagatgccttcctgggggatactcctccccaccctaaagggtcgcctgcaacttaggcggattgggtctctctgctgtggcgttctctcttgagagaccctctgaattttagcacaaagtgccttctgtttcacagctgccaccacctttagaggaatttcgtcagaaaaatgtggaggctccatattaatgcattattttttaaaaagttttgataactcttaaagcatcatttgcacctatgtgggaactttgcctgttgcaaagtattgtggccgagctgcagctgggagcctgctttctgccagtcttgaggttctgaagatcagctttgaaaggaaagtatgtcctagcttagccattcagaagagaaaaatggaatatcagagttacagttgtcagtgaaactactttggattttaacctcttagaggaagaaaaaaggttagggaagtgtcaactctggatgaaggtgatgtgtttgcctctcagtctttcattcatagcctgctagtgaaaaggaagtaaatgagattcttttgtgtgactttgtagtctctttgtattaccaaatagttggggtgttgactcctgtgtgttttgcaagaatgtgtggtaagcctgggtaaagagaaggaactgcggtgttgggagagtctttgtgttggggagtggcaggggatgatttgtttcaggggaaaatgcccacattttaacttttaaacttctgaataaactgtgtaaaaacaaaaaaaaaaaaaaaaaa

SEQ ID NO: 382 - protein, 465 aa, Homo sapien
MAMTGSTPCSSMSNHTKERVTMTKVTLENFYSNLIAQHEEREMRQKKLEKVMEEEGLKDEEKRLRRSAHARKETEFLRLKRTRLGLEDFESLKVIGRGAFGEVRLVQKKDTGHVYAMKILRKADMLEKEQVGHIRAERDILVEADSLWVVKMFYSFQDKLNLYLIMEFLPGGDMMTLLMKKDTLTEEETQFYIAETVLAIDSIHQLGFIHRDIKPDNLLLDSKGHVKLSDFGLCTGLKKAHRTEFYRNLNHSLPSDFTFQNMNSKRKAETWKRNRRQLAFSTVGTPDYIAPEVFMQTGYNKLCDWWSLGVIMYEMLIGYPPFCSETPQETYKKVMNWKETLTFPPEVPISEKAKDLILRFCCEWEHRIGAPGVEEIKSNSFFEGVDWEHIRERPAAISIEIKSIDDTSNFDEFPESDILKPTVATSNHPETDYKNKDWVFINYTYKRFEGLTARGAIPSYMKAAK

SEQ ID NO: 383 - DNA, 3615 bp, Homo sapien
ggactgtgtgtgtctggctgtagcagacgcgaggcggcgacgaggcgccggggacccgcgcgaggggcggccgggaggcggcggcggcggccgccagaagtagcagcaggaccggcggcggcgacggcagccctgaaatgcattttcctctccagcggccatgttaaccaggaaaccttcggccgccgctcccgccgcctacccgaccggccgaggtggggacagcgccgttcgtcagcttcaggcttccccggggctcggtgcagggcccacccggagcggagtggggactggcccgccctcccccatcgccctgccgcctctccgggccagcaacgctgccgccgcagcccacacgattggcggcagtaagcacacaatgaatgatcacctgcatgtcggcagccacgctcacggacagatccaggttcaacagttgtttgaggataacagtaacaagcggacagtgctcacgacacaaccaaatgggcttacaacagtgggcaaaacgggcttgccagtggtgccagagcggcagctggacagcattcatagacggcaggggagctccacctctctaaagtccatggaaggcatggggaaggtgaaagccacccccatgacacctgaacaagcaatgaagcaatacatgcaaaaactcacagccttcgaacaccatgagattttcagctaccctgaaatatatttcttgggtctaaatgctaagaagcgccagggcatgacaggtgggcccaacaatggtggctatgatgatgaccagggatcatatgtgcaggtgccccacgatcacgtggcttacaggtatgaggtcctcaaggtcattgggaaggggagctttgggcaggtggtcaaggcctacgatcacaaagtccaccagcacgtggccctaaagatggtgcggaatgagaagcgcttccaccggcaagcagcggaggagatccgaatcctggaacacctgcggaagcaggacaaggataacacaatgaatgtcatccatatgctggagaatttcaccttccgcaaccacatctgcatgacgtttgagctgctgagcatgaacctctatgagctcatcaagaagaataaattccagggcttcagtctgcctttggttcgcaagtttgcccactcgattctgcagtgcttggatgctttgcacaaaaacagaataattcactgtgaccttaagcccgagaacattttgttaaagcagcagggtagaagcggtattaaagtaattgattttggctccagttgttacgagcatcagcgtgtctacacgtacatccagtcgcgtttttaccgggctccagaagtgatccttggggccaggtatggcatgcccattgatatgtggagcctgggctgcattttagcagagctcctgacgggttaccccctcttgcctggggaagatgaaggggaccagctggcctgtatgattgaactgttgggcatgccctcacagaaactgctggatgcatccaaacgagccaaaaattttgtgagctccaagggttatccccgttactgcactgtcacgactctctcagatggctctgtggtcctaaacggaggccgttcccggagggggaaactgaggggcccaccggagagcagagagtgggggaacgcgctgaaggggtgtgatgatccccttttccttgacttcttaaaacagtgtttagagtgggatcctgcagtgcgcatgaccccaggccaggctttgcggcacccctggctgaggaggcggttgccaaagcctcccaccggggagaaaacgtcagtgaaaaggataactgagagcaccggtgctatcacatctatatccaagttacctccaccttctagctcagcttccaaactgaggactaatttggcgcagatgacagatgccaatgggaatattcagcagaggacagtgttgccaaaacttgttagctgagctcacgtcccctgatgctggtaacctgaaagatacgacattgctgagccttactgggttgaaaaggagtagctcagacctgtttttatttgctcaataactctactcatttgtatcttttcagcacttaattttaatgtaagaaagttgttcattttgtttttataaaatacatgaggacaatgctttaagtttttatactttcagaaactttttgtgttctaaaagtacaatgagccttactgtatttagtgtggcagaataataacatcagtggcaggccactgattacttcatgactgccacgcatttacagattggtgtcaaagacattcactatgtttttatggttcatgttatatcctccccagggtgacagccccttaaggccctccttttccctccatgctccaggtccatgcacaggtgtagcatgtcctgcttccgtttttcataaattaatctgggtgttgggggtagtgggaggagaacggtcagaatcaaagtgacattctaagaaaaactgtaccttagagattttcctctagtgctcaaacaaatacaaaataagatccccaaggtttaaactgcccagttagcattctgacattctaaaagccggcaaagcagcttttagtggataaatgggaatggaaacgtgtgtgttcctccaaattttctagtatgatcggtgagctgttttgtaaagaagcctcatattacagagttgcttttgcacctaaatttagaattgtattccatgaactgttcctcccttttctctgcttttctcctctctgttcctcttttaataccacacgtctgttgcttgcatttagtttgtcttcttccttcagctgtgtatcccagactgttaatacagaaaagagacatttcagctgtgattatgaccattgtttcatattccaattaaaaaaagaacagcagcctagctacttaaggtggggatttcatagttccaaagaagatttagcagattagagtgagttcacacttttcaggtgccactgtaaggttctctcagcctgggaaactatcaactctttctttaaaaagaaagagggttgaaaatcctctggacgaacagaagtcactttggctgttcagtaaggccaatgttaacaacacgtttagaggaggaaaagttcaacctcaagttaaatggtttgacttattcttcgtatcattagaagaaccccagagatagcattcctctattttattttactttcttttggattgcactgattgtttttgtgggaatgacactttatctggcaaagtaactgagagtttggtaaaagaatattttcttctctgaataataattattttcacagtgaaaatttcagtattttatcactaatgtatgagcaatgatctatatcaatttcaaggcacgtgaaaaaaattttttagtatgtgcaatttaatatagaaagatttctgcctgtttggacaataggttttgggtagtacagattaggataagtaagcttatatatgcacagagattattgtattacctgtaaattgatttacaagtacttaaaagcgtggtccccagtgaggccaagaaagtttccggttaagttctttaataataatcctacagtttatcttaagaa

SEQ ID NO: 384 - protein, 601 aa, Homo sapien
MLTRKPSAAAPAAYPTGRGGDSAVRQLQASPGLGAGPTRSGVGTGPPSPIALPPLRASNAAAAAHTIGGSKHTMNDHLHVGSHAHGQIQVQQLFEDNSNKRTVLTTQPNGLTTVGKTGLPVVPERQLDSIHRRQGSSTSLKSMEGMGKVKATPMTPEQAMKQYMQKLTAFEHHEIFSYPEIYFLGLNAKKRQGMTGGPNNGGYDDDQGSYVQVPHDHVAYRYEVLKVIGKGSFGQVVKAYDHKVHQHVALKMVRNEKRFHRQAAEEIRILEHLRKQDKDNTMNVIHMLENFTFRNHICMTFELLSMNLYELIKKNKFQGFSLPLVRKFAHSILQCLDALHKNRIIHCDLKPENILLKQQGRSGIKVIDFGSSCYEHQRVYTYIQSRFYRAPEVILGARYGMPIDMWSLGCILAELLTGYPLLPGEDEGDQLACMIELLGMPSQKLLDASKRAKNFVSSKGYPRYCTVTTLSDGSVVLNGGRSRRGKLRGPPESREWGNALKGCDDPLFLDFLKQCLEWDPAVRMTPGQALRHPWLRRRLPKPPTGEKTSVKRITESTGAITSISKLPPPSSSASKLRTNLAQMTDANGNIQQRTVLPKLVS

SEQ ID NO: 385 - DNA, 4491 bp, Homo sapien
aaatgtagagaagcagccgataaaatagcattgcctgaagaagtttggaggctgagagcagcagtagactggccaactgcagagcaagttgtttctccagccgtgcggtgcagcctcatgcccccaacccagcttagccactgtaagaagacgttcactgtacagacgaccaaacttgccgtggaagagacagttgtgagattcccttgcaaatttacatacgagaatggcttgtgaaatcatgcctctgcaaagttcacaggaagatgaaagacctctgtcacctttctatttgagtgctcatgtaccccaagtcagcaatgtgtctgcaaccggagaactcttagaaagaaccatccgatcagctgtagaacaacatctttttgatgttaataactctggaggtcaaagttcagaggactcagaatctggaacactatcagcatcttctgccacatctgccagacagcgccgccgccagtccaaggagcaggatgaagttcgacatgggagagacaagggacttatcaacaaagaaaatactccttctgggttcaaccaccttgatgattgtattttgaatactcaggaagtcgaaaaggtacacaaaaatacttttggttgtgctggagaaaggagcaagcctaaacgtcagaaatccagtactaaactttctgagcttcatgacaatcaggacggtcttgtgaatatggaaagtctcaattccacacgatctcatgagagaactggacctgatgattttgaatggatgtctgatgaaaggaaaggaaatgaaaaagatggtggacacactcagcattttgagagccccacaatgaagatccaggagcatcccagcctatctgacaccaaacagcagagaaatcaagatgccggtgaccaggaggagagctttgtctccgaagtgccccagtcggacctgactgcattgtgtgatgaaaagaactgggaagagcctatccctgctttctcctcctggcagcgggagaacagtgactctgatgaagcccacctctcgccgcaggctgggcgcctgatccgtcagctgctggacgaagacagcgaccccatgctctctcctcggttctacgcttatgggcagagcaggcaatacctggatgacacagaagtgcctccttccccaccaaactcccattctttcatgaggcggcgaagctcctctctggggtcctatgatgatgagcaagaggacctgacacctgcccagctcacacgaaggattcagagccttaaaaagaagatccggaagtttgaagatagattcgaagaagagaagaagtacagaccttcccacagtgacaaagcagccaatccggaggttctgaaatggacaaatgaccttgccaaattccggagacaacttaaagaatcaaaactaaagatatctgaagaggacctaactcccaggatgcggcagcgaagcaacacactccccaagagttttggttcccaacttgagaaagaagatgagaagaagcaagagctggtggataaagcaataaagcccagtgttgaagccacattggaatctattcagaggaagctccaggagaagcgagcggaaagcagccgccctgaggacattaaggatatgaccaaagaccagattgctaatgagaaagtggctctgcagaaagctctgttatattatgaaagcattcatggacggccggtaacaaagaacgaacggcaggtgatgaagccactatacgacaggtaccggctggtcaaacagatcctctcccgagctaacaccatacccatcattggttccccctccagcaagcggagaagccctttgctgcagccaattatcgagggcgaaactgcttccttcttcaaggagataaaggaagaagaggaggggtcagaagacgatagcaatgtgaagccagacttcatggtcactctgaaaaccgatttcagtgcacgatgctttctggaccaattcgaagatgacgctgatggatttatttccccaatggatgataaaataccatcaaaatgcagccaggacacagggctttcaaatctccatgctgcctcaatacctgaactcctggaacacctccaggaaatgagagaagaaaagaaaaggattcgaaagaaacttcgggattttgaagacaactttttcagacagaatggaagaaatgtccagaaggaagaccgcactcctatggctgaagaatacagtgaatataagcacataaaggcgaaactgaggctcctggaggtgctcatcagcaagagagacactgattccaagtccatgtgaggggcatggccaagcacagggggctggcagctgcggtgagagtttactgtccccagagaaagtgcagctctggaaggcagccttggggctggccctgcaaagcatgcagcccttctgcctctagaccatttggcatcggctcctgtttccattgcctgccttagaaactggctggaagaagacaatgtgacctgacttaggcattttgtaattggaaagtcaagactgcagtatgtgcacatgcgcacgcgcatgcacgcacacacacacacagtagtggagctttcctaacactagcagagattaatcactacattagacaacactcatctacagagaatatacactgttcttccctggataactgagaaacaagagaccattctctgtctaactgtgataaaaacaagctcaggactttattctatagagcaaacttgctgtggagggccatgctctccttggacccagttaactgcaaacgtgcattggagccctatttgctgccgctgccattctagtgacctttccacagagctgcgccttcctcacgtgtgtgaaaggttttccccttcagccctcaggtagatggaagctgcatctgcccacgatggcagtgcagtcatcatcttcaggatgtttcttcaggacttcctcagctgacaaggaattttggtccctgcctaggaccgggtcatctgcagaggacagagagatggtaagcagctgtatgaatgctgattttaaaaccaggtcatgggagaagagcctggagattctttcctgaacactgactgcacttaccagtctgattttatcgtcaaacaccaagccaggctagcatgctcatggcaatctgtttggggctgttttgttgtggcactagccaaacataaaggggcttaagtcagcctgcatacagaggatcggggagagaaggggcctgtgttctcagcctcctgagtacttaccagagtttaatttttttaaaaaaaatctgcactaaaatccccaaactgacaggtaaatgtagccctcagagctcagcccaaggcagaatctaaatcacactattttcgagatcatgtataaaaagaaaaaaaagaagtcatgctgtgtggccaattataatttttttcaaagactttgtcacaaaactgtctatattagacattttggagggaccaggaaatgtaagacaccaaatcctccatctcttcagtgtgcctgatgtcacctcatgatttgctgttacttttttaactcctgcgccaaggacagtgggttctgtgtccacctttgtgctttgcgaggccgagcccaggcatctgctcgcctgccacggctgaccagagaaggtgcttcaggagctctgccttagacgacgtgttacagtatgaacacacagcagaggcaccctcgtatgttttgaaagttgccttctgaaagggcacagttttaaggaaaagaaaaagaatgtaaaactatactgacccgttttcagttttaaagggtcgtgagaaactggctggtccaatgggatttacagcaacattttccattgctgaagtgaggtagcagctctcttctgtcagctgaatgttaaggatggggaaaaagaatgcctttaagtttgctcttaatcgtatggaagcttgagctatgtgttggaagtgccctggttaatccatacacaaagacggtacataatcctacaggtttaaatgtacataaaaatatagtttggaattctttgctctactgtttacattgcagattgctataatttcaaggagtgagattataaataaaatgatgcactttaggatgtttcctatttttgaaatctgaacatgaatcattcacatgaccaaaaattgtgtttttttaaaaatacatgtctagtctgtcctttaatagctctcttaaataagctatgatattaatcagatcattaccagttagcttttaaagcacatttgtttaagactatgtttttggaaaaatacgctacagaatttttttttaagctacaaataaatgagatgctactaattgttttggaatctgttgtttctgccaaaggtaaattaactaaagatttattcaggaatccccatttgaatttgtatgattcaataaaagaaaacaccaagtaagttatataaaat

SEQ ID NO: 386 - protein, 697 aa, Homo sapien
MACEIMPLQSSQEDERPLSPFYLSAHVPQVSNVSATGELLERTIRSAVEQHLFDVNNSGGQSSEDSESGTLSASSATSARQRRRQSKEQDEVRHGRDKGLINKENTPSGFNHLDDCILNTQEVEKVHKNTFGCAGERSKPKRQKSSTKLSELHDNQDGLVNMESLNSTRSHERTGPDDFEWMSDERKGNEKDGGHTQHFESPTMKIQEHPSLSDTKQQRNQDAGDQEESFVSEVPQSDLTALCDEKNWEEPIPAFSSWQRENSDSDEAHLSPQAGRLIRQLLDEDSDPMLSPRFYAYGQSRQYLDDTEVPPSPPNSHSFMRRRSSSLGSYDDEQEDLTPAQLTRRIQSLKKKIRKFEDRFEEEKKYRPSHSDKAANPEVLKWTNDLAKFRRQLKESKLKISEEDLTPRMRQRSNTLPKSFGSQLEKEDEKKQELVDKAIKPSVEATLESIQRKLQEKRAESSRPEDIKDMTKDQIANEKVALQKALLYYESIHGRPVTKNERQVMKPLYDRYRLVKQILSRANTIPIIGSPSSKRRSPLLQPIIEGETASFFKEIKEEEEGSEDDSNVKPDFMVTLKTDFSARCFLDQFEDDADGFISPMDDKIPSKCSQDTGLSNLHAASIPELLEHLQEMREEKKRIRKKLRDFEDNFFRQNGRNVQKEDRTPMAEEYSEYKHIKAKLRLLEVLISKRDTDSKSM

SEQ ID NO: 387 - DNA, 1379 bp, Homo sapien
gcgcgcagcagccatctccactccaaagttagacaaaatgccaggaatgttcttctctgctaacccaaaggaattgaaaggaaccactcattcacttctagacgacaaaatgcaaaaaaggaggccaaagacttttggaatggatatgaaagcatacctgagatctatgatcccacatctggaatctggaatgaaatcttccaagtccaaggatgtactttctgctgctgaagtaatgcaatggtctcaatctctggaaaaacttcttgccaaccaaactggtcaaaatgtctttggaagtttcctaaagtctgaattcagtgaggagaatattgagttctggctggcttgtgaagactataagaaaacagagtctgatcttttgccctgtaaagcagaagagatatataaagcatttgtgcattcagatgctgctaaacaaatcaatattgacttccgcactcgagaatctacagccaagaagattaaagcaccaacccccacgtgttttgatgaagcacaaaaagtcatatatactcttatggaaaaggactcttatcccaggttcctcaaatcagatatttacttaaatcttctaaatgacctgcaggctaatagcctaaagtgactggtccctggctgaagggaattaacagatagtatcaagcgcagaaggaatgtgccagtatggctccctgggtgaacagcttggccttttgtgggtgtcttgacagcccaagaagaacaaatgactcagaatggattaacatgaaagttatccaggcgcagagttgaagaagcataagcaagacaaaaacagagagaccgcagaaggaggaagatactgtggtactgtcataaaaaacagtggagctctgtattagaaagcccctcagaactgggaaggccaggtaactctagttacacagaaactgtgactaaagtctatgaaactgattacaacagactgtaagaatcaaagtcaactgacatctatgctacatattattatatagtttgtactgagctattgaagtcccattaacttaaagtatatgttttcaaattgccattgctactattgcttgtcggtgttattttattttattgtttttgactttggaagagatgaactgtgtatttaacttaagctattgctcttaaaaccagggagtcagaatatatttgtaagttaaatcattggtgctaataataaatgtggattttgtattaaaatatatagaagcaatttctgtttacatgtccttgctacttttaaaaacttgcatttattcctcagattttaaaaataaataaataattcatttaaaaaaaaaaaaaaaaaaaaaaaaaaaaaaaaaaaaaaaaaaaaaaaaaaa

SEQ ID NO: 388 - protein, 196 aa, Homo sapien
MPGMFFSANPKELKGTTHSLLDDKMQKRRPKTFGMDMKAYLRSMIPHLESGMKSSKSKDVLSAAEVMQWSQSLEKLLANQTGQNVFGSFLKSEFSEENIEFWLACEDYKKTESDLLPCKAEEIYKAFVHSDAAKQINIDFRTRESTAKKIKAPTPTCFDEAQKVIYTLMEKDSYPRFLKSDIYLNLLNDLQANSLK

SEQ ID NO: 389 - DNA, 6834 bp, Homo sapien
  Unsure 4613-4614: Unknown base
ctcacacatagacacgcacacacaccctttctcgcacacacacacacacacacacacactctcacacattctcacatgctagacccttctaagcagcttgtccgtttttacacatgtatctgaactctcctgcatcactcttggccattttctcgcattcgattgcttttgccgttttttatttagatcagtacttgatttcattttcattttccagtctactttggggttctcgcagtggataatttagccaaaatgtttttcttgtggagacattagctgacaattcccaccacagactggcttgtacgtcctcccagggagacctaaacctggctcccctcccaccgcagttcttaatattgtggataagagatccatctttctcattctggatacctacttagtgctcatggaagaaggggtgccctgcccagccccagctgctaagctcacacctcctgtcaaaaagtcccaggacatgcacgacgagaggagcaagctggtgaatgagtatgcgtgtcgagtgctggaacttctggggatggggcatcgtctgtttgtgcctcggcttctggcgacctcaaaggaagaccttctgcaggctgattttgaaggtgctttaaagttctttagagttcagcttccaaagagatacagggcagaggaaaatgcaagaagactgatggagcaggcttgcaatattaaagtaccaaccaagaagctgaagaaatatgagaaagaatatcagacaatgcgagagagtcagctgcaacaggaagacccaatggatagatacaagagggagaaccgaagattacaggaggccagcatgaggttggaacaagagaatgatgaccttgcccatgaactagtaacaagcaaaattgctctacggaatgacttggatcaggcagaagacaaggcagatgtgttgaataaagagctccttttgaccaaacagaggctggtggagactgaagaggagaagaggaagcaagaggaagagactgcccagctaaaagaagtcttcaggaaacagctagagaaggcagaatatgaaataaagaagactacagctatcattgctgagtataaacagatctgttcgcagttgagtaccaggctggagaaacagcaagcagccagcaaggaggagctggaagtggtaaagggtaagatgatggcatgcaaacactgcagtgacattttcagcaaggagggtgctttgaaactagcagccacaggcagagaggaccagggaattgaaacagatgatgagaaggactcacttaagaagcagctgagagagatggaactggaactggcacaaaccaaactgcagttggtggaggccaagtgtaaaattcaggaacttgaacatcagagaggagcccttatgaatgaaatccaagctgcgaaaaactcttggtttagcaaaaccctgaactctatcaaaacggccacgggcacccagccattgcagccagcaccggtcacccagccacccaaggagagcacatagttccagccttacccaagcacaagagcacaatgttcaaaccaatggaaatctgggaggattcttcctggtgtccctttgaaggaaagtcaaggaggccagaaaacaagccagaatttttcagtagctctcactctttcttgtatgacacttttcaaagggatgctatttaaactgacctgttctatgttgaatacctattttccagcttctggaaggccatgttcagatccatcatagtattacacattattttgtttgcctgatgtttagttggaaataagtaattcagaactaaatgcttttttatttagaattattcataattatttttatcttacataaaaatggagacatctgttattccaaggttgaagtgataagaagatctttgtcacaggaaaaaaaaaaattgaaacctaaacatcttaagttttcaggatttattcagataaagcacactgtggggccaggcatgaccactctcaggtttcctcctgagcctgattcccagggaagtgttaatcctgtccaaaggaaagaaccaatcagcgatcattggtttactttcattttctgttcggtacatctggaaatgaagtgccaggaatagacgggctgttcagattatacgctaggtaaaaggaactgaaattttaataagtgtaggtcaggatcatttgggctgtggtattctaacagatccttttaagaatgccacataggacttgtgagttcctaagtacaccaaagtatggacacagatgtgacttctggcaattataaagttaaaggtggatattgcaccttacagacttagggagcctttaccagagacgcctaaaaagccccaggttcagccattgtgctgaatagagtggaatatagaaccagggacagagtatttcatttaacgttgatatatacttgctaaggaaacactaacaatactgtaactttgttaaaggacatagtattgaaatgggaaatagaggtcaggctcacatcatcttagtttaatgctgggcaacttttttctgatttctgtagttccctgaaaatgtgtccttcgtacccataaagagatacaaatgcatttgtaacatttttgattgaatataaaacctttacagaaatacttatctcatggaaaggtaaagctattgtttaaaaattagtggaaatattttttcaattatatttaacatgcctataaaaatagtccttgcaggaaattatttgataagagcaaaactatttttattttataaactattttggaggcctctgatcctttcaaaccaaccaaactactattagatatgtacaataacatttgttgatattaatcattggcctcattgttgaacatattatttgcaaagaatcttaaactctgtagtgccagaatgattctcatctgtgccatattttgcaattaaaagtaacacacccttagaagaatcaaataagagccatctacatcccaggaggatgcaccaagttgctcacagtggatcttttcctctaaaatgatcttttatgttctaaaaagtgaaatcccctttatctgtgtttatattctctacagcccataaaactgatgtgattgttatgttatactcatcagataatacttttcttacataaatctttcattgttgttctgacatctttcattacaaaatttattttcttaacaaaaaggaacataacccagcattccaagtgtctgtgttggctttaacattctctacatggtggtctagataagctaattttttttttttttttttttgtaaaatgtaatagctagaaaatgttatcttcgcgcttgtttttgtaaatcatttagtataggctgttagctttactggtactttacgctttgattccaagaagccttgtgcagttgccttatcaaatggccagctaaattaaagatgctcttttgtgttgtgaatttcatagttctgtacagagcttgtttcaatttacaaaaataagtacattccacagaatgcctaaattgtgtaattttctttaaataatagtaggtgagggagaaacataatggctctaggtcaatcccttatctaaagaccttgttcaacttcatagtccctttccttttaaagaggagaagagaaaaatcccccctggccaggcatggtggctcacatctgtaatcccagcactttgggaggctgaggtgggtggatcacctaaggtcaggagtttgagaccagcctggccaacatggtgaaaccctatctctactgcaaaatacaaaaattagccgggcttggtggcgggtgcctgtaatcccagctactcgggaggttgaggcaggagaatcacttgaacccaggaggcagaggttgcagtgggccaagattacggcattacattccatccagcctgggcgacaagagcaaaattccgtctcgaaaaatcaccaggtacatacctctcaagtttgataagtccatcttttgagttttcttttagctctttcaaaagattacgagggcaatacatattttttttttttttattctccagccccatatcatacttgggtatgcctgttggtaccataagcctaaactctccttcactgcaatgcctttgagtcagtagcaatagtaaagactagaaacaaagaaaattcagaatttggtatgtgatatgattgttcatacaatatgttataatagcaatattccaaacaatatgtccttcactgtctattgttggaaaactcatgcatcccagcatgaagtaactcctagttttaattttagttattttgagatatatttgagaattgcatctcttctcttgaatttcacttagaagagattaaccagccaaatatccaggaaagtttcaaaacattctagtgtttttcatcctttgctaggatgcactctgtacaaaacattcctctgaaaatctaatatttgcagtatctaagaattgatcatttctattttcattaaattctgtggaaaaaattaaatgaatgaaattcaacttcataattcagttcatcagcttttgtatcttgagaatctaaacacgtctnnaaatctgaaagaaaccaagctggattttgcagtgcatatgtttgctagcttcccacatcctgaaccatgtcaaaatttggttttatttagttacatataatttaatgcaaagaaattctgttacttaatgttctgtttatttatgagtgcctatcaggaacactaataggaatgccattcaaccagtgtcttctgcccctctcccagctgttaaattagtacttcttcattggctttctgaaatgtcctgagtaaagtagaaaagcaacctttgtatggatgtggggatatttaatagtatgtatcttgtttcatttttttcctatgatgtattaatatttatttttctccaacccctgctccattttcttaaaatattttccagttaataactagttgctttatttcctagctgaagtgagaaaaccaacggaaaacaatacagatttgggcagaggagatagagttacatctttaaaggagtgagccagtcacccaggagaatcacatgtgtaactgatgtaggggtttaagtcttcatactttcactaaaatctgtctactaactctcccaccaacctttgcatcaaacacttaggtacctgcctgattaggggggcccctttaagggaaaaaacttttaaaaaattaaatgccttggttttgttttatcttctgggaaagaacacttttacttgattagcaagatgattatattatataacttgcccttaaaaacactccaaaatactgactccttttctccaattacaaatgagtgtgaagaaattctgttgtatgatttgaacactattaggtttgtatgtgtgtttaattggaagaattttatatagagtatctctgctgcttttgtttacctgggtaccacacaaccaaatacacattgagatttcaagaaatgatgatgaaagccagaaggccagaccacagctctgcagcctgtttcctacaaccagatataaaactctttctcgtcgccatgctgatagtcacactgaactagaactgtcccaacacattcttcctctctcataatggcttccatttaatacaggcaaagccctttaccttagcaaattctttatctttcaaaagtgaccaaaatgaggacttcaaccttggctgcacctcaataggagatgctgatcttgagttgtaatgagaaaagtgggcatataggagattttagtgactgcagtcagctgtctggcattcctttctcagtttgcatctaaaagactacatatgtcaagcttatctccacctgaatttgctgcctgctataaaaacatttcattaatatatcccattcttcctacctccatctctggtttgtcattagtggtattctgaaaagcttaagaaaaaagaatcattgagtagaaagtgaacattttaagttattttcctttttcattggcaattagttaacatgtaaaatcttttccattaaactgtataacttttaataactatatattatatatgggataaaatatatggactgaattgtgagaatataaatgcatcgaaagactctggtgtcatgaaagcacaagaataaggctggagatggtcccagatccaagatgtcccaaaagccttttgtatcagtttctctatttttggtattttgcataatgcatggatccttagttcaaatgagggacaaagtttctcagtcagccccacttcctttctttctaactcctacctttcccttgcagaggaggtagtagagattctggaattgtctatttttatgaattccattattttgtccatggcatctctaatgaaaacaggttctagaataaaggagttgattagtctgaacagtactaattaactacaaaataaacgttagtgatcagcctcttcctctataaacaatgaccaattagacgtttccgtaattccatgtattatgtatagtacactctataaatgtaaatgtaatgcttgtctaaaaagtgcaatttattgtacattgtcccaacaaatgtttacttttataatcgttatgaacttgaattggattagtatcttgtttttatgtgtgaatgaagccttgtgaaataaacaaatgcaactgagaaggtaacaaggtgactgtttttgtgagccagtgatgttttcaatgctttgtgttgcccctttggccccattaagcagtaataaacatttgttctgaagtcc

SEQ ID NO: 390 - protein, 370 aa, Homo sapien
MEEGVPCPAPAAKLTPPVKKSQDMHDERSKLVNEYACRVLELLGMGHRLFVPRLLATSKEDLLQADFEGALKFFRVQLPKRYRAEENARRLMEQACNIKVPTKKLKKYEKEYQTMRESQLQQEDPMDRYKRENRRLQEASMRLEQENDDLAHELVTSKIALRNDLDQAEDKADVLNKELLLTKQRLVETEEEKRKQEEETAQLKEVFRKQLEKAEYEIKKTTAIIAEYKQICSQLSTRLEKQQAASKEELEVVKGKMMACKHCSDIFSKEGALKLAATGREDQGIETDDEKDSLKKQLREMELELAQTKLQLVEAKCKIQELEHQRGALMNEIQAAKNSWFSKTLNSIKTATGTQPLQPAPVTQPPKEST

SEQ ID NO: 391 - DNA, 1280 bp, Homo sapien
gcggccgccgtggccaggcaacctatgggtaccaccgggttctcgcgggtcttgcgaacgaacttttccttgaaactctctggattcctgtaaacagtggggctcagcccctcaatgactggaggcttcgatggttcaaaggggacctccggaatcacagggccgggagtcgccatgtccgggccacagcagcaggagaaaatcgggactccgacctcagcctcccggtgaaggtcatgaaaggggcggggaaacgaataaattgagccttgtacgcaggcgcaaatgctcgttgcatcctgggagtcgtagtgctcagcacggtagtgctacaaaaggactacatttccccaaatgcccgcaaagccttgtgcacgccttccggaaggagtttgttacacgaggtctgagagacagaggcagcgtgtttgagctgctggtgcggtggtcagcgcgatgcccaaggccaagggcaaaacccggaggcagaagtttggttacagtgtcaaccgaaagcgtctgaaccggaatgctcgacggaaggcagcgcgcggaatcgaatgctcccacatccgacatgcctgggaccacgctaaatcggtacggcagaacctggccgagatggggttggctgtggaccccaacagggcggtgcccctccgtaagagaaaggtgaaggccatggaggtggacatagaggagaggcctaaagagcttgtacggaagccctatgtgctgaatgacctggaggcagaagccagccttccagaaaagaaaggaaatactctgtctcgggacctcattgactatgtacgctacatggtagagaaccacggggaggactataaggccatggcccgtgatgagaagaattactatcaagataccccaaaacagattcggagtaagatcaacgtctataaacgcttttacccagcagagtggcaagacttcctcgattctttgcagaagaggaagatggaggtggagtaactggtttacatcacagctgccccaggctgaggcgtcccccggaccagtgaagctggagccagggtgtaaggcaaggaggtgctgtgtggctccagaggggctggccaggtcccatggaatcagaaggttacacacacacgtgcacactccccgctctggggaaggaactgttctcagaggctccaatttatattcatctgggggttcacggaaaagccagaacctgctgttttcagggtgggtgatgtaaatatagtgtgtacataataaagcaaatatattttaaa

SEQ ID NO: 392 - protein, 178 aa, Homo sapien
MPKAKGKTRRQKFGYSVNRKRLNRNARRKAARGIECSHIRHAWDHAKSVRQNLAEMGLAVDPNRAVPLRKRKVKAMEVDIEERPKELVRKPYVLNDLEAEASLPEKKGNTLSRDLIDYVRYMVENHGEDYKAMARDEKNYYQDTPKQIRSKINVYKRFYPAEWQDFLDSLQKRKMEVE

SEQ ID NO: 393 - DNA, 2285 bp, Homo sapien
gcgcccgggccgccggccgggcccgggcctgggggcggggcgggaagacggcggccgggagtgttttcagttccgcctccaatcgcccattcccctcttcccctcccagccccctccatcccatcggaagaggaaggaacaaaaggtcccggaccccccggatctgacggggcgggacctggcgccaccttgcaggttcgatacaagaggctgttttcctagcgtggcttgctgcctttggtaagaacatgtcgtccatcttgccattcacgccgccagttgtgaagagactgctgggatggaagaagtcagctggtgggtctggaggagcaggcggaggagagcagaatgggcaggaagaaaagtggtgtgagaaagcagtgaaaagtctggtgaagaagctaaagaaaacaggacgattagatgagcttgagaaagccatcaccactcaaaactgtaatactaaatgtgttaccataccaagcacttgctctgaaatttggggactgagtacaccaaatacgatagatcagtgggatacaacaggcctttacagcttctctgaacaaaccaggtctcttgatggtcgtctccaggtatcccatcgaaaaggattgccacatgttatatattgccgattatggcgctggcctgatcttcacagtcatcatgaactcaaggcaattgaaaactgcgaatatgcttttaatcttaaaaaggatgaagtatgtgtaaacccttaccactatcagagagttgagacaccagttttgcctccagtattagtgccccgacacaccgagatcctaacagaacttccgcctctggatgactatactcactccattccagaaaacactaacttcccagcaggaattgagccacagagtaattatattccagaaacgccacctcctggatatatcagtgaagatggagaaacaagtgaccaacagttgaatcaaagtatggacacaggctctccagcagaactatctcctactactctttcccctgttaatcatagcttggatttacagccagttacttactcagaacctgcattttggtgttcgatagcatattatgaattaaatcagagggttggagaaaccttccatgcatcacagccctcactcactgtagatggctttacagacccatcaaattcagagaggttctgcttaggtttactctccaatgttaaccgaaatgccacggtagaaatgacaagaaggcatataggaagaggagtgcgcttatactacataggtggggaagtttttgctgagtgcctaagtgatagtgcaatctttgtgcagagccccaattgtaatcagagatatggctggcaccctgcaacagtgtgtaaaattccaccaggctgtaatctgaagatcttcaacaaccaggaatttgctgctcttctggctcagtctgttaatcagggttttgaagccgtctatcagctaactagaatgtgcaccataagaatgagttttgtgaaagggtggggagcagaataccgaaggcagacggtaacaagtactccttgctggattgaacttcatctgaatggacctctacagtggttggacaaagtattaactcagatgggatccccttcagtgcgttgctcaagcatgtcataaagcttcaccaatcaagtcccatgaaaagacttaatgtaacaactcttctgtcatagcattgtgtgtggtccctatggactgtttactatccaaaagttcaagagagaaaacagcacttgaggtctcatcaattaaagcaccttgtggaatctgtttcctatatttgaatattagatgggaaaattagtgtctagaaatactctcccattaaagaggaagagaagattttaaagacttaatgatgtcttattgggcataaaactgagtgtcccaaaggtttattaataacagtagtagttatgtgtacaggtaatgtatcatgatccagtatcacagtattgtgctgtttatatacatttttagtttgcatagatgaggtgtgtgtgtgcgctgcttcttgatctaggcaaacctttataaagttgcagtacctaatctgttattcccacttctctgttatttttgtgtgtcttttttaatatataatatatatcaagattttcaaattatttagaagcagattttcctgtagaaaaactaatttttctgccttttaccaaaaataaactcttgggggaagaaaaaaaaaaaaaaaaaaaaaaaaaaaaaaaaaaaaaaaaaaaaaaaaaaaaa

SEQ ID NO: 394 - protein, 467 aa, Homo sapien
MSSILPFTPPVVKRLLGWKKSAGGSGGAGGGEQNGQEEKWCEKAVKSLVKKLKKTGRLDELEKAITTQNCNTKCVTIPSTCSEIWGLSTPNTIDQWDTTGLYSFSEQTRSLDGRLQVSHRKGLPHVIYCRLWRWPDLHSHHELKAIENCEYAFNLKKDEVCVNPYHYQRVETPVLPPVLVPRHTEILTELPPLDDYTHSIPENTNFPAGIEPQSNYIPETPPPGYISEDGETSDQQLNQSMDTGSPAELSPTTLSPVNHSLDLQPVTYSEPAFWCSIAYYELNQRVGETFHASQPSLTVDGFTDPSNSERFCLGLLSNVNRNATVEMTRRHIGRGVRLYYIGGEVFAECLSDSAIFVQSPNCNQRYGWHPATVCKIPPGCNLKIFNNQEFAALLAQSVNQGFEAVYQLTRMCTIRMSFVKGWGAEYRRQTVTSTPCWIELHLNGPLQWLDKVLTQMGSPSVRCSSMS

SEQ ID NO: 395 - DNA, 7585 bp, Homo sapien
ggtctcgatctcctgaccttgtgatccacctcctcggcctcccaaagtgctgggattacaggcatgagccacggcacccagcctcatttgctgttaaactcatttattgagtcacctttttcttcctcacactttttagtcttagaatttttgtgtgtttttatttaccctaacctgtcaatttcatagtttccactttcttgttgaagtttccaaacttgacctcatgcctttgaatatactaattctattgctttgacacatttttttcccgaaaaaggtgtaaatgggtcaataaatggaagtaatacatcatctgtaattggtatcaacacatctgtactatccactactgcttcaagttccatgggacaaactaaaagtacaagctcaggtggaggaaatcgaaaatgtaatcaggaacaaagcaaaaaccagcctttggatgctagagttgacaaaatcaaagataagaaaccaaggaagaaagcaatggaaagttctagcaacagtgatagtgattcaggcacatcatcagacacctcaagtgaaggcattagtagcagtgattcagatgatctagaagaagatgaagaagaagaagatcaaagtattgaagaaagtgaagatgatgattctgattcagagagtgaagcacaacataaaagtaacaaccaggtgctattacatggtatttcagacccaaaagcagatggacagaaagcaactgaaaaagcccaggaaaaaagaatacaccagccattacctcttgcgtttgaatcccagactcactcattccaatcccagcagaagcagcctcaggttttgtcacagcagcttccatttattttccaaagctctcaggcaaaggaggaatctgtgaacaaacacaccagtgtaatacagtctacgggattggtgtccaatgtgaaacctttatctttggtaaatcaagccaaaaaggaaacttacatgaaactcatagttccttctcctgatgttcttaaagcagggaataaaaatacctctgaagaatctagtttattgaccagtgaattgagatccaaacgggaacaatataaacaggcattcccatcacagttaaagaaacaagagtcatcgaagagcctgaagaaggttattgcagctttgtcaaatccaaaagcaacctctagttcaccagcacatccaaaacaaacattagaaaacaaccacccaaatccattcttgacaaatgcacttttaggtaatcaccaaccaaatggagttattcaaagtgtcattcaagaagctcctctagcacttactaccaaaactaaaatgcagagcaagattaatgaaaacattgctgctgcaagtagcacccctttttcctcacctgtaaatctgagtacaagtgggagaagaacccctggcaatcagacacctgtaatgccttctgcctctcccatcctgcatagtcaagggaaggaaaaagcagttagcaataatgtaaacccagtaaaaacacagcatcactcccatcctgcaaaatctttagtggaacaattcagaggaacagattcagacattcccagtagtaaagattctgaagattcaaatgaggatgaagaggaagatgatgaagaagaagatgaggaagatgatgaagatgatgaatctgatgacagccaatcagaatcagatagtaattcagaatcagatacagaaggatcagaagaagaagatgatgatgataaagaccaagatgaatcagatagtgatactgaaggagagaaaacttcaatgaaactgaataaaacaacttcctctgtcaaaagcccttccatgagtctcacaggtcactcaacacctcgtaacctccacatagcaaaagccccaggctctgctcctgctgccttatgttctgaatcccagtcacctgcttttcttggtacatcttcttccacacttacttcaagcccacactctggcacttccaaaagaagaagagtaacagatgaacgtgaactgcgtattccattggaatatggctggcagagagagacaagaataagaaactttggagggcgccttcaaggagaagtagcatattatgctccatgtggaaagaaacttaggcagtaccctgaagtaataaagtatctcagcagaaatggaataatggatatctcaagggacaatttcagcttcagtgcaaaaataagagtgggtgacttctatgaagccagagatggaccgcaggaaatgcagtggtgtcttttgaaagaagaggatgtcattcctcgtatcagggcaatggaaggtcgtagaggaagaccaccaaatccagatagacaacgagcaagagaggaatccaggatgagacgtcggaaaggtcgacctccaaatgttggcaatgctgaattcctagataacgcagatgcaaagttgctaagaaaactgcaagctcaagaaatagccaggcaagcagcacaaataaagcttttgagaaaacttcaaaagcaggaacaggctcgggttgctaaagaagccaaaaaacaacaagcaataatggctgctgaggagaagcggaagcaaaaagaacagataaagattatgaaacagcaggaaaaaattaagagaatacagcaaatcagaatggaaaaagaacttcgagctcagcaaattctagaggctaaaaagaaaaagaaggaagaagcggcaaatgccaaattattggaggccgagaaacgaataaaggaaaaagaaatgagaagacaacaagctgttcttctgaaacatcaggaacgagagcgaaggcgacaacacatgatgcttatgaaagctatggaagctcgtaaaaaagcagaagaaaaagagcggttgaaacaagaaaaacgtgatgagaaaagattaaataaagagcgtaaactagagcagcgaagattagaattagaaatggcaaaggaactaaagaagcctaatgaagacatgtgcttagcagaccaaaagcctttgccagagttgcctcgtattccaggacttgttctctctggaagtacattttcagactgtctcatggtggtgcagttcttacgaaactttggtaaagttttgggctttgatgtgaatattgatgttccaaacctgagtgttcttcaagagggattgctaaatataggggacagcatgggtgaagtacaagacttgcttgtgaggctcctctcagctgctgtatgtgatccaggtctaataacaggatacaaggctaaaacagctcttggagaacatttgctgaatgttggtgtgaatcgagacaatgtttccgagattttacagatatttatggaagcccactgtggacaaactgagcttactgaaagtctgaagaccaaagcttttcaggctcacactccagcacagaaagcttcagtcctggctttcctgatcaatgaactggcatgcagcaagagtgtggtcagtgaaatcgacaagaacattgattatatgtcaaacttgaggagagataaatgggtggtagaaggtaaactccgcaagctcagaatcattcatgctaagaaaacaggcaaaagagacacttcaggtggcattgatctgggagaagagcagcatcccttgggcacacccactccaggacgcaagcgaagaaggaagggaggagacagtgattatgacgatgatgatgacgatgacagtgatgaccaaggggatgaagatgatgaggatgaagaagataaggaagaccaaaaaggaaaaaagactgatatctgtgaagatgaggatgaaggtgaccaagcagcaagtgttgaagagctggaaaaacagattgaaaaactgagtaaacaacagagtcagtacagaaggaagctctttgatgcgtctcactcattgcgttcagtgatgtttggcccagatcgttacagacgccggtactggattcttccccgatgtggggggatttttgtagaaggcatggagagtggtgaaggactagaagaaattgcaaaagaaagagaaaaactgaaaaaggcagaaagtgtccagatcaaagaagaaatgtttgagacttctggggacagtttaaattgttcaaatacagatcactgtgaacaaaaggaagatcttaaagaaaaagataacacaaatctattccttcagaaacctggctctttttccaaattaagcaagcttttggaagtagctaagatgcctcctgagtcagaggttatgacccccaaaccaaatgctggtgcaaatgggtgcacgttgtcttatcagaacagtggaaaacattcactgggcagcgttcagtcaacagcaacgcaaagcaatgtggaaaaggcagactctaataatctgtttaatactggttcaagtggtccagggaagttctacagtcctctccccaatgaccagttactaaaaacgctgactgaaaagaatagacaatggtttagtcttttgccacgaacaccctgtgatgacacttcacttactcatgccgatatgtcaactgcttctttggtgactcctcagtctcagccaccatctaagtcaccttcacctaccccagctcctcttggatcttctgctcagaatcctgttggcttaaatccatttgctttatcacctcttcaggtgaaaggtggagtatctatgatgggacttcagttttgtggatggcccactggtgtggttacttctaatattccatttacattatctgtacctagtctaggatcggggttagggttatcagaaggaaatggtaattcattcttgacttccaatgttgcttcaagtaaaagtgaatctccagtaccacagaatgaaaaggccacttcagctcaacctgcagctgttgaagtagcaaaaccagtagattttcctagtccaaaacctattccagaagaaatgcagtttggttggtggagaattattgacccagaggacctaaaagctttgctcaaagtgctgcatctcagaggaataagagaaaaggcattacaaaaacaaattcagaaacatttggattatattactcaagcctgcctcaagaataaggatgttgctattattgaactgaatgaaaatgaagaaaaccaagtaactcgagatattgtggagaactggtcagtagaagaacaagcaatggaaatggatttgagtgtccttcaacaggtagaagatctagaaaggagagttgcatccgcaagtttgcaagtgaagggttggatgtgtccagagcctgcatcagaaagggaggacttggtatattttgaacataaatcatttactaaattgtgcaaggagcatgatggagaatttactggcgaagacgaaagcagtgcacatgcactagaacggaagagtgacaaccccctagatatagctgttaccaggctggctgatttggagcggaacattgaaagaagaattgaggaagatattgctccagggctcagggtgtggagaagggcattatcagaagctcgcagtgctgcacaggtagctctgtgcattcagcaattacagaaatcaatagcatgggaaaaatcaattatgaaagtttactgccaaatctgtcgaaagggagataatgaagaactgcttcttctttgtgatggctgtgacaaaggctgtcatacctactgccatagacccaagattacaacaatcccagatggagactggttttgtccagcttgcattgctaaggcaagtggtcaaactctaaaaatcaaaaaacttcatgtcaaaggaaaaaagactaatgagtctaagaaaggcaagaaggtaactttaacaggagatactgaagatgaagactctgcatctacaagtagttcactaaaaagaggaaacaaagacctccagaaaagaaaaatggaggaaaacacttctattaacttgtcaaaacaagaaagttttacttcagttaagaaacctaaaagagatgactccaaggacctagctctttgcagtatgattctgactgaaatggaaactcatgaggatgcatggccttttctacttcctgtaaacttgaaacttgttcctggttataagaaagttattaagaagcctatggatttttccacaattagagagaaactaagtagtggacagtatccaaaccttgaaacctttgctctagatgtcaggcttgtttttgacaactgtgaaacatttaatgaagatgattctgatataggcagagctggccacaatatgaggaagtattttgaaaaaaagtggacagatactttcaaagtgagctgaagttataataatctctttatttttttccttctaaacaaggacaaatgagaccagcaatgtgaactgtatttacataaacgtgcaaggcacatacataatgactttctttttccttaagtataaaaaaaaagtatcagaagaatgataccatttttaaaggcttcattcctacaacaaccaaggccctcggttattggtttgtgtgatttatcagctaatttaggtagaacagggaagcacacccaaagaattttcaaaggaaagggtgttatagtgcaatagcaattaaaatatatcaaatcgcactgaatactcaacaccagagctctaatgtgggaaatggttctcctttccctctcaataaatatctatttttcatttttttactttgtagtttattttttagtgaatgtatttaattttatgaattatttatgattaaaccacatccagaatcttcgttttctgtgaaaaggaagaactagaaaattgctttaaatcttgaaaatacaaggaatgttttaaaatataaaacaaagccaagttaaactgtttacactgatgtgctataaaagcaccaaaaagaaactttactgtagagttacaagtacatttatatatatatgttgctgcatcacttgtgtagttaaattgtatttcaaaacagtgaaaaaattgacatgtatatactgttcattcttgtttatattaagtcttgttttaaatatgtattatgtgtatatattgtttgcagacattattgttcatgccttagaggattgtagcattttattttcgtctgaaggtaatgatagctatacagtctgtacagtaattatcctctaccaacactgtggcgtctccttaatcttggtagtgcctgcctttgaaacagggtgtaggggatattagttttccatttttctattttgttatataattttaagccaccagggcctaaattaaagtataatcatttgtatccatgtggaataaaattgtgacaatttcctacgcacacagtattttttcatagaaacatttccctcccatttgccttgcctcagaaataaatttaaaagacgtttgtaaccactgtgttttatctactgtgtgttgtggtggcctgttggaggcaaatagatcagattttttttgtacctacgtaagagtacttgaagttttatttaaaataaaatgttgtggaaaaggtagcattctttttttaggagtgttatttttcactatgtgtggcacggatacaataaaagacttttacaaactaaaaaaaaaaaaaaaa

SEQ ID NO: 396 - protein, 1972 aa, Homo sapien
MGQTKSTSSGGGNRKCNQEQSKNQPLDARVDKIKDKKPRKKAMESSSNSDSDSGTSSDTSSEGISSSDSDDLEEDEEEEDQSIEESEDDDSDSESEAQHKSNNQVLLHGISDPKADGQKATEKAQEKRIHQPLPLAFESQTHSFQSQQKQPQVLSQQLPFIFQSSQAKEESVNKHTSVIQSTGLVSNVKPLSLVNQAKKETYMKLIVPSPDVLKAGNKNTSEESSLLTSELRSKREQYKQAFPSQLKKQESSKSLKKVIAALSNPKATSSSPAHPKQTLENNHPNPFLTNALLGNHQPNGVIQSVIQEAPLALTTKTKMQSKINENIAAASSTPFSSPVNLSTSGRRTPGNQTPVMPSASPILHSQGKEKAVSNNVNPVKTQHHSHPAKSLVEQFRGTDSDIPSSKDSEDSNEDEEEDDEEEDEEDDEDDESDDSQSESDSNSESDTEGSEEEDDDDKDQDESDSDTEGEKTSMKLNKTTSSVKSPSMSLTGHSTPRNLHIAKAPGSAPAALCSESQSPAFLGTSSSTLTSSPHSGTSKRRRVTDERELRIPLEYGWQRETRIRNFGGRLQGEVAYYAPCGKKLRQYPEVIKYLSRNGIMDISRDNFSFSAKIRVGDFYEARDGPQEMQWCLLKEEDVIPRIRAMEGRRGRPPNPDRQRAREESRMRRRKGRPPNVGNAEFLDNADAKLLRKLQAQEIARQAAQIKLLRKLQKQEQARVAKEAKKQQAIMAAEEKRKQKEQIKIMKQQEKIKRIQQIRMEKELRAQQILEAKKKKKEEAANAKLLEAEKRIKEKEMRRQQAVLLKHQERERRRQHMMLMKAMEARKKAEEKERLKQEKRDEKRLNKERKLEQRRLELEMAKELKKPNEDMCLADQKPLPELPRIPGLVLSGSTFSDCLMVVQFLRNFGKVLGFDVNIDVPNLSVLQEGLLNIGDSMGEVQDLLVRLLSAAVCDPGLITGYKAKTALGEHLLNVGVNRDNVSEILQIFMEAHCGQTELTESLKTKAFQAHTPAQKASVLAFLINELACSKSVVSEIDKNIDYMSNLRRDKWVVEGKLRKLRIIHAKKTGKRDTSGGIDLGEEQHPLGTPTPGRKRRRKGGDSDYDDDDDDDSDDQGDEDDEDEEDKEDQKGKKTDICEDEDEGDQAASVEELEKQIEKLSKQQSQYRRKLFDASHSLRSVMFGPDRYRRRYWILPRCGGIFVEGMESGEGLEEIAKEREKLKKAESVQIKEEMFETSGDSLNCSNTDHCEQKEDLKEKDNTNLFLQKPGSFSKLSKLLEVAKMPPESEVMTPKPNAGANGCTLSYQNSGKHSLGSVQSTATQSNVEKADSNNLFNTGSSGPGKFYSPLPNDQLLKTLTEKNRQWFSLLPRTPCDDTSLTHADMSTASLVTPQSQPPSKSPSPTPAPLGSSAQNPVGLNPFALSPLQVKGGVSMMGLQFCGWPTGVVTSNIPFTLSVPSLGSGLGLSEGNGNSFLTSNVASSKSESPVPQNEKATSAQPAAVEVAKPVDFPSPKPIPEEMQFGWWRIIDPEDLKALLKVLHLRGIREKALQKQIQKHLDYITQACLKNKDVAIIELNENEENQVTRDIVENWSVEEQAMEMDLSVLQQVEDLERRVASASLQVKGWMCPEPASEREDLVYFEHKSFTKLCKEHDGEFTGEDESSAHALERKSDNPLDIAVTRLADLERNIERRIEEDIAPGLRVWRRALSEARSAAQVALCIQQLQKSIAWEKSIMKVYCQICRKGDNEELLLLCDGCDKGCHTYCHRPKITTIPDGDWFCPACIAKASGQTLKIKKLHVKGKKTNESKKGKKVTLTGDTEDEDSASTSSSLKRGNKDLQKRKMEENTSINLSKQESFTSVKKPKRDDSKDLALCSMILTEMETHEDAWPFLLPVNLKLVPGYKKVIKKPMDFSTIREKLSSGQYPNLETFALDVRLVFDNCETFNEDDSDIGRAGHNMRKYFEKKWTDTFKVS

SEQ ID NO: 397 - DNA, 2905 bp, Homo sapien
ggccgaatacatcaagcaatggtaacatctttaaatgaagataatgaaagtgtaactgttgaatggatagaaaatggagatacaaaaggcaaagagattgacctggagagcatcttttcacttaaccctgaccttgttcctgatgaagaaattgaacccagtccagaaacacctccacctccagcatcctcagccaaagtaaacaaaattgtaaagaatcgacggactgtagcttctattaagaatgaccctccttcaagagataatagagtggttggttcagcacgtgcacggcccagtcaatttcctgaacagtcttcctctgcacaacagaatggtagtgtttcagatatatctccagttcaagctgcaaaaaaggaatttggacccccttcacgtagaaaatctaattgtgtgaaagaagtagaaaaactgcaagaaaaacgagagaaaaggagattgcaacagcaagaacttagagaaaaaagagcccaggacgttgatgctacaaacccaaattatgaaattatgtgtatgatcagagactttagaggaagtttggattatagaccattaacaacagcagatcctattgatgaacataggatatgtgtgtgtgtaagaaaacgaccactcaataaaaaagaaactcaaatgaaagatcttgatgtaatcacaattcctagtaaagatgttgtgatggtacatgaaccaaaacaaaaagtagatttaacaaggtacctagaaaaccaaacatttcgttttgattatgcctttgatgactcagctcctaatgaaatggtttacaggtttactgctaaaccactagtggaaactatatttgaaaggggaatggctacatgctttgcttatgggcagactggaagtggaaaaactcatactatgggtggtgacttttcaggaaagaaccaagattgttctaaaggaatttatgcattagcagctcgagatgtctttttaatgctaaagaagccaaactataagaagctagaacttcaagtatatgcaaccttctttgaaatttatagtggaaaggtgtttgacttgctaaacaggaaaacaaaattaagagttctagaagatggaaaacagcaggttcaagtggtgggattacaggaacgggaggtcaaatgtgttgaagatgtactgaaactcattgacataggcaacagttgcagaacatccggtcaaacatctgcaaatgcacattcatctcggagccatgcagtgtttcagattattcttagaaggaaaggaaaactacatggcaaattttctctcattgatttggctggaaatgaaagaggagctgatacttccagtgcggacaggcaaactaggcttgaaggtgctgaaattaataaaagccttttagcactcaaggagtgcatcagagccttaggtagaaataaacctcatactcctttccgtgcaagtaaactcactcaggtgttaagagattctttcataggtgaaaactctcgtacctgcatgattgccacaatctctccaggaatggcatcctgtgaaaatactcttaatacattaagatatgcaaatagggtcaaagaattgactgtagatccaactgctgctggtgatgttcgtccaataatgcaccatccaccaaaccagattgatgacttagagacacagtggggtgtggggagttcccctcagagagatgatctaaaacttctttgtgaacaaaatgaagaagaagtctctccacagttgtttactttccacgaagctgtttcacaaatggtagaaatggaagaacaagttgtagaagatcacagggcagtgttccaggaatctattcggtggttagaagatgaaaaggccctcttagagatgactgaagaagtagattatgatgtcgattcatatgctacacaacttgaagctattcttgagcaaaaaatagacattttaactgaactgcgggataaagtgaaatctttccgtgcagctctacaagaggaggaacaagccagcaagcaaatcaacccgaagagaccccgtgccctttaaaccggcatttgctgctaaaggatacccagaaccctcactactgtaacatacaacggttcagctgtaagggccatttgaaagtttggaattttaagtgtctgtggaaaatgttttgtccttcacctgaattacatttcaattttgtgaaacactcttttgtctacaaaatgcttctagtccaggaggcacaaccaagaactgggattaatgaagcattttgtttcatttacacaaatagtgatttacttttggagatccttgtcagttttattttctatttgatgaagtaagactgtggactcaatccagagccagatagtaggggaagccacagcatttccttttaactcagttcaatttttgtagtgagactgagcagttttaaatcctttgcgtgcatgcatacctcatcagtgattgtacataccttgcccactcctagagacagctgtgctcacttttcctgctttgtgccttgattaaggctactgaccctaaatttctgaagcacagccaagaaaaattacattccttgtcattgtaaattacctttgtgtgtacatttttactgtatttgagacattttttgtgtgtgactagttaattttgcaggatgtgccatatcattgaacggaactaaagtctgtgacagtggatatagctgctggaccattccatcttatatgtaaagaaatctggaattattattttaaaaccatataacatgtgattataatttttcttagcattttctttgtaaagaactacaatataaactagttggtgtataataaaaagtaatgaaattctgaagaaaaaaaaaaaaaaaaaaaaaaaaaaaaaaaaa

SEQ ID NO: 398 - protein, 679 aa, Homo sapien
MVTSLNEDNESVTVEWIENGDTKGKEIDLESIFSLNPDLVPDEEIEPSPETPPPPASSAKVNKIVKNRRTVASIKNDPPSRDNRVVGSARARPSQFPEQSSSAQQNGSVSDISPVQAAKKEFGPPSRRKSNCVKEVEKLQEKREKRRLQQQELREKRAQDVDATNPNYEIMCMIRDFRGSLDYRPLTTADPIDEHRICVCVRKRPLNKKETQMKDLDVITIPSKDVVMVHEPKQKVDLTRYLENQTFRFDYAFDDSAPNEMVYRFTAKPLVETIFERGMATCFAYGQTGSGKTHTMGGDFSGKNQDCSKGIYALAARDVFLMLKKPNYKKLELQVYATFFEIYSGKVFDLLNRKTKLRVLEDGKQQVQVVGLQEREVKCVEDVLKLIDIGNSCRTSGQTSANAHSSRSHAVFQIILRRKGKLHGKFSLIDLAGNERGADTSSADRQTRLEGAEINKSLLALKECIRALGRNKPHTPFRASKLTQVLRDSFIGENSRTCMIATISPGMASCENTLNTLRYANRVKELTVDPTAAGDVRPIMHHPPNQIDDLETQWGVGSSPQRDDLKLLCEQNEEEVSPQLFTFHEAVSQMVEMEEQVVEDHRAVFQESIRWLEDEKALLEMTEEVDYDVDSYATQLEAILEQKIDILTELRDKVKSFRAALQEEEQASKQINPKRPRAL

SEQ ID NO: 399 - DNA, 2325 bp, Homo sapien
gcggcagcggctcttatagtgcaaccatggcagactattcaacagtgcctcccccctcttctggctcagctggtggcggtggtggcggcggtggtggtggaggagttaacgacgctttcaaagatgcactgcagagagcccggcagattgcagcaaaaattggaggtgatgcagggacatcactgaattcaaatgactatggttatgggggacaaaaaagacctttagaagatggagatcaaccagatgctaagaaagttgctcctcaaaatgactcttttggaacacagttaccaccgatgcatcagcagcaaagcagatctgtaatgacagaagaatacaaagttccagatggaatggttggattcataattggcagaggaggtgaacagatctcacgcatacaacaggaatctggatgcaaaatacagatagctcctgacagtggtggccttccagaaaggtcctgtatgttaactggaacacctgaatctgtccagtcagcaaaacggttactggaccagattgttgaaaaaggaagaccagctcctggcttccatcatggcgatggaccgggaaatgcagttcaagaaatcatgattccagctagcaaggcaggattagtcattggaaaagggggagaaactattaaacagcttcaggaacgggctggagttaaaatggttatgattcaagacgggccgcagaacactggtgctgacaaacctcttaggattacaggagacccatataaagttcaacaagccaaggaaatggtgttagagttaattcgtgatcaaggcggtttcagagaagttcggaatgagtatgggtcaagaataggaggaaatgaagggatagatgtccccattccaagatttgctgttggcattgtaataggaagaaatggagagatgatcaaaaaaatacaaaatgatgctggtgttcgcattcagtttaagccagatgatgggacaacacccgaaaggatagcacaaataacaggacctccagaccgatgtcaacatgctgcagaaattattacagaccttcttcgaagtgttcaggctggtaatcctggtggacctggacctggtggtcgaggaagaggtagaggtcaaggcaactggaacatgggaccacctggtggactacaggaatttaattttattgtgccaactgggaaaactggattaataataggaaaaggaggtgaaaccataaaaagcataagccagcagtctggtgcaagaatagaacttcagagaaatcctccaccaaatgcagatcctaatatgaagttatttacaattcgtggcactccacaacagatagactatgctcggcaactcatagaagaaaagattggtggcccagtaaatcctttagggccacctgtaccccatgggccccatggtgtcccaggcccccatggacctcctgggcctccagggcctggaactccaatgggaccatacaaccctgcaccttataatcctggaccaccaggcccggctcctcatggtcctccagccccatatgctccccagggatggggaaatgcatatccacactggcagcagcaggctcctcctgatccagctaaggcaggaacggatccaaattcagcagcttgggctgcttattacgctcactattatcaacagcaagcacagccaccaccagcagcccctgcaggtgcaccaactacaactcaaactaatggacaaggagatcagcagaatccagccccagctggacaggttgattataccaaggcttgggaagagtactacaagaaaatgggtcaggcagttcctgctccgactggggctcctccaggtggtcagccagattatagtgcagcctgggctgagtattatagacaacaagcagcctattatgcccagacaagtccccagggaatgccacagcatcctccagcacctcagggccaataataagaagtggacaatacagtatttgcttcattgtgtgggggaaaaaaacctttgttaaatatatggatgcagacgacttgatgaagatcttaattttgtttttggtttaaaatagtgtttccttttttttttttttttttttgaaaatgtacaaaatatctatcactactgataggaggttaatatttctgtgtagaaatgaaaattggtttgtttttagtatttagtgtagatgtacacattccagcaaatgtatttgcaattatgtggttgatgctttgtgatataaatgtactttttcaatgtatactttcactttccaaatgcctgttttgtgctttacaataaatgatatgaaacctca

SEQ ID NO: 400 - protein, 644 aa, Homo sapien
MADYSTVPPPSSGSAGGGGGGGGGGGVNDAFKDALQRARQIAAKIGGDAGTSLNSNDYGYGGQKRPLEDGDQPDAKKVAPQNDSFGTQLPPMHQQQSRSVMTEEYKVPDGMVGFIIGRGGEQISRIQQESGCKIQIAPDSGGLPERSCMLTGTPESVQSAKRLLDQIVEKGRPAPGFHHGDGPGNAVQEIMIPASKAGLVIGKGGETIKQLQERAGVKMVMIQDGPQNTGADKPLRITGDPYKVQQAKEMVLELIRDQGGFREVRNEYGSRIGGNEGIDVPIPRFAVGIVIGRNGEMIKKIQNDAGVRIQFKPDDGTTPERIAQITGPPDRCQHAAEIITDLLRSVQAGNPGGPGPGGRGRGRGQGNWNMGPPGGLQEFNFIVPTGKTGLIIGKGGETIKSISQQSGARIELQRNPPPNADPNMKLFTIRGTPQQIDYARQLIEEKIGGPVNPLGPPVPHGPHGVPGPHGPPGPPGPGTPMGPYNPAPYNPGPPGPAPHGPPAPYAPQGWGNAYPHWQQQAPPDPAKAGTDPNSAAWAAYYAHYYQQQAQPPPAAPAGAPTTTQTNGQGDQQNPAPAGQVDYTKAWEEYYKKMGQAVPAPTGAPPGGQPDYSAAWAEYYRQQAAYYAQTSPQGMPQHPPAPQGQ

SEQ ID NO: 401 - DNA, 751 bp, Homo sapien
aggatgatcaagctgttctcgctgaagcagcagaagaaggaggaggagtcggcgggcggcaccaagggcagcagcaagaaggcgtcggcggcgcagctgcggatccagaaggacataaacgagctgaacctgcccaagacgtgtgatatcagcttctcagatccagacgacctcctcaacttcaagctggtcatctgtcctgatgagggcttctacaagagtgggaagtttgtgttcagttttaaggtgggccagggttacccgcatgatccccccaaggtgaagtgtgagacaatggtctatcaccccaacattgacctcgagggcaacgtctgcctcaacatcctcagagaggactggaagccagtccttacgataaactccataatttatggcctgcagtatctcttcttggagcccaaccccgaggacccactgaacaaggaggccgcagaggtcctgcagaacaaccggcggctgtttgagcagaacgtgcagcgctccatgcggggtggctacatcggctccacctactttgagcgctgcctgaaatagggttggcgcatacccacccgccgccacggccacaagccctggcatcccctgcaaatatttattgggggccatgggtaggggtttggggggcggccggtgggggaatcccctgccttggccttgcctccccttcctgccacgtgcccctagttattttttttttaacaccaggctaactaaaggggaatgttactgc

SEQ ID NO: 402 - protein, 183 aa, Homo sapien
MIKLFSLKQQKKEEESAGGTKGSSKKASAAQLRIQKDINELNLPKTCDISFSDPDDLLNFKLVICPDEGFYKSGKFVFSFKVGQGYPHDPPKVKCETMVYHPNIDLEGNVCLNILREDWKPVLTINSIIYGLQYLFLEPNPEDPLNKEAAEVLQNNRRLFEQNVQRSMRGGYIGSTYFERCLK

SEQ ID NO: 403 - DNA, 661 bp, Homo sapien
ccggcggtgacaacggcaacatggccctgaacggagctgaagtcgacgacttctcctgggagcccccgactgaggcggagacgaaggtgctgcaggcgcgacgggagcggcaagatcgcatctcccggctcatgggcgactatctgctgcgcggttaccgcatgctgggcgagacgtgtgcggactgcgggacgatcctcctccaagacaaacagcggaaaatctactgcgtggcttgtcaggaactcgactcagacgtggataaagataatcccgctctgaatgcccaggctgccctctcccaagctcgggagcaccagctggcctcagcctcagagctccccctgggctctcgacctgcgccccagcccccagtacctcgtccggagcactgtgagggagctgcagcaggactcaaggcagcccaggggccacctgctcctgctgtgcctccaaatacagatgtcatggcctgcacacagacagccctcttgcagaagctgacctgggcctctgctgaactgggctccagcacctccctggagactagcatccagctgtgtggccttatccgcgcatgtgcggaggccctgcgcagcctgcagcagctacagcactaagagaagcccctgagaaaaaccctctagaaaaacaaaaaaaa

SEQ ID NO: 404 - protein, 199 aa, Homo sapien
MALNGAEVDDFSWEPPTEAETKVLQARRERQDRISRLMGDYLLRGYRMLGETCADCGTILLQDKQRKIYCVACQELDSDVDKDNPALNAQAALSQAREHQLASASELPLGSRPAPQPPVPRPEHCEGAAAGLKAAQGPPAPAVPPNTDVMACTQTALLQKLTWASAELGSSTSLETSIQLCGLIRACAEALRSLQQLQH

SEQ ID NO: 405 - DNA, 507 bp, Homo sapien
ggtgcttctgagatgtgggcttgcacacgctgttgctatagtacgtgtgatcctgactgctgtcatggcgtgccctctggagaaggccctggatgtgatggtgtccaccttccacaagtactcgggcaaagagggtgacaagttcaagctcaacaagtcagaactaaaggagctgctgacccgggagctgcccagcttcttggggaaaaggacagatgaagctgctttccagaagctgatgagcaacttggacagcaacagggacaacgaggtggacttccaagagtactgtgtcttcctgtcctgcatcgccatgatgtgtaacgaattctttgaaggcttcccagataagcagcccaggaagaaatgaaaactcctctgatgtggttggggggtctgccagctggggccctccctgtcgccagtgggcacttttttttttccaccctggctccttcagacacgtgcttgatgctgagcaagttcaataaagattcttggaagttt

SEQ ID NO: 406 - protein, 101 aa, Homo sapien
MACPLEKALDVMVSTFHKYSGKEGDKFKLNKSELKELLTRELPSFLGKRTDEAAFQKLMSNLDSNRDNEVDFQEYCVFLSCIAMMCNEFFEGFPDKQPRKK

SEQ ID NO: 407 - DNA, 500 bp, Homo sapien
gctctcagaggcagcgtgcgggtgtgctctttgtgaaattccaccatggcgtaccgtggccagggtcagaaagtgcagaaggttatggtgcagcccatcaacctcatcttcagatacttacaaaatagatcgcggattcaggtgtggctctatgagcaagtgaatatgcggatagaaggctgtatcattggttttgatgagtatatgaaccttgtattagatgatgcagaagagattcattctaaaacaaagtcaagaaaacaactgggtcggatcatgctaaaaggagataatattactctgctacaaagtgtctccaactagaaatgatcaatgaagtgagaaattgttgagaaggatacagtttgtttttagatgtcctttgtccaatgtgaacatttattcatattgttttgattaccctcgtgttactacaagatggcaataaatactatgggattgtttgtattaaaaaatttacattgcttcttaaaaaaaaa

SEQ ID NO: 408 - protein, 92 aa, Homo sapien
MAYRGQGQKVQKVMVQPINLIFRYLQNRSRIQVWLYEQVNMRIEGCIIGFDEYMNLVLDDAEEIHSKTKSRKQLGRIMLKGDNITLLQSVSN

SEQ ID NO: 409 - DNA, 2070 bp, Homo sapien
  Unsure 1683: Unknown base
gaattcggggcgccagctacgccgctgccgctgtcactatggcccattacaaagccgccgactcgaagcgtgagcagttccggaggtacttggagaagtcgggggtgctggacacgctgaccaaggtgttggtagccttatatgaagaaccagagaaacctaacagtgctttggattttttaaagcatcacttaggagctgctactccagaaaatccagaaatagagctcgttcgcctagaactggccgaaatgaaagagaagtatgaagctattgtagaagaaaataaaaaactgaaagcaaagcttgctcagtatgaaccacctcaggaggagaagcgtgctgaataggattcttctcagtttgaaagacaatgaaaaatggttttgtatgacttgaatagtttgtatagtatataatcttttctgaacagatgctatagaactcttttaatatgtttaattcacctatcacactctgttaaaaacacatagaatcatcaataaaaactcaatataactttctttgggtcttaaagcaggagaatccaaagtaaatcctgaacaaaacctaaacacagccatctaactcattaccttaaaagacattctgtttattagtctgattaggaatgatggcactggttgtattttagccaagacagtttagcatggagctattccttggtgcagttcaggatatgaacacaggtacagtcattctttgaacggtgacactgttctgtatattccctataggcagctggagagatctgtgtgacacaagatgcttttgtacgggttcccatgaatcttctgctcttgtttgtgtgacatgaaacaaataacttctttgccaccactttgccttagataactgtgtgtgtgtgtgccagtttgaactctgacaccacattttccttctatgcaatcatgcctgtctgataatcttgcattgctttcctctgagctttagtgggtcctagtgcacaatggcctttctgtgctgtttttcaatttgcctaataatagcagttaccctgattgtaatttatgtaactttaaacaggatcacactgtaccccctgcctgccttatttgcttactgagcacaggacagaggcaatatacaactctgggttcacacacaagctgagatgagaagaggaatgagccatatattggggaaaatcatagtttgtaggtataattatatagtgcttttctccctcaaagtatttttctagccttgaattcattttatcttcattatccctgtgaagtaggtgggacaagtataaggggaagaggggtgctgaatttttaggccaaagactgatattaatacaaatcactcactaactgtagagccttgggcattatcagtgaactactctgagatttactgtcttcatctgtttaatgagtagaatgtccgtgatgcctacctcacagggttgttgtgagggtcaaatgagaatgtatgtgaaagatttgtaaatggtaaagcactatattcttgtttgttagtcctttttcctttctttgggtagacctacagtcagatgttttgttttatggatcacttattttccttactggtagactgtcgttttatagacatattcctatttcatatattctctccctgttgttagagaacctatctttgtttttggtcaanacacacatagaaaacaaaatgatccaatgaaaactggtttaactagcaaaagccttggcacctgttggagactatgaccaagccaataaaaagggcatttaaatcagccctgttagtaggaatgtggctatggctggtgcctcttctagtcacaagtttgtttttggagggggtccagaagatcattcccttgcatagatttctcttttaccaatttgagtgcctcctacatgggcagcagtggactaagtgctgggtgtgataaagaggaatgacttaattatgagactgtatataatcaaatacagtgtgggttaggacctgtggcagaccattataataaagcatggccccgtgagggttttgaaagagaaaaaaaaaaaaaaa

SEQ ID NO: 410 - protein, 103 aa, Homo sapien
MAHYKAADSKREQFRRYLEKSGVLDTLTKVLVALYEEPEKPNSALDFLKHHLGAATPENPEIELVRLELAEMKEKYEAIVEENKKLKAKLAQYEPPQEEKRAE

SEQ ID NO: 411 - DNA, 714 bp, Homo sapien
gggtgagcaaaggggcgggtccctggctgctgtggcctcccctgaccccctccccccgctgctggggtcctcggccaagcccccttctcactggactgagacatgaggctgagctggttccgggtcctgacagtactgtccatctgcctgagcgccgtggccacggccacgggggccgagggcaaaaggaagctgcagatcggggtcaagaagcgggtggaccactgtcccatcaaatcgcgcaaaggggatgtcctgcacatgcactacacggggaagctggaagatgggacagagtttgacagcagcctgccccagaaccagccctttgtcttctcccttggcacaggccaggtcatcaagggctgggaccaggggctgctggggatgtgtgagggggaaaagcgcaagctggtgatcccatccgagctagggtatggagagcggggagctcccccaaagattccaggcggtgcaaccctggtgttcgaggtggagctgctcaaaatagagcgacgaactgagctgtaaccagactggggaggggcagggggagaggcccccatcagggaccagactgttccaaaaaaaaaacaaaaaacaaaaacaaacaaaaaaacacttaaaagcccaaggagtaagcctgtgtgtttgtgggccctgagagactcagagacctcagctccagcataccccaccaccttctcctttccc

SEQ ID NO: 412 - protein, 142 aa, Homo sapien
MRLSWFRVLTVLSICLSAVATATGAEGKRKLQIGVKKRVDHCPIKSRKGDVLHMHYTGKLEDGTEFDSSLPQNQPFVFSLGTGQVIKGWDQGLLGMCEGEKRKLVIPSELGYGERGAPPKIPGGATLVFEVELLKIERRTEL

SEQ ID NO: 413 - DNA, 2946 bp, Homo sapien
ggggggaaaggaaaataatacaatttcaggggaagtcgccttcaggtctgctgcttttttatttttttttttttaattaaaaaaaaaaaggacatagaaaacatcagtcttgaacttctcttcaagaacccgggctgcaaaggaaatctcctttgtttttgttatttatgtgctgtcaagttttgaagtggtgatctttagacagtgactgagtatggatcatttgaacgaggcaactcaggggaaagaacattcagaaatgtctaacaatgtgagtgatccgaagggtccaccagccaagattgcccgcctggagcagaacgggagcccgctaggaagaggaaggcttgggagtacaggtgcaaaaatgcagggagtgcctttaaaacactcgggccatctgatgaaaaccaaccttaggaaaggaaccatgctgccagttttctgtgtggtggaacattatgaaaacgccattgaatatgattgcaaggaggagcatgcagaatttgtgctggtgagaaaggatatgcttttcaaccagctgatcgaaatggcattgctgtctctaggttattcacatagctctgctgcccaggccaaagggctaatccaggttggaaagtggaatccagttccactgtcttacgtgacagatgcccctgatgctacagtagcagatatgcttcaagatgtgtatcatgtggtcacattgaaaattcagttacacagttgccccaaactagaagacttgcctcccgaacaatggtcgcacaccacagtgaggaatgctctgaaggacttactgaaagatatgaatcagagttcattggccaaggagtgccccctttcacagagtatgatttcttccattgtgaacagtacttactatgcaaatgtctcagcagcaaaatgtcaagaatttggaaggtggtacaaacatttcaagaagacaaaagatatgatggttgaaatggatagtctttctgagctatcccagcaaggcgccaatcatgtcaattttggccagcaaccagttccagggaacacagccgagcagcctccatcccctgcgcagctctcccatggcagccagccctctgtccggacacctcttccaaacctgcaccctgggctcgtatcaacacctatcagtcctcaattggtcaaccagcagctggtgatggctcagctgctgaaccagcagtatgcagtgaatagacttttagcccagcagtccttaaaccaacaatacttgaaccaccctccccctgtcagtagatctatgaataagcctttggagcaacaggtttcgaccaacacagaggtgtcttccgaaatctaccagtgggtacgcgatgaactgaaacgagcaggaatctcccaggcggtatttgcacgtgtggcttttaacagaactcagggcttgctttcagaaatcctccgaaaggaagaggaccccaagactgcatcccagtctttgctggtaaaccttcgggctatgcagaatttcttgcagttaccggaagctgaaagagaccgaatataccaggacgaaagggaaaggagcttgaatgctgcctcggccatgggtcctgcccccctcatcagcacaccacccagccgtcctccccaggtgaaaacagctactattgccactgaaaggaatgggaaaccagagaacaataccatgaacattaatgcttccatttatgatgagattcagcaggaaatgaagcgtgctaaagtgtctcaagcactgtttgcaaaggttgcagcaaccaaaagccagggatggttgtgcgagctgttacgctggaaagaagatccttctccagaaaacagaaccctgtgggagaacctctccatgatccgaaggttcctcagtcttcctcagccagaacgtgatgccatttatgaacaggagagcaacgcggtgcatcaccatggcgacaggccgccccacattatccatgttccagcagagcagattcagcaacagcagcagcaacagcaacagcagcagcagcagcagcaggcaccgccgcctccacagccacagcagcagccacagacaggccctcggctccccccacggcaacccacggtggcctctccagcagagtcagatgaggaaaaccgacagaagacccggccacgaacaaaaatttcagtggaagccttgggaatcctccagagtttcatacaagacgtgggcctgtaccctgacgaagaggccatccagactctgtctgcccagctcgaccttcccaagtacaccatcatcaagttctttcagaaccagcggtactatctcaagcaccacggcaaactgaaggacaattccggtttagaggtcgatgtggcagaatataaagaagaggagctgctgaaggatttggaagagagtgtccaagataaaaatactaacacccttttttcagtgaaactagaagaagagctgtcagtggaaggaaacacagacattaatactgatttgaaagactgagataaaagtatttgtttcgttcaacagtgccactggtatttactaacaaaatgaaaagtccaccttgtcttctctcagaaaacctttgttgttcattgtttggccaatgaatcttcaaaaacttgcacaaacagaaaagttggaaaaggataatacagactgcactaaatgttttcctctgttttacaaactgcttggcagccccaggtgaagcatcaaggattgtttggtattaaaatttgtgttcacgggatgcaccaaagtgtgtaccccgtaagcatgaaaccagtgttttttgttttttttttagttcttattccggagcctcaaacaagcattataccttctgtgattatgatttcctctcctataattatttctgtagcactccacactgatctttggaaacttgccccttatttaaaaaaaaaaaaaaaaaa

SEQ ID NO: 414 - protein, 763 aa, Homo sapien
MDHLNEATQGKEHSEMSNNVSDPKGPPAKIARLEQNGSPLGRGRLGSTGAKMQGVPLKHSGHLMKTNLRKGTMLPVFCVVEHYENAIEYDCKEEHAEFVLVRKDMLFNQLIEMALLSLGYSHSSAAQAKGLIQVGKWNPVPLSYVTDAPDATVADMLQDVYHVVTLKIQLHSCPKLEDLPPEQWSHTTVRNALKDLLKDMNQSSLAKECPLSQSMISSIVNSTYYANVSAAKCQEFGRWYKHFKKTKDMMVEMDSLSELSQQGANHVNFGQQPVPGNTAEQPPSPAQLSHGSQPSVRTPLPNLHPGLVSTPISPQLVNQQLVMAQLLNQQYAVNRLLAQQSLNQQYLNHPPPVSRSMNKPLEQQVSTNTEVSSEIYQWVRDELKRAGISQAVFARVAFNRTQGLLSEILRKEEDPKTASQSLLVNLRAMQNFLQLPEAERDRIYQDERERSLNAASAMGPAPLISTPPSRPPQVKTATIATERNGKPENNTMNINASIYDEIQQEMKRAKVSQALFAKVAATKSQGWLCELLRWKEDPSPENRTLWENLSMIRRFLSLPQPERDAIYEQESNAVHHHGDRPPHIIHVPAEQIQQQQQQQQQQQQQQQAPPPPQPQQQPQTGPRLPPRQPTVASPAESDEENRQKTRPRTKISVEALGILQSFIQDVGLYPDEEAIQTLSAQLDLPKYTIIKFFQNQRYYLKHHGKLKDNSGLEVDVAEYKEEELLKDLEESVQDKNTNTLFSVKLEEELSVEGNTDINTDLKD

SEQ ID NO: 415 - DNA, 2029 bp, Homo sapien
actcagtgttcgcgggagccgcacctacaccagccaacccagatcccgaggtccgacagcgcccggcccagatccccacgcctgccaggagcaagccgagagccagccggccggcgcactccgactccgagcagtctctgtccttcgacccgagccccgcgccctttccgggacccctgccccgcgggcagcgctgccaacctgccggccatggagaccccgtcccagcggcgcgccacccgcagcggggcgcaggccagctccactccgctgtcgcccacccgcatcacccggctgcaggagaaggaggacctgcaggagctcaatgatcgcttggcggtctacatcgaccgtgtgcgctcgctggaaacggagaacgcagggctgcgccttcgcatcaccgagtctgaagaggtggtcagccgcgaggtgtccggcatcaaggccgcctacgaggccgagctcggggatgcccgcaagacccttgactcagtagccaaggagcgcgcccgcctgcagctggagctgagcaaagtgcgtgaggagtttaaggagctgaaagcgcgcaataccaagaaggagggtgacctgatagctgctcaggctcggctgaaggacctggaggctctgctgaactccaaggaggccgcactgagcactgctctcagtgagaagcgcacgctggagggcgagctgcatgatctgcggggccaggtggccaagcttgaggcagccctaggtgaggccaagaagcaacttcaggatgagatgctgcggcgggtggatgctgagaacaggctgcagaccatgaaggaggaactggacttccagaagaacatctacagtgaggagctgcgtgagaccaagcgccgtcatgagacccgactggtggagattgacaatgggaagcagcgtgagtttgagagccggctggcggatgcgctgcaggaactgcgggcccagcatgaggaccaggtggagcagtataagaaggagctggagaagacttattctgccaagctggacaatgccaggcagtctgctgagaggaacagcaacctggtgggggctgcccacgaggagctgcagcagtcgcgcatccgcatcgacagcctctctgcccagctcagccagctccagaagcagctggcagccaaggaggcgaagcttcgagacctggaggactcactggcccgtgagcgggacaccagccggcggctgctggcggaaaaggagcgggagatggccgagatgcgggcaaggatgcagcagcagctggacgagtaccaggagcttctggacatcaagctggccctggacatggagatccacgcctaccgcaagctcttggagggcgaggaggagaggctacgcctgtcccccagccctacctcgcagcgcagccgtggccgtgcttcctctcactcatcccagacacagggtgggggcagcgtcaccaaaaagcgcaaactggagtccactgagagccgcagcagcttctcacagcacgcacgcactagcgggcgcgtggccgtggaggaggtggatgaggagggcaagtttgtccggctgcgcaacaagtccaatgaggaccagtccatgggcaattggcagatcaagcgccagaatggagatgatcccttgctgacttaccggttcccaccaaagttcaccctgaaggctgggcaggtggtgacgatctgggctgcaggagctggggccacccacagcccccctaccgacctggtgtggaaggcacagaacacctggggctgcgggaacagcctgcgtacggctctcatcaactccactggggaagaagtggccatgcgcaagctggtgcgctcagtgactgtggttgaggacgacgaggatgaggatggagatgacctgctccatcaccaccatgtgagtggtagccgccgctgaggccgagcctgcactggggccacccagccaggcctgggggcagcctctccccagcctccccgtgccaaaaatcttttcattaaagaatgtttggaacttt

SEQ ID NO: 416 - protein, 572 aa, Homo sapien
METPSQRRATRSGAQASSTPLSPTRITRLQEKEDLQELNDRLAVYIDRVRSLETENAGLRLRITESEEVVSREVSGIKAAYEAELGDARKTLDSVAKERARLQLELSKVREEFKELKARNTKKEGDLIAAQARLKDLEALLNSKEAALSTALSEKRTLEGELHDLRGQVAKLEAALGEAKKQLQDEMLRRVDAENRLQTMKEELDFQKNIYSEELRETKRRHETRLVEIDNGKQREFESRLADALQELRAQHEDQVEQYKKELEKTYSAKLDNARQSAERNSNLVGAAHEELQQSRIRIDSLSAQLSQLQKQLAAKEAKLRDLEDSLARERDTSRRLLAEKEREMAEMRARMQQQLDEYQELLDIKLALDMEIHAYRKLLEGEEERLRLSPSPTSQRSRGRASSHSSQTQGGGSVTKKRKLESTESRSSFSQHARTSGRVAVEEVDEEGKFVRLRNKSNEDQSMGNWQIKRQNGDDPLLTYRFPPKFTLKAGQVVTIWAAGAGATHSPPTDLVWKAQNTWGCGNSLRTALINSTGEEVAMRKLVRSVTVVEDDEDEDGDDLLHHHHVSGSRR

SEQ ID NO: 417 - DNA, 4695 bp, Homo sapien
gggggagggaaacggagcagtaacaagtatcccagagggtgctgctgaggcgacgatggccgaggggcccgaggaagcccgaggccaccctcccgggcaggacgatggcgggggggaccacgagcccgtcccttccctgagaggccctcctaccaccgccgtcccatgcccccgcgacgacccccaggccgaaccccaggccccgggccggcccacagccccgggcctcgcggctgccgccgcagccgacaaattggagccgccgcgcgagctcaggaagcgcggggaggcggcctccggctccggtgcagagctgcaggagcaggcgggctgcgaggcgcccgaagccgcggcgccacgagagagaccagctcggctgagcgcccgcgagtactcccggcaagtgcacgagtggctgtggcagtcctactgcggctacctcacctggcacagcggcctggccgccttcccagcctactgcagcccccagccctccccgcaaagcttcccttcgggcggcgctgcagtcccccaggccgcggcgccgccgcccccgcagctgggctattacaaccccttctacttcctgagccccggggccgcggggcctgacccgcggacagctgccggcatcagcacccctgctccagtcgcgggcctgggaccccgggctcctcacgtgcaggcgtcggtccgggccactccagtgacgagggtaggatccgcagccccttcgcgaagcccgagcgagaccgggcgacaggcaggcagagaatatgttattccatccttggcccacagatttatggcagagatggtggatttctttattctcttctttataaaagcaaccattgtcttaagcattatgcacctcagtgggataaaggatatctctaagtttgctatgcattatataatagaagaaatagatgaagacacatcaatggaagacttgcagaaaatgatggttgtggcacttatatacagattattagtttgtttctatgagataatttgcatttggggagcaggtggagctaccccagggaagttcctgctggggcttcgagttgtgacatgtgatacatcagtgcttattgcaccaagtcgggttttagtgattccttcctcaaatgttagcattacaacgtccactatccgagctttgatcaagaatttttcaattgcttcttttttccctgctttcatcacactgctgttttttcagcataatcgaacagcttatgacattgtagcaggaaccattgtggtaaaaagaaatggggtcagatgatgccccccaaaaccctgatttccacacactaagactaaattatgtatcaaggccatcagtatccctgggttacactaattgatgatttagaaattaaagcagtcactccagtgtgatgcaggtgactactctgaaagtattgattatacttgaatgccaaagaacttgtccagaagaaaaacctgttaaattcaagtattaaaatttttagatcaaaaaggcaaatgattttataaacaatggacaatatatactttcttaagatctaaggtactttcttaagatctaagaatttgctgaaagcattttcagctttgaaatctccaaatgaaactttaaaatttattttggtttatcccaaaataatggaaaatgtccagttgtgttttgtaaacacctatgtaactcatcttttagtttacacttcctggggaaattgtctttggtgtttagaggagggaatgagaacacaaattggataatccactgtctcccatcccaggaggtggtgagttggctacaagagaaagggacaagtgaggcaggcctagcagttcccttacctgaagttttcaaatccatactgcagttccctctcgtaatgatgtaactttacaactattcttaatgcttgaacatgtatttaggggcaagtttctcatgatgatgaaaaagtatcaagtcatattgctatgttaattggtttttttttttaaaaggtaagttagtgattactgttaatggtgggggagtaagttttcactgtaaattgaacttataatttatgtgcaagtgttttcagtgccctgaatcaaactataaatgtggggagaaatcacctccatcaaacagttgcatatttactgtaaaagtattcccagtatgtgtgcagcatgaagaaagtattagtgcttctcagtgttctcagtgtaaattctatttatatacagcatattcacatactactttccttatattttatatagttctatgactgttgaaacatcaaggagttaaaaaaatcttaatatttcatgattaactctaagtactattaatagcttgcgaaatattagcaattttcccattatggactatctctctaaagcaagagagactagcattcccagacatcattctagggtctttaagctcattttgggtctgctaaagtttggggggaaatgttacgcaaagtgatactgtgtatgttgccattttgctttattcttctgttgaagcaaaattgtggggttttattatgtgtgtgtgcttttcctagatgtcccagttagctgtgctgagatatacctgtactatttatggtttaagttttgattcttaggtattttctccagctctgacattgttttccaaagacacactaaactgcattgcacagttcaaaatttgattacttaagggatcaatctaggtggtgttcttggtcttaaatttaacagcaaacacagcacatatctattatcactatattaattttcaaaggtttttctgtgacgtttaaaactgtgacaacagatattcacatttgattatagaaacttaatgtctattaataattttagtacaaaatttcataaaccgtgtttttcaaaataagtttatgtcaaatccagcttcccagaaacactaataattaagtacatcaatgtactaaataaatcattcagttgcacccatggggaagattgtgttactgcccttcacagtgaaaaaaagaaaaatctttcatttttaaaattaggagatgttacgtaacttggcactttagtagtgtatacactagcattagtttatacaccacttttgccgctggggattcaagttgaaatgtccctcaatcatataggtctggaatacatctttcattcataatttctgctcagataattgaatagtttgccatcgagattattttcatttatactataaaacaaaagcaaactagtccagtttaattttttgtacttagaatattgcacattttctatatatgagttattcagattagtatctatgtaggttcagtcagatccaaccatggattcgaggtattatactgtataaccctacaaaatacatagaagtattatttgccttcataatagaacccaagagtctgtttcaatttatgaattcagtatttgcaccgagattttgattcccaaagtttggaaaaaaatgacaaaacaacgagggaagaaggaaccagaccttagtgccacatatttttctcttggggttgtaaggtagtctcctgctttccagaacactttattatatttcacttatagacctgattttctgtgtcaaagtataattctcatgctgaagctgtagcctaaaaagccaaaagaaagttgtcttcattgtacaaacatattcatcactttaacaataagggaacaaaatttagtattcaagctgagtgagaatactggttcaatggacatgtccctaagataaaccagaattggcagttaatttaggcgtctagaaaatctcagttcccaccagtaaaattatcctgagtagctaatgcaccttgagaaaaatctggcatactgaataagtaacattaacttgggagccaagagctgggtaagccttacctttagactactctgtgactacagaaataaagccagcacttttggaactaataagccttcacttgtcagtatcataaagagtattgcccaactgaactttgctcccactggtttaatagttacttatttctgcctaagcactcaccttccgattttacccaagtatatatataggatagaaaaaaatgcattatatttgagagctcacttcgcccgaattacaaaatgagtgtttttagattcaagtgacggtaaaaggatttgttcccttcagtgacttgagtgttttagttatgcataagtatttctagcaaaggaagggtagaaaggaattgaaaattaatttacactagttgctacttgggaataaagggctttttgaggggggtatggatattaaatgttttcgttatatacttatccctattaaaacaggcagttgtttctttgaatatgcctaaataacagtattcttaaaatctgacagacaagtaacatgtcaattacttgatattccttgtctccagtaccacaggccactcttgacatcccatgtttgcctggataaagttcctcatttcaaacagtatacatacttctttgcagttcattatagtaaggcttaacctgtaaacagtatctgatggcccacctataaataaaattcagcattctatttttaataatttgtatgccaccaatttgtattatttgtctcaataaatacttagtcatcgatgcaaaaaaaaaaaaaaaaaaaaaaaa

SEQ ID NO: 418 - protein, 413 aa, Homo sapien
MAEGPEEARGHPPGQDDGGGDHEPVPSLRGPPTTAVPCPRDDPQAEPQAPGRPTAPGLAAAAAADKLEPPRELRKRGEAASGSGAELQEQAGCEAPEAAAPRERPARLSAREYSRQVHEWLWQSYCGYLTWHSGLAAFPAYCSPQPSPQSFPSGGAAVPQAAAPPPPQLGYYNPFYFLSPGAAGPDPRTAAGISTPAPVAGLGPRAPHVQASVRATPVTRVGSAAPSRSPSETGRQAGREYVIPSLAHRFMAEMVDFFILFFIKATIVLSIMHLSGIKDISKFAMHYIIEEIDEDTSMEDLQKMMVVALIYRLLVCFYEIICIWGAGGATPGKFLLGLRVVTCDTSVLIAPSRVLVIPSSNVSITTSTIRALIKNFSIASFFPAFITLLFFQHNRTAYDIVAGTIVVKRNGVR

SEQ ID NO: 419 - DNA, 4833 bp, Homo sapien
gccatttcctcctcttgttttcactccggattctccatgttggacccaaactgaggagcccggagctgccgctgggggatcggggccgggggcacccgggggagccgctgcccgggccgcccgccctttgtacaggccgcctcccttcccggtccggggaggaaacgagaggggggatgtgaacagctgtggaagtcggagtctcgggagccggagcgggcccccgcccaggccccccagcccagcccagcccgcgcgcccgcccgtcctcccgtccagccagcccgggcccgcgggattgttagatggaacacggctccatcatcacccaggcgcggagggaagacgccctggtgctcaccaagcaaggcctggtctccaagtcctctcctaagaagcctcgtggacgtaacatcttcaaggcccttttctgctgttttcgcgcccagcatgttggccagtcaagttcctccactgagctcgctgcgtataaggaggaagcaaacaccattgctaagtcggatctgctccagtgtctccagtaccagttctaccagatcccagggacctgcctgctcccagaggtgacagaggaagatcaaggaaggatctgtgtggtcattgacctcgatgaaacccttgtgcatagctcctttaagccaatcaacaatgctgacttcatagtgcctatagagattgaggggaccactcaccaggtgtatgtgctcaagaggccttatgtggatgagttcctgagacgcatgggggaactctttgaatgtgttctcttcactgccagcctggccaagtatgccgaccctgtgacagacctgctggaccggtgtggggtgttccgggcccgcctattccgtgagtcttgcgtgttccaccagggctgctacgtcaaggacctcagccgcctggggagggacctgagaaagaccctcatcctggacaactcgcctgcttcttacatattccaccccgagaatgcagtgcctgtgcagtcctggtttgatgacatggcagacactgagttgctgaacctgatcccaatctttgaggagctgagcggagcagaggacgtctacaccagccttggggcagctgcgggccccttagcctgccctgcttccaagcgacggccatcccagtaggggactttcccacactgtgcctttacgatcagcgtgacagagtagaagctggagtgcctcaccacacggcccggaaacagcgggaagtaactggaaagagctttaggacagcttagatgccgagtgggcgaatgccagaccaatgatacccagagctacctgccgccaacttgttgagatgtgtgtttgactgtgagagagtgtgtgtttgtgtgtgtgttttgccatgaactgtggccccagtgtatagtgtttcagtgggggagaagctgaaagaccaagactcttcccaagttagcttgtctcctctcctgtcaccctaagagccactgagttgtgtagggatgaaractattgaagactccattgccaaaccatggcctttcctcagtgttgtaaggcctatgccaaggataaaggaagggtatgcctttgggtactccaggcatacacctttctgaaatccttctccagccagctgctgcagacaaaagatcacatttctgggaagatgagaacttgtttccagaccagcatccagtggccatcaggtcttgtggcccaaaggctatgcttgcctccggctgagtgcctgggataggccttttctatgtctccccaaggctggggtgctgagcctgccttcctcaccacctagccatagtctcaaacctgtggggaaggaggttttctccctgcccgggaagaggacagataactgatttccgttcttttgactgtgttttaaaattctctttctaaacacagagtgttgggcctggtttgtttctgacaaagttacagtcctgggcctgtaatgaatgtcggcggcgctggggttgcagggaaaagacaaatcctcaaagcgtggacgtgtgtccccatggcttgtggatcagctaagctcgggatcatttccataagtctgcttttcagggattctctgctggtgctggtgcaaggacttctgttccaaaggctgggaaaaactaagctgtcccagcccctcccatttcttgggcagggctcttttcctgttgtgtcttcccccagggcctgtcctgtaccgagctctgtctgttccagcctacatccttcctgggtgttgcttttcctcttaagggcctcagaactcttgctcttcctggggtgagggggaatgagtgttcttgacatgtgacagcctaatgcgcatgctttctgcctctggtaacaggagtgagtgagcccctcagacctgcactctgggtgtctcctgcttacaaaggttcttaatagtgaatgctttaaaattaaagtcatcacgaaatggaagttttcccagggtggaaaataagaggaagtgctgctgtaattgggagcacaaggggcctcccaaaaaggagccccacctcagcatcactgccttaatcgtggcctccctggggtgggtggggttctctcctccctccctccctcctcctggggtgggagggcgctcctgttcccatctctgtgttccctggaggcaggtatcacaaagcatttgtgaattgctttaggtgcagggacaccacccactcaggactcttccccatcatcccttccattgccacaccctagatccagcctcaggaactaacaagttktgagaaaagcaggtggtagagcagcagcttcgtgctctcagcggtggctggctggcatttttctctagcgttgtggtgccaccttcccttcttgtcccaaggttataaggccttgtctttctctttggaatcataaagtggaacagagtccccagaactcatgtgghcatttccgacagcatcactccccggtgcctatggggtcccggtgtacctaaagggagaaggaccccatgtgctagccagaaatatactgtctcttgaaggaaagcaggagctcagactcttagagccagctgtggcttcggacccaaggcctgacctaggctgctatcctaatattggaggaggggcctctcttccaagccccaccctaagggttagcccttggacaaatcttgtgccgtctaggcccagccaggcttttctgactaaataagcaataagaggctctaagctgactgagttgcaaggaccctttccgccctcccttggatctccatgtttctccagatggcggaagagcatgtgccaccccctttcctaacagacttgtccaagtgcttggcgtgggacccatgaccaaagcccaggatggcttggtgggagtgtccctgctgcatctgcatgaagcccctgctttttaggcctcactcccatcagaaccctgcctgcccacctgcaactcccccccaacaatgccattcccacttgccccagagaagctactcggccaaacctagccagggtctgttcttgtggaccagagccagcctagtcattatttgctgtcgggtttccagtttcaccgtgtgttagggtgagggatgattgtaaaatttgctcctcaaaggaatcaggccagactcaattttgggagggcaagacagggaggaggccgcttcatcccagactctcttctagggcttcccaccatcagcccctcccacttgagactggtctttgggaggcaataggccaccatgcctggtcagcaccaattcaagccatgccaggaatctgcctacctgccaggttcagttcttttaaggtgcctcttcagggacacagtgtgtctctctgattgggcttctaaatcaaaagcctgatgttcgtgtccctctcatagggggagctttggacacaggaccagtttggaaaagggtcaggtaagggtttccactctgcacattgtagagggaacactctgtaggcccatgggtcccttactagagaggttgagtgaatttgccttcagttaacatgggaccttctgtttagcttcctcttgcttcccaaagattttaagcattttgtaaatgtataaactcacctctggtaacagtggcccagacgctgctttgtgctaaaagcatgggaaatgtaaaggcagtctttctctgggaaatggatgctattctattctgctgcccctacctgttcctgaggcctcatttagaaagaaaatcccctcagaaggctgtctggcacccagtgtcctagccaggccaagtatatgagaaaggtaagtccattttccccttcaggtcctcagtggattacttaaccactgctgtccctcggtccctttttcctaaacgggtttagttctgtcttttttctccttttttctaaatgctggtaaatatttacattcagccagggaagaggaggccagaggtcgggccagctgccccattcttttaacgttgtagggcctgcccatggagcggaccctcctctttgggcctcgtgagcttttttgcttatcatgttccatttcgtgccgctttcccccttcaagatgccatttggagggtaggggatctgcttcccactgtgactgggctatgggattctgactaccttgcttacagattcatggtttgataaatttgttgtattccaaaacttgaaatgcaggacgccattaagtgtctgtttatatttttggaatatttgtattacttacaattaattaataaaagtgggtttaaaaaacctttccaggaaaaaaaaaaaaaaaaaaaaaaaaaaaaaaaaaaaaa

SEQ ID NO: 420 - protein, 74 aa, Homo sapien
MAWWECPCCICMKPLLFRPHSHQNPACPPATPPQQCHSHLPQRSYSAKPSQGLFLWTRASLVIICCRVSSFTVC

SEQ ID NO: 421 - DNA, 6906 bp, Homo sapien
ggcgcgggcggcctggagccccgggagcggcgcgcgcggtcccggcccagccggctctcctggcctcgcgctgcacattctctcctggcggcggcgccacctgcagtagcgttcgcccgaacatggcgacacggagcagcaggagggagtcgcgactcccgttcctattcaccctggtcgcactgctgccgcccggagctctctgcgaagtctggacgcagaggctgcacggcggcagcgcgcccttgccccaggaccggggcttcctcgtggtgcagggcgacccgcgcgagctgcggctgtgggcgcgcggggatgccaggggggcgagccgcgcggacgagaagccgctccggaggaaacggagcgctgccctgcagcccgagcccatcaaggtgtacggacaggttagtctgaatgattcccacaatcagatggtggtgcactgggctggagagaaaagcaacgtgatcgtggccttggcccgagatagcctggcattggcgaggcccaagagcagtgatgtgtacgtgtcttacgactatggaaaatcattcaagaaaatttcagacaagttaaactttggcttgggaaataggagtgaagctgttatcgcccagttctaccacagccctgcggacaacaagcggtacatctttgcagacgcttatgcccagtacctctggatcacgtttgacttctgcaacactcttcaaggcttttccatcccatttcgggcagctgatctcctcctacacagtaaggcctccaaccttctcttgggctttgacaggtcccaccccaacaagcagctgtggaagtcagatgactttggccagacctggatcatgattcaggaacatgtcaagtccttttcttggggaattgatccctatgacaaaccaaataccatctacattgaacgacacgaaccctctggctactccactgtcttccgaagtacagatttcttccagtcccgggaaaaccaggaagtgatccttgaggaagtgagagattttcagcttcgggacaagtacatgtttgctacaaaggtggtgcatctcttgggcagtgaacagcagtcttctgtccagctctgggtctcctttggccggaagcccatgagagcagcccagtttgtcacaagacatcctattaatgaatattacatcgcagatgcctccgaggaccaggtgtttgtgtgtgtcagccacagtaacaaccgcaccaatttatacatctcagaggcagaggggctgaagttctccctgtccttggagaacgtgctctattacagcccaggaggggccggcagtgacaccttggtgaggtattttgcaaatgaaccatttgctgacttccaccgagtggaaggattgcaaggagtctacattgctactctgattaatggttctatgaatgaggagaacatgagatcggtcatcacctttgacaaagggggaacctgggagtttcttcaggctccagccttcacgggatatggagagaaaatcaattgtgagctttcccagggctgttcccttcatctggctcagcgcctcagtcagctcctcaacctccagctccggagaatgcccatcctgtccaaggagtcggctccaggcctcatcatcgccactggctcagtgggaaagaacttggctagcaagacaaacgtgtacatctctagcagtgctggagccaggtggcgagaggcacttcctggacctcactactacacatggggagaccacggcggaatcatcacggccattgcccagggcatggaaaccaacgagctaaaatacagtaccaatgaaggggagacctggaaaacattcatcttctctgagaagccagtgtttgtgtatggcctcctcacagaacctggggagaagagcactgtcttcaccatctttggctcgaacaaagagaatgtccacagctggctgatcctccaggtcaatgccacggatgccttgggagttccctgcacagagaatgactacaagctgtggtcaccatctgatgagcgggggaatgagtgtttgctgggacacaagactgttttcaaacggcggaccccccatgccacatgcttcaatggagaggactttgacaggccggtggtcgtgtccaactgctcctgcacccgggaggactatgagtgtgacttcggtttcaagatgagtgaagatttgtcattagaggtttgtgttccagatccggaattttctggaaagtcatactcccctcctgtgccttgccctgtgggttctacttacaggagaacgagaggctaccggaagatttctggggacacttgtagcggaggagatgttgaagcgcgactggaaggagagctggtcccctgtcccctggcagaagagaacgagttcattctgtatgctgtgaggaaatccatctaccgctatgacctggcctcgggagccaccgagcagttgcctctcaccgggctacgggcagcagtggccctggactttgactatgagcacaactgtttgtattggtccgacctggccttggacgtcatccagcgcctctgtttgaatggaagcacagggcaagaggtgatcatcaattctggcctggagacagtagaagctttggcttttgaacccctcagccagctgctttactgggtagatgcaggcttcaaaaagattgaggtagctaatccagatggcgacttccgactcacaatcgtcaattcctctgtgcttgatcgtcccagggctctggtcctcgtgccccaagagggggtgatgttctggacagactggggagacctgaagcctgggatttatcggagcaatatggatggttctgctgcctatcacctggtgtctgaggatgtgaagtggcccaatggcatctctgtggacgaccagtggatttactggacggatgcctacctggagtgcatagagcggatcacgttcagtggccagcagcgctctgtcattctggacaacctcccgcacccctatgccattgctgtctttaagaatgaaatctactgggatgactggtcacagctcagcatattccgagcttccaaatacagtgggtcccagatggagattctggcaaaccagctcacggggctcatggacatgaagattttctacaaggggaagaacactggaagcaatgcctgtgtgcccaggccatgcagcctgctgtgcctgcccaaggccaacaacagtagaagctgcaggtgtccagaggatgtgtccagcagtgtgcttccatcaggggacctgatgtgtgactgccctcagggctatcagctcaagaacaatacctgtgtcaaagaagagaacacctgtcttcgcaaccagtatcgctgcagcaacgggaactgtatcaacagcatttggtggtgtgactttgacaacgactgtggagacatgagcgatgagagaaactgccctaccaccatctgtgacctggacacccagtttcgttgccaggagtctgggacttgtatcccactgtcctataaatgtgaccttgaggatgactgtggagacaacagtgatgaaagtcattgtgaaatgcaccagtgccggagtgacgagtacaactgcagttccggcatgtgcatccgctcctcctgggtatgtgacggggacaacgactgcagggactggtctgatgaagccaactgtaccgccatctatcacacctgtgaggcctccaacttccagtgccgaaacgggcactgcatcccccagcggtgggcgtgtgacggggatacggactgccaggatggttccgatgaggatccagtcaactgtgagaagaagtgcaatggattccgctgcccaaacggcacttgcatcccatccagcaaacattgtgatggtctgcgtgattgctctgatggctccgatgaacagcactgcgagcccctctgtacgcacttcatggactttgtgtgtaagaaccgccagcagtgcctgttccactccatggtctgtgacggaatcatccagtgccgcgacgggtccgatgaggatgcggcgtttgcaggatgctcccaagatcctgagttccacaaggtatgtgatgagttcggtttccagtgtcagaatggagtgtgcatcagtttgatttggaagtgcgacgggatggatgattgcggcgattattctgatgaagccaactgcgaaaaccccacagaagccccaaactgctcccgctacttccagtttcggtgtgagaatggccactgcatccccaacagatggaaatgtgacagggagaacgactgtggggactggtctgatgagaaggattgtggagattcacatattcttcccttctcgactcctgggccctccacgtgtctgcccaattactaccgctgcagcagtgggacctgcgtgatggacacctgggtgtgcgacgggtaccgagattgtgcagatggctctgacgaggaagcctgccccttgcttgcaaacgtcactgctgcctccactcccacccaacttgggcgatgtgaccgatttgagttcgaatgccaccaaccgaagacgtgtattcccaactggaagcgctgtgacggccaccaagattgccaggatggccgggacgaggccaattgccccacacacagcaccttgacttgcatgagcagggagttccagtgcgaggacggggaggcctgcattgtgctctcggagcgctgcgacggcttcctggactgctcggacgagagcgatgaaaaggcctgcagtgatgagttgactgtgtacaaagtacagaatcttcagtggacagctgacttctctggggatgtgactttgacctggatgaggcccaaaaaaatgccctctgcttcttgtgtatataatgtctactacagggtggttggagagagcatatggaagactctggagacccacagcaataagacaaacactgtattaaaagtcttgaaaccagataccacgtatcaggttaaagtacaggttcagtgtctcagcaaggcacacaacaccaatgactttgtgaccctgaggaccccagagggattgccagatgcccctcgaaatctccagctgtcactccccagggaagcagaaggtgtgattgtaggccactgggctcctcccatccacacccatggcctcatccgtgagtacattgtagaatacagcaggagtggttccaagatgtgggcctcccagagggctgctagtaactttacagaaatcaagaacttattggtcaacactctatacaccgtcagagtggctgcggtgactagtcgtggaataggaaactggagcgattctaaatccattaccaccataaaaggaaaagtgatcccaccaccagatatccacattgacagctatggtgaaaattatctaagcttcaccctgaccatggagagtgatatcaaggtgaatggctatgtggtgaaccttttctgggcatttgacacccacaagcaagagaggagaactttgaacttccgaggaagcatattgtcacacaaagttggcaatctgacagctcatacatcctatgagatttctgcctgggccaagactgacttgggggatagccctctggcatttgagcatgttatgaccagaggggttcgcccacctgcacctagcctcaaggccaaagccatcaaccagactgcagtggaatgtacctggaccggcccccggaatgtggtttatggtattttctatgccacgtcctttcttgacctctatcgcaacccgaagagcttgactacttcactccacaacaagacggtcattgtcagtaaggatgagcagtatttgtttctggtccgtgtagtggtaccctaccaggggccatcctctgactacgttgtagtgaagatgatcccggacagcaggcttccaccccgtcacctgcatgtggttcatacgggcaaaacctccgtggtcatcaagtgggaatcaccgtatgactctcctgaccaggacttgttgtatgcaattgcagtcaaagatctcataagaaagactgacaggagctacaaagtaaaatcccgtaacagcactgtggaatacacccttaacaagttggagcctggcgggaaataccacatcattgtccaactggggaacatgagcaaagattccagcataaaaattaccacagtttcattatcagcacctgatgccttaaaaatcataacagaaaatgatcatgttcttctgttttggaaaagcctggctttaaaggaaaagcattttaatgaaagcaggggctatgagatacacatgtttgatagtgccatgaatatcacagcttaccttgggaatactactgacaatttctttaaaatttccaacctgaagatgggtcataattacacgttcaccgtccaagcaagatgcctttttggcaaccagatctgtggggagcctgccatcctgctgtacgatgagctggggtctggtgcagatgcatctgcaacgcaggctgccagatctacggatgttgctgctgtggtggtgcccatcttattcctgatactgctgagcctgggggtggggtttgccatcctgtacacgaagcaccggaggctgcagagcagcttcaccgccttcgccaacagccactacagctccaggctggggtccgcaatcttctcctctggggatgacctgggggaagatgatgaagatgcccctatgataactggattttcagatgacgtccccatggtgatagcctgaaagagctttcctcactagaaaccaaatggtgtaaatattttatttgataaagatagttgatggtttattttaaaagatgcactttgagttgcaatatgttatttttatatgggccaaaaacaaaaaacaaaaaaaaaaa

SEQ ID NO: 422 - protein, 2000 aa, Homo sapien
MATRSSRRESRLPFLFTLVALLPPGALCEVWTQRLHGGSAPLPQDRGFLVVQGDPRELRLWARGDARGASRADEKPLRRKRSAALQPEPIKVYGQVSLNDSHNQMVVHWAGEKSNVIVALARDSLALARPKSSDVYVSYDYGKSFKKISDKLNFGLGNRSEAVIAQFYHSPADNKRYIFADAYAQYLWITFDFCNTLQGFSIPFRAADLLLHSKASNLLLGFDRSHPNKQLWKSDDFGQTWIMIQEHVKSFSWGIDPYDKPNTIYIERHEPSGYSTVFRSTDFFQSRENQEVILEEVRDFQLRDKYMFATKVVHLLGSEQQSSVQLWVSFGRKPMRAAQFVTRHPINEYYIADASEDQVFVCVSHSNNRTNLYISEAEGLKFSLSLENVLYYSPGGAGSDTLVRYFANEPFADFHRVEGLQGVYIATLINGSMNEENMRSVITFDKGGTWEFLQAPAFTGYGEKINCELSQGCSLHLAQRLSQLLNLQLRRMPILSKESAPGLIIATGSVGKNLASKTNVYISSSAGARWREALPGPHYYTWGDHGGIITAIAQGMETNELKYSTNEGETWKTFIFSEKPVFVYGLLTEPGEKSTVFTIFGSNKENVHSWLILQVNATDALGVPCTENDYKLWSPSDERGNECLLGHKTVFKRRTPHATCFNGEDFDRPVVVSNCSCTREDYECDFGFKMSEDLSLEVCVPDPEFSGKSYSPPVPCPVGSTYRRTRGYRKISGDTCSGGDVEARLEGELVPCPLAEENEFILYAVRKSIYRYDLASGATEQLPLTGLRAAVALDFDYEHNCLYWSDLALDVIQRLCLNGSTGQEVIINSGLETVEALAFEPLSQLLYWVDAGFKKIEVANPDGDFRLTIVNSSVLDRPRALVLVPQEGVMFWTDWGDLKPGIYRSNMDGSAAYHLVSEDVKWPNGISVDDQWIYWTDAYLECIERITFSGQQRSVILDNLPHPYAIAVFKNEIYWDDWSQLSIFRASKYSGSQMEILANQLTGLMDMKIFYKGKNTGSNACVPRPCSLLCLPKANNSRSCRCPEDVSSSVLPSGDLMCDCPQGYQLKNNTCVKEENTCLRNQYRCSNGNCINSIWWCDFDNDCGDMSDERNCPTTICDLDTQFRCQESGTCIPLSYKCDLEDDCGDNSDESHCEMHQCRSDEYNCSSGMCIRSSWVCDGDNDCRDWSDEANCTAIYHTCEASNFQCRNGHCIPQRWACDGDTDCQDGSDEDPVNCEKKCNGFRCPNGTCIPSSKHCDGLRDCSDGSDEQHCEPLCTHFMDFVCKNRQQCLFHSMVCDGIIQCRDGSDEDAAFAGCSQDPEFHKVCDEFGFQCQNGVCISLIWKCDGMDDCGDYSDEANCENPTEAPNCSRYFQFRCENGHCIPNRWKCDRENDCGDWSDEKDCGDSHILPFSTPGPSTCLPNYYRCSSGTCVMDTWVCDGYRDCADGSDEEACPLLANVTAASTPTQLGRCDRFEFECHQPKTCIPNWKRCDGHQDCQDGRDEANCPTHSTLTCMSREFQCEDGEACIVLSERCDGFLDCSDESDEKACSDELTVYKVQNLQWTADFSGDVTLTWMRPKKMPSASCVYNVYYRVVGESIWKTLETHSNKTNTVLKVLKPDTTYQVKVQVQCLSKAHNTNDFVTLRTPEGLPDAPRNLQLSLPREAEGVIVGHWAPPIHTHGLIREYIVEYSRSGSKMWASQRAASNFTEIKNLLVNTLYTVRVAAVTSRGIGNWSDSKSITTIKGKVIPPPDIHIDSYGENYLSFTLTMESDIKVNGYVVNLFWAFDTHKQERRTLNFRGSILSHKVGNLTAHTSYEISAWAKTDLGDSPLAFEHVMTRGVRPPAPSLKAKAINQTAVECTWTGPRNVVYGIFYATSFLDLYRNPKSLTTSLHNKTVIVSKDEQYLFLVRVVVPYQGPSSDYVVVKMIPDSRLPPRHLHVVHTGKTSVVIKWESPYDSPDQDLLYAIAVKDLIRKTDRSYKVKSRNSTVEYTLNKLEPGG

SEQ ID NO: 423 - DNA, 1270 bp, Homo sapien
ggcacgaggctgcgccggaagtccctagccaggcctggcggtaaccttgggggcctcactgcagccgccgctgctgttggagtgggctttgcgagtctgaacgttggcggggctaggctcgttaactgccgagagcctccgggtttgcggtggaggacgctgaggcccgtggggggcaggcacccgggcgccgggcctcccagccgacatgtctctagtggcggaagccttcgtctcccagattgcagctgcagaaccttggcctgaaaatgctacattatatcagcaattgaaaggggagcaaattttactttctgacaatgcagcttctcttgcagtgcaggcctttttgcaaatgtgtaacttgcctatcaaagtagtttgtagggcaaatgcagaatatatgtctccatctggtaaagtaccttttattcatgtgggaaatcaagtagtatcagaacttggtccaatagtccaatttgttaaagccaagggccattctcttagtgatgggctggaggaagtccaaaaagcagaaatgaaagcttacatggaattagtcaacaatatgctgttgactgcagagctgtatcttcagtggtgtgatgaagctacagtaggggagatcactcatgctaggtatggatctccttacccttggcctctgaatcatattttggcctatcaaaaacagtgggaagtcaaacgtaagatgaaagctattggatggggaaagaagactctggaccaggtcttagaggatgtagaccagtgctgtcaagctctctctcaaagactgggaacacaaccgtatttcttcaataagcagcctactgaacttgacgcactggtatttggccatctatacaccattcttaccacacaattgacaaatgatgaactttctgagaaggtgaaaaactatagcaacctccttgctttctgtaggagaattgaacagcactattttgaagatcgtggtaaaggcaggctgtcatagagttatgtgttagtctcaggagtcttaacttttgaaatatgttttacttgaatgttacattagatattggtgtcagaattttaaaaccaaattactgctttttgaaacctcaaattatataatgtatcttatgtatgtgctttatattgttatttgtgtatacattaaaataattctgaattatttaatctgatatgttgtattctgtatcttgaaatttttgtttccttgaaacatgcatgcatttaaaaataaagcttaaacaactgt

SEQ ID NO: 424 - protein, 263 aa, Homo sapien
MSLVAEAFVSQIAAAEPWPENATLYQQLKGEQILLSDNAASLAVQAFLQMCNLPIKVVCRANAEYMSPSGKVPFIHVGNQVVSELGPIVQFVKAKGHSLSDGLEEVQKAEMKAYMELVNNMLLTAELYLQWCDEATVGEITHARYGSPYPWPLNHILAYQKQWEVKRKMKAIGWGKKTLDQVLEDVDQCCQALSQRLGTQPYFFNKQPTELDALVFGHLYTILTTQLTNDELSEKVKNYSNLLAFCRRIEQHYFEDRGKGRLS

SEQ ID NO: 425 - DNA, 1922 bp, Homo sapien
gcccctttctttctcctcgtcggcccgagagcaggaacacgataacgaaggaggcccaacttcattcaataaggagcctgacggatttatcccagacggtagaacaaaaggaagaatattgatggattttaaaccagagtttttaaagagcttgagaatacggggaaattaatttgttctcctacacacatagatagggtaaggttgtttctgatgcagctgagaaaaatgcagaccgtcaaaaaggagcaggcgtctcttgatgccagtagcaatgtggacaagatgatggtccttaattctgctttaacggaagtgtcagaagactccacaacaggtgaggacgtgcttctcagtgaaggaagtgtggggaagaacaaatcttctgcatgtcggaggaaacgggaattcattcctgatgaaaagaaagatgctatgtattgggaaaaaaggcggaaaaataatgaagctgccaaaagatctcgtgagaagcgtcgactgaatgacctggttttagagaacaaactaattgcactgggagaagaaaacgccactttaaaagctgagctgctttcactaaaattaaagtttggtttaattagctccacagcatatgctcaagagattcagaaactcagtaattctacagctgtgtactttcaagattaccagacttccaaatccaatgtgagttcatttgtggacgagcacgaaccctcgatggtgtcaagtagttgtatttctgtcattaaacactctccacaaagctcgctgtccgatgtttcagaagtgtcctcagtagaacacacgcaggagagctctgtgcagggaagctgcagaagtcctgaaaacaagttccagattatcaagcaagagccgatggaattagagagctacacaagggagccaagagatgaccgaggctcttacacagcgtccatctatcaaaactatatggggaattctttctctgggtactcacactctcccccactactgcaagtcaaccgatcctccagcaactccccgggaacgtcggaaactgatgatggtgtggtaggaaagtcatctgatggagaagacgagcaacaggtccccaagggccccatccattctccagttgaactcaagcatgtgcatgcaactgtggttaaagttccagaagtgaattcctctgccttgccacacaagctccggatcaaagccaaagccatgcagatcaaagtagaagcctttgataatgaatttgaggccacgcaaaaactttcctcacctattgacatgacatctaaaagacatttcgaactcgaaaagcatagtgccccaagtatggtacattcttctcttactcctttctcagtgcaagtgactaacattcaagattggtctctcaaatcggagcactggcatcaaaaagaactgagtggcaaaactcagaatagtttcaaaactggagttgttgaaatgaaagacagtggctacaaagtttctgacccagagaacttgtatttgaagcaggggatagcaaacttatctgcagaggttgtctcactcaagagacttatagccacacaaccaatctctgcttcagactctgggtaaattactactgagtaagagctgggcatttagaaagatgtcatttgcaatagagcagtccattttgtattatgctgaattttcactggacctgtgatgtcatttcactgtgatgtgcacatgttgtctgtttggtgtctttttgtgcacagattatgatgaagattagattgtgttatcactctgcctgtgtatagtcagatagtccatgcgaaggctgtatatattgaacattatttttgttgttctattataaagtgtgtaagttaccagtttcaataaaggattggtgacaaacacagaaaaaaaaaaaaaaaaaaaaa

SEQ ID NO: 426 - protein, 462 aa, Homo sapien
MQLRKMQTVKKEQASLDASSNVDKMMVLNSALTEVSEDSTTGEDVLLSEGSVGKNKSSACRRKREFIPDEKKDAMYWEKRRKNNEAAKRSREKRRLNDLVLENKLIALGEENATLKAELLSLKLKFGLISSTAYAQEIQKLSNSTAVYFQDYQTSKSNVSSFVDEHEPSMVSSSCISVIKHSPQSSLSDVSEVSSVEHTQESSVQGSCRSPENKFQIIKQEPMELESYTREPRDDRGSYTASIYQNYMGNSFSGYSHSPPLLQVNRSSSNSPGTSETDDGVVGKSSDGEDEQQVPKGPIHSPVELKHVHATVVKVPEVNSSALPHKLRIKAKAMQIKVEAFDNEFEATQKLSSPIDMTSKRHFELEKHSAPSMVHSSLTPFSVQVTNIQDWSLKSEHWHQKELSGKTQNSFKTGVVEMKDSGYKVSDPENLYLKQGIANLSAEVVSLKRLIATQPISASDSG

SEQ ID NO: 427 - DNA, 2531 bp, Homo sapien
atggcgacctgcatttggctgcggagctgtggggcccggcgcctcgggtcgacgtttccaggctgccgcctccgcccccgcgccggcggcctggtccctgcctccgggcctgcgcccggcccggcccagctccgctgctacgctgggcgcctggcgggcctctctgcggcgctgctgcgcaccgacagcttcgtgggcggccgctggctcccggccgccgccaccttccccgtgcaagacccggccagcggcgccgctctgggcatggtagccgactgcggggtgcgagaggcccgcgccgccgtgcgcgctgcctacgaggctttctgccgctggagggaggtctccgccaaggagaggagttcattacttcggaagtggtacaatttaatgatacaaaataaggatgaccttgccagaataatcacagctgaaagtggaaagccactgaaggaggcacatggagaaattctctattccgcctttttcctagagtggttctctgaggaagcccgccgtgtttacggagacattatccacaccccggcaaaggacaggcgggccctggtcctcaagcagcccataggcgtggctgcagtcatcaccccgtggaatttccccagtgccatgatcacccggaaggtgggggccgccctggcagccggctgtactgtcgtggtgaagcctgccgaagacacgcccttctccgccctggccctggctgagcttgcaagccaggctgggattccttcaggtgtatacaatgttattccctgttctcgaaagaatgccaaggaagtaggggaggcaatttgtactgatcctctggtgtccaaaatttcctttactggttcaacaactacaggaaagatcctgttgcaccacgcagcaaactctgtgaaaagggtctctatggagctgggcggccttgctccatttatagtatttgacagtgccaacgtggaccaggctgtagcaggggccatggcatctaaatttaggaacactggacagacttgtgtttgctcaaaccaattcttggtgcaaaggggcatccatgatgcctttgtaaaagcattcgccgaggccatgaagaagaacctgcgcgtaggtaatggatttgaggaaggaactactcagggcccattaattaatgaaaaagcggtagaaaaggtggagaaacaggtgaatgatgccgtttctaaaggtgccaccgttgtgacaggtggaaaacgacaccaacttggaaaaaatttctttgagcctaccctgctgtgcaatgtcacccaggacatgctgtgcactcatgaagagactttcgggcctctggcaccagttatcaagttcgatacagaggaggaggctatagcaatcgctaacgcagctgatgttgggttagcaggttatttttactctcaagacccagcccagatctggagagtggcagagcagctggaagtgggcatggttggcgtcaacgaaggattaatttcctctgtggagtgcccttttggtggagtgaagcagtccggccttgggcgagaggggtccaagtatggcattgatgagtatctggaactcaagtatgtgtgttacgggggcttgtaggattctttggttctttaaaaaaatttaaaaggagacttatctacatatataggtacatgccatccattattttaaataaactaataggttttcagaattatgaatttttcagaactcatccagtccttgtaatcttaaacagatgcaaatcctacccctgcccttaatgtaactagggaccaatatgtgccacgtgcctgtggctgcagactcccagagaaccagcactgggtttacagaatgaggccctggctccccaccacagcccagctgcctcagagcaggcacagcacaaggcaggcccagccccatgggccgtcacaaaggcttgatcactgcctgggcagtggcacaaccatcccccatgtcgctacagaacatgggcccagagcaccttgaaggagacccttgactgtgactggcaggcaggtgaggggcacagcacccctccccggcatctgccagctcagcacagaagacaccgaatgtgcatctggaggtgttgcggcagaggtttgagtgaaccctctttcaaagacaataaatagcacagaattgtccgtgcttctgtgaggcacgaaggagcacctctccctattcctgaaccatattttaattgatgcctttattgtcccaaatttaccacttaaagaattctattttcatttctgtcctgtttgccacttcatttcatttccttgagtaaatgagctgaagtgtaaagcaaagaatagcagaagcagcttggtaggatggaaggcacgcagtggcatggcctggctccttccctgagtggccttgttgccttgggcgtgtgttcagcacctcccatcccatggatacagtggagattccatacaggccttacttagctccttgcgatactgtgagccagagagaaagtaaaagcacttcacaaaaaa

SEQ ID NO: 428 - protein, 535 aa, Homo sapien
MATCIWLRSCGARRLGSTFPGCRLRPRAGGLVPASGPAPGPAQLRCYAGRLAGLSAALLRTDSFVGGRWLPAAATFPVQDPASGAALGMVADCGVREARAAVRAAYEAFCRWREVSAKERSSLLRKWYNLMIQNKDDLARIITAESGKPLKEAHGEILYSAFFLEWFSEEARRVYGDIIHTPAKDRRALVLKQPIGVAAVITPWNFPSAMITRKVGAALAAGCTVVVKPAEDTPFSALALAELASQAGIPSGVYNVIPCSRKNAKEVGEAICTDPLVSKISFTGSTTTGKILLHHAANSVKRVSMELGGLAPFIVFDSANVDQAVAGAMASKFRNTGQTCVCSNQFLVQRGIHDAFVKAFAEAMKKNLRVGNGFEEGTTQGPLINEKAVEKVEKQVNDAVSKGATVVTGGKRHQLGKNFFEPTLLCNVTQDMLCTHEETFGPLAPVIKFDTEEEAIAIANAADVGLAGYFYSQDPAQIWRVAEQLEVGMVGVNEGLISSVECPFGGVKQSGLGREGSKYGIDEYLELKYVCYGGL

SEQ ID NO: 429 - DNA, 1750 bp, Homo sapien
caccgcgcaagcgcatcctggcctttcttcagtccccacgtgcgatccttcccggcaactttttcgagaaaaatgcccaaattcaaggcggcccgtggggtggggggtcaggaaaaacatgcgcccctggccgatcagatcctggctgggaatgcggtgcgggcgggggtccgggagaagcggcggggtcgcgggacaggagaagcggaggaagagtatgtggggccccggctgagccgacggattttgcagcaagcacggcagcaacaggaggaactcgaggccgagcatgggactggggacaagcccgcggcgccgcgggaacgcaccacgcggctgggtccaagaatgcctcaggatggatcagatgacgaggacgaggagtggcccaccctggagaaggctgccacaatgacagcagcgggccatcatgcagaggtggttgtggaccctgaggatgagcgtgccatagagatgttcatgaacaagaaccctcctgccaggcgcaccctggctgacatcatcatggagaagctgactgagaagcagacagaggttgagacagtcatgtcagaggtgtcgggcttccctatgccccagctggacccccgggtcctagaagtgtacaggggggtccgggaggtattatctaagtaccgcagtggaaaactgcccaaggcatttaagatcatccctgcactctccaactgggagcaaatcctctacgtcacagagccggaggcctggactgcagctgccatgtaccaggccaccaggatttttgcctctaacctgaaggaacgcatggcccagcgcttctacaaccttgtcctgctccctcgagtacgagatgacgttgctgaatacaaacgactcaacttccatctctacatggctctcaagaaggcccttttcaaacctggagcctggttcaaagggatcctgattccactgtgcgagtctggcacttgtaccctccgggaagccatcattgtgggtagcatcatcaccaagtgctccatccctgtgttgcactccagtgcggccatgctgaaaattgctgagatggaatacagcggtgccaacagcatcttcctgcgactgctgctggataagaagtatgcactgccttaccgggtgctggatgccctagtcttccacttcctggggttccggacagagaagcgtgaactgcctgtgctgtggcaccagtgcctcctgactttggtccagcgctacaaggccgacttggccacagaccagaaagaggccctcttagaactgctccggctgcagccccatccacagctatcgcccgaaatcaggcgtgagcttcagagtgcagtcccccgcgatgtggaagatgttcccatcaccgtggagtgaggaaaacagtcagctgtcctggccaaaggggtttggaaggacaccaagacccccgttggtgactgaagatgacactgagctttaatggctgaagacccagatcagggcagtgacagatcacagggacatctgtggctcccagtccaggacaggaaggactgagggtctggctggttccctcttccattctaggcccttatccctgtttagttctgagagccaacttgagataccatatgctagcattcccagtccccagctggggcttggtgtgagtactttttctatggctattgtgtcaggtcactgtggataaaggcaaagacagatatttattgaaaaaaaaaaaaaaaaaaaaaaaaaa

SEQ ID NO: 430 - protein, 301 aa, Homo sapien
MNKNPPARRTLADIIMEKLTEKQTEVETVMSEVSGFPMPQLDPRVLEVYRGVREVLSKYRSGKLPKAFKIIPALSNWEQILYVTEPEAWTAAAMYQATRIFASNLKERMAQRFYNLVLLPRVRDDVAEYKRLNFHLYMALKKALFKPGAWFKGILIPLCESGTCTLREAIIVGSIITKCSIPVLHSSAAMLKIAEMEYSGANSIFLRLLLDKKYALPYRVLDALVFHFLGFRTEKRELPVLWHQCLLTLVQRYKADLATDQKEALLELLRLQPHPQLSPEIRRELQSAVPRDVEDVPITVE

SEQ ID NO: 431 - DNA, 2220 bp, Homo sapien
cccacgcgtccgatggaagttaaagggaaaaagcaattcacaggaaagaatacaaagacagcacaagaaaaaaacagatttcataaaaatagtgattctggttcttcaaagacatttccaacaaggaaagttgctaaagaaggtggacctaaagtcacatctaggaactttgagaaaagtatcacaaaacttgggaaaaagggtgtaaagcagttcaagaataagcagcaaggggacaaatcaccaaagaacaaattccagccggcaaataaattcaacaagaagagaaaattccagccagatggtagaagcgatgaatcagcagccaagaagcccaaatgggatgacttcaaaaagaagaagaaagaactgaagcaaagcagacaactcagtgataaaaccaactatgacattgttgttcgggcaaagcagatgtgggagattttaagaagaaaagactgtgacaaagaaaaaagagtaaagttaatgagtgatttgcagaagttgattcaagggaaaattaaaactattgcatttgcacacgattcaactcgtgtgatccagtgttacattcagtatggtaatgaagaacagagaaaacaggcttttgaagaattgcgagatgatttggttgagttaagtaaagccaaatattcgagaaatattgttaagaaatttctcatgtatggaagtaaaccacagattgcagagataatcagaagttttaaaggccacgtgaggaagatgctgcggcatgcggaagcatcagccatcgtggagtacgcatacaatgacaaagccattttggagcagaggaacatgctgacggaagagctctatgggaacacatttcagctttacaagtcagcagatcacccaactctggacaaagtgttagagttacagccagaaaaattagaacttattatggatgaaatgaaacagattctaactccaatggcccaaaaggaagctgtgattaagcactcattggtgcataaagtattcttggacttttttacctatgcaccccccaaactcagatcagaaatgattgaagccatccgcgaagcggtggtctacctggcacacacacacgatggcgccagagtggccatgcactgcctgtggcatggcacgcccaaggacaggaaagtgattgtgaaaacaatgaagacttatgttgaaaaggtggctaatggccaatactcccatttggttttactggcggcatttgattgtattgatgatactaagcttgtgaagcagataatcatatcagaaattatcagttcattgcctagcatagtaaatgacaaatatggaaggaaggtcctattgtacttactaagccccagagatcctgcacatacagtacgagaaatcattgaagttctgcaaaaaggagatggaaatgcacacagtaagaaagatacagaggtccgcagacgggagctcctagaatccatttctccagctttgttaagctacctgcaagaacacgcccaagaagtggtgctagataagtctgcgtgtgtgttggtgtctgacattctgggatctgccactggagacgttcagcctaccatgaatgccatcgccagcttggcagcaacaggactgcatcctggtggcaaggacggagagcttcacattgcagaacatcctgcaggacatctagttctgaagtggttaatagagcaagataaaaagatgaaagaaaatgggagagaaggttgttttgcaaaaacacttgtagagcatgttggtatgaagaacctgaagtcctgggctagtgtaaatcgaggtgccattattctttctagcctcctccagagttgtgacctggaagttgcaaacaaagtcaaagctgcactgaaaagcttgattcctacattggaaaaaaccaaaagcaccagcaaaggaatagaaattctacttgaaaaactgagcacataggtggaaagagttaagagcaagatggaatgattttttctgttctctgttctgtttcccaatgcagaaaagaaggggtagggtccaccatactggtaattggggtactctgtatatgtgtttcttctttgtatacgaatctatttatataaattgtttttttaaatggtcttttttaaaaaaaaaaaaaaaaaaaaaaaaaaaaaaaaaaaaaaaaaaaaaaaaaaaaaaaaaaaaaaaaaaaaaaaaaaaaaaaaaaaaaaa

SEQ ID NO: 432 - protein, 508 aa, Homo sapien
MWEILRRKDCDKEKRVKLMSDLQKLIQGKIKTIAFAHDSTRVIQCYIQYGNEEQRKQAFEELRDDLVELSKAKYSRNIVKKFLMYGSKPQIAEIIRSFKGHVRKMLRHAEASAIVEYAYNDKAILEQRNMLTEELYGNTFQLYKSADHPTLDKVLELQPEKLELIMDEMKQILTPMAQKEAVIKHSLVHKVFLDFFTYAPPKLRSEMIEAIREAVVYLAHTHDGARVAMHCLWHGTPKDRKVIVKTMKTYVEKVANGQYSHLVLLAAFDCIDDTKLVKQIIISEIISSLPSIVNDKYGRKVLLYLLSPRDPAHTVREIIEVLQKGDGNAHSKKDTEVRRRELLESISPALLSYLQEHAQEVVLDKSACVLVSDILGSATGDVQPTMNAIASLAATGLHPGGKDGELHIAEHPAGHLVLKWLIEQDKKMKENGREGCFAKTLVEHVGMKNLKSWASVNRGAIILSSLLQSCDLEVANKVKAALKSLIPTLEKTKSTSKGIEILLEKLST

SEQ ID NO: 433 - DNA, 3445 bp, Homo sapien
gagtgactccaccgcccggagcagcggtgcaggacgcgcgtctccgccgcccgcggtgacttctgcctgcgctccttctctgaacgctcacttccgaggagacgccgacgatgaagacaccgtggaaggttcttctgggactgctgggtgctgctgcgcttgtcaccatcatcaccgtgcccgtggttctgctgaacaaaggcacagatgatgctacagctgacagtcgcaaaacttacactctaactgattacttaaaaaatacttatagactgaagttatactccttaagatggatttcagatcatgaatatctctacaaacaagaaaataatatcttggtattcaatgctgaatatggaaacagctcagttttcttggagaacagtacatttgatgagtttggacattctatcaatgattattcaatatctcctgatgggcagtttattctcttagaatacaactacgtgaagcaatggaggcattcctacacagcttcatatgacatttatgatttaaataaaaggcagctgattacagaagagaggattccaaacaacacacagtgggtcacatggtcaccagtgggtcataaattggcatatgtttggaacaatgacatttatgttaaaattgaaccaaatttaccaagttacagaatcacatggacggggaaagaagatataatatataatggaataactgactgggtttatgaagaggaagtcttcagtgcctactctgctctgtggtggtctccaaacggcacttttttagcatatgcccaatttaacgacacagaagtcccacttattgaatactccttctactctgatgagtcactgcagtacccaaagactgtacgggttccatatccaaaggcaggagctgtgaatccaactgtaaagttctttgttgtaaatacagactctctcagctcagtcaccaatgcaacttccatacaaatcactgctcctgcttctatgttgataggggatcactacttgtgtgatgtgacatgggcaacacaagaaagaatttctttgcagtggctcaggaggattcagaactattcggtcatggatatttgtgactatgatgaatccagtggaagatggaactgcttagtggcacggcaacacattgaaatgagtactactggctgggttggaagatttaggccttcagaacctcattttacccttgatggtaatagcttctacaagatcatcagcaatgaagaaggttacagacacatttgctatttccaaatagataaaaaagactgcacatttattacaaaaggcacctgggaagtcatcgggatagaagctctaaccagtgattatctatactacattagtaatgaatataaaggaatgccaggaggaaggaatctttataaaatccaacttagtgactatacaaaagtgacatgcctcagttgtgagctgaatccggaaaggtgtcagtactattctgtgtcattcagtaaagaggcgaagtattatcagctgagatgttccggtcctggtctgcccctctatactctacacagcagcgtgaatgataaagggctgagagtcctggaagacaattcagctttggataaaatgctgcagaatgtccagatgccctccaaaaaactggacttcattattttgaatgaaacaaaattttggtatcagatgatcttgcctcctcattttgataaatccaagaaatatcctctactattagatgtgtatgcaggcccatgtagtcaaaaagcagacactgtcttcagactgaactgggccacttaccttgcaagcacagaaaacattatagtagctagctttgatggcagaggaagtggttaccaaggagataagatcatgcatgcaatcaacagaagactgggaacatttgaagttgaagatcaaattgaagcagccagacaattttcaaaaatgggatttgtggacaacaaacgaattgcaatttggggctggtcatatggagggtacgtaacctcaatggtcctgggatcgggaagtggcgtgttcaagtgtggaatagccgtggcgcctgtatcccggtgggagtactatgactcagtgtacacagaacgttacatgggtctcccaactccagaagacaaccttgaccattacagaaattcaacagtcatgagcagagctgaaaattttaaacaagttgagtacctccttattcatggaacagcagatgataacgttcactttcagcagtcagctcagatctccaaagccctggtcgatgttggagtggatttccaggcaatgtggtatactgatgaagaccatggaatagctagcagcacagcacaccaacatatatatacccacatgagccacttcataaaacaatgtttctctttaccttagcacctcaaaataccatgccatttaaagcttattaaaactcatttttgttttcattatctcaaaactgcactgtcaagatgatgatgatctttaaaatacacactcaaatcaagaaacttaaggttacctttgttcccaaatttcatacctatcatcttaagtagggacttctgtcttcacaacagattattaccttacagaagtttgaattatccggtcgggttttattgtttaaaatcatttctgcatcagctgctgaaacaacaaataggaattgtttttatggaggctttgcatagattccctgagcaggattttaatctttttctaactggactggttcaaatgttgttctcttctttaaagggatggcaagatgtgggcagtgatgtcactagggcagggacaggataagagggattagggagagaagatagcagggcatggctgggaacccaagtccaagcataccaacacgagcaggctactgtcagctcccctcggagaagagctgttcacagccagactggcacagttttctgagaaagactattcaaacagtctcaggaaatcaaatatgcaaagcactgacttctaagtaaaaccacagcagttgaaaagactccaaagaaatgtaagggaaactgccagcaacgcaggcccccaggtgccagttatggctataggtgctacaaaaacacagcaagggtgatgggaaagcattgtaaatgtgcttttaaaaaaaaatactgatgttcctagtgaaagaggcagcttgaaactgagatgtgaacacatcagcttgccctgttaaaagatgaaaatatttgtatcacaaatcttaacttgaaggagtccttgcatcaatttttcttatttcatttctttgagtgtcttaattaaaagaatattttaacttccttggactcattttaaaaaatggaacataaaatacaatgttatgtattattattcccattctacatactatggaatttctcccagtcatttaataaatgtgccttcattttttc

SEQ ID NO: 434 - protein, 766 aa, Homo sapien
MKTPWKVLLGLLGAAALVTIITVPVVLLNKGTDDATADSRKTYTLTDYLKNTYRLKLYSLRWISDHEYLYKQENNILVFNAEYGNSSVFLENSTFDEFGHSINDYSISPDGQFILLEYNYVKQWRHSYTASYDIYDLNKRQLITEERIPNNTQWVTWSPVGHKLAYVWNNDIYVKIEPNLPSYRITWTGKEDIIYNGITDWVYEEEVFSAYSALWWSPNGTFLAYAQFNDTEVPLIEYSFYSDESLQYPKTVRVPYPKAGAVNPTVKFFVVNTDSLSSVTNATSIQITAPASMLIGDHYLCDVTWATQERISLQWLRRIQNYSVMDICDYDESSGRWNCLVARQHIEMSTTGWVGRFRPSEPHFTLDGNSFYKIISNEEGYRHICYFQIDKKDCTFITKGTWEVIGIEALTSDYLYYISNEYKGMPGGRNLYKIQLSDYTKVTCLSCELNPERCQYYSVSFSKEAKYYQLRCSGPGLPLYTLHSSVNDKGLRVLEDNSALDKMLQNVQMPSKKLDFIILNETKFWYQMILPPHFDKSKKYPLLLDVYAGPCSQKADTVFRLNWATYLASTENIIVASFDGRGSGYQGDKIMHAINRRLGTFEVEDQIEAARQFSKMGFVDNKRIAIWGWSYGGYVTSMVLGSGSGVFKCGIAVAPVSRWEYYDSVYTERYMGLPTPEDNLDHYRNSTVMSRAENFKQVEYLLIHGTADDNVHFQQSAQISKALVDVGVDFQAMWYTDEDHGIASSTAHQHIYTHMSHFIKQCFSLP

SEQ ID NO: 435 - DNA, 2593 bp, Homo sapien
gtggggacgcaggatggcggcagcagtggcggacgaggcggtggcgcgcgatgtgcagcggttgctagtgcagttccaggatgagggcgggcagctgctgggttccccgttcgacgtgcccgtggacatcaccccggacaggctgcagctcgtgtgcaacgcgctactggcccaggaggatcccctgccactggctttctttgtccacgatgctgagatcgtctcctcactggggaagacgttggagtcccaggcagtggagacagagaaggtcctagacatcatctaccagccacaggctatcttcagagtccgggctgtgactcgctgcaccagctccttggagggtcacagtgaggcagtcatttctgtggccttcagccctacgggaaagtacctggccagtggctctggagacaccaccgtgcgcttctgggatctcagcacagagacaccacatttcacatgcaagggacacagacactgggtccttagtatatcctggtctccagatggcaagaagctggcctcaggctgcaagaatggccagattctcctctgggacccaagcacagggaagcaggtgggcaggaccctcgctggccacagcaagtggatcacaggcctgagctgggagcccctccatgcgaaccctgagtgccgctatgtggccagcagctccaaggatggcagtgtgcggatctgggacacaactgcaggccgctgtgagcgcatcctcaccgggcacacccagtcggtcacctgtctccggtggggaggggacgggcttctctactctgcctcccaggaccgcaccatcaaagtctggagagctcatgacggtgtgctgtgccggactctgcaaggccacggccactgggtgaacaccatggccctcagcactgactatgccctgcgcactggggcctttgaacctgctgaggcctcagttaatccccaagacctccaaggatccttgcaggagttgaaggagagggctctgagccgatacaacctcgtgcggggccagggtccagagaggctggtgtctggctccgacgacttcaccttattcctgtggtccccagcagaggacaaaaagcctctcactcggatgacaggacaccaagctctcatcaaccaggtgctcttctctcctgactcccgcatcgtggctagtgcctcctttgacaagtccatcaagctgtgggatggcaggacgggcaagtacctggcttccctacgcggccacgtggctgccgtgtaccagattgcgtggtcagctgacagtcggctcctggtcagcggcagcagtgacagcacactgaaggtgtgggatgtgaaggcccagaagctggccatggacctgcccggccacgcggatgaggtatatgctgttgactggagtccagatggccagagagtggcaagtggtgggaaggacaaatgcctccggatatggaggagatgagacggcccgaagttctctctgacccccacctcgactcggcctctgccagctgccttccctgccagagaacaaaggctgagatggcagtgcacacaccctccccaccagtggggacctgagaatgcgtgtggcctgctgtcctcgatagaccggaatggggttttcccacagatccccgcctgtggcacaccccagagccagaaatcgaaggtcacaggaagttgtcactgaacttggcccgtgtctgctactctgtaccttgctggtacagacaggggtggtgggcagccaggctctatgagtgggcccctagtgtcagctctgtacagggtcagatcccaggttctatgaccaaataagtaacttaagttttgtgtgttgggttctaattccttgtcctagaatccccatgactcaatcaaggactgtgctaaatgagattgtccagcccccgcccttgcactggactacgccaaaaccacactgaccaggcacttgccttccctctcttcccccgtgttggtaagagagaggccagttgtgatagtggccaaggagaatctagggctgtattgttgtccactgcagtaggcaccggccacatgtgactgctggcatgaaatagaagtgcagttcctccatcgcactgggtaaggcctccagtattggacagcacacagaaaggttttcatcatcaagagagttctgctggtcagccctgctccaggggatgcctctgccttcgcatagcacactgcttgaggccctgccaggcaccaagcactgccctgggcccatgggatagagcggggaaggtgatggctcttccagaggattccctcagatggggaggcagcagtatgagctctgagcagaagtgggtattgttgatacagaggaagttctttgccacgagaactttcaagcagtgaaaggaattcccatcaggactcagaccccaggccgagatcttgccctgaatgtaccctgcctctgctttctcctgcatcccatgctaagcagggtcatggtctgaactactcagattggatttccaaaccatccttgtataaactgctcagaactaaaaaaaaaaaaaaaaaaaaaaaaaaaaaaaaaaaa

SEQ ID NO: 436 - protein, 485 aa, Homo sapien
MAAAVADEAVARDVQRLLVQFQDEGGQLLGSPFDVPVDITPDRLQLVCNALLAQEDPLPLAFFVHDAEIVSSLGKTLESQAVETEKVLDIIYQPQAIFRVRAVTRCTSSLEGHSEAVISVAFSPTGKYLASGSGDTTVRFWDLSTETPHFTCKGHRHWVLSISWSPDGKKLASGCKNGQILLWDPSTGKQVGRTLAGHSKWITGLSWEPLHANPECRYVASSSKDGSVRIWDTTAGRCERILTGHTQSVTCLRWGGDGLLYSASQDRTIKVWRAHDGVLCRTLQGHGHWVNTMALSTDYALRTGAFEPAEASVNPQDLQGSLQELKERALSRYNLVRGQGPERLVSGSDDFTLFLWSPAEDKKPLTRMTGHQALINQVLFSPDSRIVASASFDKSIKLWDGRTGKYLASLRGHVAAVYQIAWSADSRLLVSGSSDSTLKVWDVKAQKLAMDLPGHADEVYAVDWSPDGQRVASGGKDKCLRIWRR

SEQ ID NO: 437 - DNA, 891 bp, Homo sapien
gcgaggcgcccgaagccgtcgcggcggggaccatgttgcttccgaacatcctgctcaccggtacaccaggggttggaaaaaccacactaggcaaagaacttgcgtcaaaatcaggactgaaatacattaatgtgggtgatttagctcgagaagagcaattgtatgatggctatgatgaagagtatgactgtcccattttagatgaagacagagtagttgatgagttagataaccaaatgagagaaggtggagttattgttgattaccatggttgtgatttcttccctgaacgctggtttcatatagtttttgtgctgagaacagataccaatgtattgtacgaaagacttgaaacaaggggttataatgagaagaaactaacagacaatattcagtgtgagatttttcaagttctttatgaagaagccacagcatcctacaaggaagaaatcgtgcatcagctgcccagtaataaaccagaagagctagaaaataatgtagatcagatcttgaaatggattgagcagtggatcaaagatcataactcttgacttataaggctagctacttaataatcactcttgttgatatctctgccgacatcatagaaattgttcaagtgtcagtaacactttattaaaatcatgttgcagaaccagcaggtggatagtatataggtttatgcctgtgtttctttttctccatgagaaagctaaacatgaaatataatgaatatagtattattaaggattgagacaaaaactgtgattttaatacttaaattgctaaagaataaataaatctgacaaaatgggtggatatcttttaagtttattacagaaaaaaatgcagatgatctcttaaaataaaactaaagataaagcaaaaaaa

SEQ ID NO: 438 - protein, 172 aa, Homo sapien
MLLPNILLTGTPGVGKTTLGKELASKSGLKYINVGDLAREEQLYDGYDEEYDCPILDEDRVVDELDNQMREGGVIVDYHGCDFFPERWFHIVFVLRTDTNVLYERLETRGYNEKKLTDNIQCEIFQVLYEEATASYKEEIVHQLPSNKPEELENNVDQILKWIEQWIKDHNS

SEQ ID NO: 439 - DNA, 2545 bp, Homo sapien
atccaatacaggagtgacttggaactccattctatcactatgaagaaaagtggtgttcttttcctcttgggcatcatcttgctggttctgattggagtgcaaggaaccccagtagtgagaaagggtcgctgttcctgcatcagcaccaaccaagggactatccacctacaatccttgaaagaccttaaacaatttgccccaagcccttcctgcgagaaaattgaaatcattgctacactgaagaatggagttcaaacatgtctaaacccagattcagcagatgtgaaggaactgattaaaaagtgggagaaacaggtcagccaaaagaaaaagcaaaagaatgggaaaaaacatcaaaaaaagaaagttctgaaagttcgaaaatctcaacgttctcgtcaaaagaagactacataagagaccacttcaccaataagtattctgtgttaaaaatgttctattttaattataccgctatcattccaaaggaggatggcatataatacaaaggcttattaatttgactagaaaatttaaaacattactctgaaattgtaactaaagttagaaagttgattttaagaatccaaacgttaagaattgttaaaggctatgattgtctttgttcttctaccacccaccagttgaatttcatcatgcttaaggccatgattttagcaatacccatgtctacacagatgttcacccaaccacatcccactcacaacagctgcctggaagagcagccctaggcttccacgtactgcagcctccagagagtatctgaggcacatgtcagcaagtcctaagcctgttagcatgctggtgagccaagcagtttgaaattgagctggacctcaccaagctgctgtggccatcaacctctgtatttgaatcagcctacaggcctcacacacaatgtgtctgagagattcatgctgattgttattgggtatcaccactggagatcaccagtgtgtggctttcagagcctcctttctggctttggaagccatgtgattccatcttgcccgctcaggctgaccactttatttctttttgttcccctttgcttcattcaagtcagctcttctccatcctaccacaatgcagtgcctttcttctctccagtgcacctgtcatatgctctgatttatctgagtcaactcctttctcatcttgtccccaacaccccacagaagtgctttcttctcccaattcatcctcactcagtccagcttagttcaagtcctgcctcttaaataaacctttttggacacacaaattatcttaaaactcctgtttcacttggttcagtaccacatgggtgaacactcaatggttaactaattcttgggtgtttatcctatctctccaaccagattgtcagctccttgagggcaagagccacagtatatttccctgtttcttccacagtgcctaataatactgtggaactaggttttaataattttttaattgatgttgttatgggcaggatggcaaccagaccattgtctcagagcaggtgctggctctttcctggctactccatgttggctagcctctggtaacctcttacttattatcttcaggacactcactacagggaccagggatgatgcaacatccttgtctttttatgacaggatgtttgctcagcttctccaacaataagaagcacgtggtaaaacacttgcggatattctggactgtttttaaaaaatatacagtttaccgaaaatcatataatcttacaatgaaaaggactttatagatcagccagtgaccaaccttttcccaaccatacaaaaattccttttcccgaaggaaaagggctttctcaataagcctcagctttctaagatctaacaagatagccaccgagatccttatcgaaactcattttaggcaaatatgagttttattgtccgtttacttgtttcagagtttgtattgtgattatcaattaccacaccatctcccatgaagaaagggaacggtgaagtactaagcgctagaggaagcagccaagtcggttagtggaagcatgattggtgcccagttagcctctgcaggatgtggaaacctccttccaggggaggttcagtgaattgtgtaggagaggttgtctgtggccagaatttaaacctatactcactttcccaaattgaatcactgctcacactgctgatgatttagagtgctgtccggtggagatcccacccgaacgtcttatctaatcatgaaactccctagttccttcatgtaacttccctgaaaaatctaagtgtttcataaatttgagagtctgtgacccacttaccttgcatctcacaggtagacagtatataactaacaaccaaagactacatattgtcactgacacacacgttataatcatttatcatatatatacatacatgcatacactctcaaagcaaataatttttcacttcaaaacagtattgacttgtataccttgtaatttgaaatattttctttgttaaaatagaatggtatcaataaatagaccattaatcag

SEQ ID NO: 440 - protein, 125 aa, Homo sapien
MKKSGVLFLLGIILLVLIGVQGTPVVRKGRCSCISTNQGTIHLQSLKDLKQFAPSPSCEKIEIIATLKNGVQTCLNPDSADVKELIKKWEKQVSQKKKQKNGKKHQKKKVLKVRKSQRSRQKKTT

SEQ ID NO: 441 - DNA, 2334 bp, Homo sapien
agacacctctgccctcaccatgagcctctggcagcccctggtcctggtgctcctggtgctgggctgctgctttgctgcccccagacagcgccagtccacccttgtgctcttccctggagacctgagaaccaatctcaccgacaggcagctggcagaggaatacctgtaccgctatggttacactcgggtggcagagatgcgtggagagtcgaaatctctggggcctgcgctgctgcttctccagaagcaactgtccctgcccgagaccggtgagctggatagcgccacgctgaaggccatgcgaaccccacggtgcggggtcccagacctgggcagattccaaacctttgagggcgacctcaagtggcaccaccacaacatcacctattggatccaaaactactcggaagacttgccgcgggcggtgattgacgacgcctttgcccgcgccttcgcactgtggagcgcggtgacgccgctcaccttcactcgcgtgtacagccgggacgcagacatcgtcatccagtttggtgtcgcggagcacggagacgggtatcccttcgacgggaaggacgggctcctggcacacgcctttcctcctggccccggcattcagggagacgcccatttcgacgatgacgagttgtggtccctgggcaagggcgtcgtggttccaactcggtttggaaacgcagatggcgcggcctgccacttccccttcatcttcgagggccgctcctactctgcctgcaccaccgacggtcgctccgacggcttgccctggtgcagtaccacggccaactacgacaccgacgaccggtttggcttctgccccagcgagagactctacacccgggacggcaatgctgatgggaaaccctgccagtttccattcatcttccaaggccaatcctactccgcctgcaccacggacggtcgctccgacggctaccgctggtgcgccaccaccgccaactacgaccgggacaagctcttcggcttctgcccgacccgagctgactcgacggtgatggggggcaactcggcgggggagctgtgcgtcttccccttcactttcctgggtaaggagtactcgacctgtaccagcgagggccgcggagatgggcgcctctggtgcgctaccacctcgaactttgacagcgacaagaagtggggcttctgcccggaccaaggatacagtttgttcctcgtggcggcgcatgagttcggccacgcgctgggcttagatcattcctcagtgccggaggcgctcatgtaccctatgtaccgcttcactgaggggccccccttgcataaggacgacgtgaatggcatccggcacctctatggtcctcgccctgaacctgagccacggcctccaaccaccaccacaccgcagcccacggctcccccgacggtctgccccaccggaccccccactgtccacccctcagagcgccccacagctggccccacaggtcccccctcagctggccccacaggtccccccactgctggcccttctacggccactactgtgcctttgagtccggtggacgatgcctgcaacgtgaacatcttcgacgccatcgcggagattgggaaccagctgtatttgttcaaggatgggaagtactggcgattctctgagggcagggggagccggccgcagggccccttccttatcgccgacaagtggcccgcgctgccccgcaagctggactcggtctttgaggagccgctctccaagaagcttttcttcttctctgggcgccaggtgtgggtgtacacaggcgcgtcggtgctgggcccgaggcgtctggacaagctgggcctgggagccgacgtggcccaggtgaccggggccctccggagtggcagggggaagatgctgctgttcagcgggcggcgcctctggaggttcgacgtgaaggcgcagatggtggatccccggagcgccagcgaggtggaccggatgttccccggggtgcctttggacacgcacgacgtcttccagtaccgagagaaagcctatttctgccaggaccgcttctactggcgcgtgagttcccggagtgagttgaaccaggtggaccaagtgggctacgtgacctatgacatcctgcagtgccctgaggactagggctcccgtcctgctttgcagtgccatgtaaatccccactgggaccaaccctggggaaggagccagtttgccggatacaaactggtattctgttctggaggaaagggaggagtggaggtgggctgggccctctcttctcacctttgttttttgttggagtgtttctaataaacttggattctctaaccttt

SEQ ID NO: 442 - protein, 707 aa, Homo sapien
MSLWQPLVLVLLVLGCCFAAPRQRQSTLVLFPGDLRTNLTDRQLAEEYLYRYGYTRVAEMRGESKSLGPALLLLQKQLSLPETGELDSATLKAMRTPRCGVPDLGRFQTFEGDLKWHHHNITYWIQNYSEDLPRAVIDDAFARAFALWSAVTPLTFTRVYSRDADIVIQFGVAEHGDGYPFDGKDGLLAHAFPPGPGIQGDAHFDDDELWSLGKGVVVPTRFGNADGAACHFPFIFEGRSYSACTTDGRSDGLPWCSTTANYDTDDRFGFCPSERLYTRDGNADGKPCQFPFIFQGQSYSACTTDGRSDGYRWCATTANYDRDKLFGFCPTRADSTVMGGNSAGELCVFPFTFLGKEYSTCTSEGRGDGRLWCATTSNFDSDKKWGFCPDQGYSLFLVAAHEFGHALGLDHSSVPEALMYPMYRFTEGPPLHKDDVNGIRHLYGPRPEPEPRPPTTTTPQPTAPPTVCPTGPPTVHPSERPTAGPTGPPSAGPTGPPTAGPSTATTVPLSPVDDACNVNIFDAIAEIGNQLYLFKDGKYWRFSEGRGSRPQGPFLIADKWPALPRKLDSVFEEPLSKKLFFFSGRQVWVYTGASVLGPRRLDKLGLGADVAQVTGALRSGRGKMLLFSGRRLWRFDVKAQMVDPRSASEVDRMFPGVPLDTHDVFQYREKAYFCQDRFYWRVSSRSELNQVDQVGYVTYDILQCPED

SEQ ID NO: 443 - DNA, 887 bp, Homo sapien
tctttggtgacttgtccactccagtgtggcatcatgtggcagctgctcctcccaactgctctgctacttctagtttcagctggcatgcggactgaagatctcccaaaggctgtggtgttcctggagcctcaatggtacagcgtgcttgagaaggacagtgtgactctgaagtgccagggagcctactcccctgaggacaattccacacagtggtttcacaatgagagcctcatctcaagccaggcctcgagctacttcattgacgctgccacagtcaacgacagtggagagtacaggtgccagacaaacctctccaccctcagtgacccggtgcagctagaagtccatatcggctggctgttgctccaggcccctcggtgggtgttcaaggaggaagaccctattcacctgaggtgtcacagctggaagaacactgctctgcataaggtcacatatttacagaatggcaaagacaggaagtattttcatcataattctgacttccacattccaaaagccacactcaaagatagcggctcctacttctgcagggggcttgttgggagtaaaaatgtgtcttcagagactgtgaacatcaccatcactcaaggtttggcagtgtcaaccatctcatcattctctccacctgggtaccaagtctctttctgcttggtgatggtactcctttttgcagtggacacaggactatatttctctgtgaagacaaacatttgaagctcaacaagagactggaaggaccataaacttaaatggagaaaggaccctcaagacaaatgacccccatcccatgggagtaataagagcagtggcagcagcatctctgaacatttctctggatttgcaaccccatcatcctcaggcctctc

SEQ ID NO: 444 - protein, 233 aa, Homo sapien
MWQLLLPTALLLLVSAGMRTEDLPKAVVFLEPQWYSVLEKDSVTLKCQGAYSPEDNSTQWFHNESLISSQASSYFIDAATVNDSGEYRCQTNLSTLSDPVQLEVHIGWLLLQAPRWVFKEEDPIHLRCHSWKNTALHKVTYLQNGKDRKYFHHNSDFHIPKATLKDSGSYFCRGLVGSKNVSSETVNITITQGLAVSTISSFSPPGYQVSFCLVMVLLFAVDTGLYFSVKTNI

SEQ ID NO: 445 - DNA, 3404 bp, Homo sapien
gcagttcagacccccccacacccatcaaagagccgctcctcccccccgcaggcgccttcgccgcctccctcccttcctttcctttccgctcctcttccgacctgtccacccgggaggaagggagctggaaagggggcggaaacctctcccctccaaaaagcacaacaaaactgttcagtgcggaggagccgggttcgcccctgccggacagcggggggctttgttccccgcagttgtttcctgcccatttgacctgtcagctgctggggaaacgctgctgttgacctttggttgaactgctaaggcgattttgctgatttttctttctttttccgcgagggctgtcttttgctcctccaaatgagcccagtccccctcccttctccccaaagcgctccaagagaaagtgccaggaaggggcttgtcccggaaggcctggcggctgagcggggccaggtcctggttaggccaccagggtgggcgtccgcgccattgtttgagcttgtcggcgctggtgggagagatgagggcaattcctctgggacgcaagtcccctcgaatggccggggctggccgggatgttccccgcacggcgctgccctcgagtccccccgatggagagcgcgggcgcgccttccttcgctggcgtccaaacccgggaccagctagaacacagcagggctgggactgggttccagccccacgtggagtctggatttgttttgttgtgttttgctttccttcctggaagaaatcccgaggggaccgccctagagcggcagctccaggacctcggcccttgggcttccgggggtgcagccacttaggccccgctcccggggagagagggattattttttaagatttatccccagggcgcgcggcatttccctgtccctcgtgaatcccgttgagagtcctccctccccaacctcctccatttccccagccagaccgattcgagagccctggagattctgggcgaggctagtgactgggtagtacaggcctctagccccaccattgctctctctgtcttcagttccccaggagggcaatggcatcaaacagcacagctctgggggatgtcaatattgcataccttttctacctaaagggaaaatgactcgcttttctgcttgcaaatatggtagtttctgcttacaaatgtaatacaatgcccatgacagccaaggactggaagcataagttgctaggtcttacaggtgattttttacaatgaagcaaactcactatgttagacaccatttacattggatgtctccaactaacaaaagtaactaaagacagatgtaggtgtaaattgagagtgaaatttgaccctttagaccgtcacaacttccttgggcttatcctgggtgcttataggagaggtgggctccacccacaaaaatggactgctcagaaaaatgagggagagagaaagggtggccactttcccgagccaagaaattccttgaaaaaaaatcagaacatctgaaaccagagagccgatttccttaccgggaggcagttcctggctaacgaagaggaagcacgatgggaagaaaagttcactccaacggaagccagtttgctgaacatagcagatcgcccaggaggactgggagagactgcaaaccagttcgagcccccagcatggcgttaggtgtcagccagctggcaggaaggtccaggtgtctgtgttcagagtctcaaggcggctatgagaggttttcctccgagtacccagaattctgttctaaaaccaaggccctggcagccatcccacccccggttccccccagtgccacagagcccttggacctgggctgcagctcctgtgggaccccactacacgaccaggggggtcctgtggagatccttcccttcctctacctcggcagtgcctaccatgctgcccggagagacatgctggacgccctgggcatcacggctctgttgaatgtctcctcggactgcccaaaccactttgaaggacactatcagtacaagtgcatcccagtggaagataaccacaaggccgacatcagctcctggttcatggaagccatagagtacatcgatgccgtgaaggactgccgtgggcgcgtgctggtgcactgccaggcgggcatctcgcggtcggccaccatctgcctggcctacctgatgatgaagaaacgggtgaggctggaggaggccttcgagttcgttaagcagcgccgcagcatcatctcgcccaacttcagcttcatggggcagctgctgcagttcgagtcccaggtgctggccacgtcctgtgctgcggaggctgctagcccctcgggacccctgcgggagcggggcaagacccccgccacccccacctcgcagttcgtcttcagctttccggtctccgtgggcgtgcactcggcccccagcagcctgccctacctgcacagccccatcaccacctctcccagctgttagagccgccctgggggccccagaaccagagctggctcccagcaagggtaggacgggccgcatgcgggcagaaagttgggactgagcagctgggagcaggcgaccgagctccttccccatcatttctccttggccaacgacgaggccagccagaatggcaataaggactccgaatacataataaaagcaaacagaacactccaacttagagcaataacggctgccgcagcagccagggaagaccttggtttggtttatgtgtcagtttcacttttccgatagaaatttcttacctcatttttttaagcagtaaggcttgaagtgatgaaacccacagatcctagcaaatgtgcccaaccagctttactaaagggggaggaagggagggcaaagggatgagaagacaagtttcccagaagtgcctggttctgtgtacttgtccctttgttgtcgttgttgtagttaaaggaatttcattttttaaaagaaatcttcgaaggtgtggttttcatttctcagtcaccaacagatgaataattatgcttaataataaagtatttattaagactttcttcagagtatgaaagtacaaaaagtctagttacagtggatttagaatatatttatgttgatgtcaaacagctgagcaccgtagcatgcagatgtcaaggcagttaggaagtaaatggtgtcttgtagatatgtgcaaggtagcatgatgagcaacttgagtttgttgccactgagaagcaggcgggttgggtgggaggaggaagaaagggaagaattaggtttgaattgctttttaaaaaaaaaagaaaagaaaaagacagcatctcactatgttgccaaggctcatcttgagaagcaggcgggttgggtgggaggaggaagaaagggaagaattaggtttgaattgcttttttaaaaaaaaa

SEQ ID NO: 446 - protein, 303 aa, Homo sapien
MGRKVHSNGSQFAEHSRSPRRTGRDCKPVRAPSMALGVSQLAGRSRCLCSESQGGYERFSSEYPEFCSKTKALAAIPPPVPPSATEPLDLGCSSCGTPLHDQGGPVEILPFLYLGSAYHAARRDMLDALGITALLNVSSDCPNHFEGHYQYKCIPVEDNHKADISSWFMEAIEYIDAVKDCRGRVLVHCQAGISRSATICLAYLMMKKRVRLEEAFEFVKQRRSIISPNFSFMGQLLQFESQVLATSCAAEAASPSGPLRERGKTPATPTSQFVFSFPVSVGVHSAPSSLPYLHSPITTSPSC

SEQ ID NO: 447 - DNA, 1311 bp, Homo sapien
tcttgccttccggcccggcgcccgatttccgccttccgacccagctgtgggctgcgccccacgccagcccgcgccccgcatggctgccgccggggccaggcctgtggagctgggcttcgccgagtcggcgccggcgtggcgactgcgcagcgagcagttccccagcaaggtgggcgggcggccggcatggctgggcgcggccgggctgccggggccccaggccctggcctgcgagctgtgcggccgcccgctctccttcctgctgcaggtgtatgcgccgctgcctggccgcccggacgccttccaccgctgcatcttcctcttctgctgccgcgagcagccgtgctgtgccggcctgcgagtttttaggaatcaactacccaggaaaaacgatttttactcatatgagccaccttctgagaatcctcccccagaaacaggagaatcagtgtgtctccagcttaagtctggtgctcatctctgcagggtttgtggctgtttaggccccaaaacgtgctccagatgccacaaagcatattactgcagcaaggagcatcagaccctagactggagattgggacataagcaggcttgtgcacaaccagatcatctggaccatataattccagaccacaacttcctttttccagaatttgaaattgtaatagaaacagaagatgagattatgcctgaggttgtggaaaaggaagattactcagagattatagggagcatgggtgaagcacttgaggaagaactggattccatggcaaaacatgaatccagggaagataaaatttttcagaagtttaaaactcagatagcccttgaaccagaacagattcttagatatggcagaggtattgcccccatctggatttctggtgaaaatattcctcaagaaaaggatattccagattgcccctgtggtgccaagagaatattggaattccaggtcatgcctcagctcctaaactacctgaaggctgacagactgggcaagagcattgactggggcatcctggctgtcttcacctgtgctgagagctgcagcttgggtactggctatacagaagaatttgtgtggaagcaggatgtaacagatacaccgtaaaggcatcttaaagccttgaaaaatgttaataatcttttataccttgcaattccatttctgggattttatcctaaggaaatacttataccaaaaatagaggtgcagagatgttgacagattgcttacacagtgtctacttattagtgaaacaaaagtgtccagtgacagggaattaaataaattttggtacatccaca

SEQ ID NO: 448 - protein, 344 aa, Homo sapien
MAAAGARPVELGFAESAPAWRLRSEQFPSKVGGRPAWLGAAGLPGPQALACELCGRPLSFLLQVYAPLPGRPDAFHRCIFLFCCREQPCCAGLRVFRNQLPRKNDFYSYEPPSENPPPETGESVCLQLKSGAHLCRVCGCLGPKTCSRCHKAYYCSKEHQTLDWRLGHKQACAQPDHLDHIIPDHNFLFPEFEIVIETEDEIMPEVVEKEDYSEIIGSMGEALEEGLDSMAKHESREDKIFQKFKTQIALEPEQILRYGRGIAPIWISGENIPQEKDIPDCPCGAKRILEFQVMPQLLNYLKADRLGKSIDWGILAAFTCAESCSLGTGYTEEFVWKQDVTDTP

SEQ ID NO: 449 - DNA, 768 bp, Homo sapien
ccttcagcataaaagctgatccacaaacaagaggagcaccagacctcctcttggcttcgagatggcttcgccacaccaagagcccaaacctggagacctgattgagattttccgccttggctatgagcactgggccctgtatataggagatggctacgtgatccatctggctcctccaagtgagtaccccggggctggctcctccagtgtcttctcagtcctgagcaacagtgcagaggtgaaacgggggcgcctggaagatgtggtgggaggctgttgctatcgggtcaacaacagcttggaccatgagtaccaaccacggcccgtggaggtgatcatcagttctgcgaaggagatggttggtcagaagatgaagtacagtattgtgagcaggaactgtgagcactttgtcgcccagctgagatatggcaagtcccgctgtaaacaggtggaaaaggccaaggttgaagtcggtgtggccacggcgcttggaatcctggttgttgctggatgctcttttgcgattaggagataccaaaaaaaagcaacagcctgaagcagccacaaaatcctgtgttagaagcagctgtgggggtcccagtggagatgagcctcccccatgcctccagcagcctgaccctcgtgccctgtctcaggcgttctctagatcctttcctctgtttccctctctcgctggcaaaagtatgatctaattgaaacaagactgaaggatcaataaacagccatctgccccttcaaaaaaaaaaa

SEQ ID NO: 450 - protein, 164 aa, Homo sapien
MASPHQEPKPGDLIEIFRLGYEHWALYIGDGYVIHLAPPSEYPGAGSSSVFSVLSNSAEVKRGRLEDVVGGCCYRVNNSLDHEYQPRPVEVIISSAKEMVGQKMKYSIVSRNCEHFVAQLRYGKSRCKQVEKAKVEVGVATALGILVVAGCSFAIRRYQKKATA

SEQ ID NO: 451 - DNA, 10709 bp, Homo sapien
agggggcggcgctcccggcccatcccttagccccgcggcggccgtgtgggccggaggctgcctgcaccgcgtcagggaggccggcctagaaaccctccctcccagaagaaagccgatcccagttcaggtggggtcttcctcggttgcgtacctggctggagccgagctggtgggcggccggcagccggcgtttctggtgatgacagccccgaaatgaaagcagcgcggccgccgcctccgagggctgcagggagatcagcgtccagcaaataagaagcaagtcctggacccggaggaggaggagcggccgagcatctctctctgctccgccgtgtcctttagatgagcactcccggccggagccggaggtggatccgcagagctgcctctgggcgcctgaccccgcgctgacatcacaacctgtgacaggcgcatcacgcccggtacctgctcccggccgctgcccgtcctcccagcctctttgtatgccgcagacatggccagccagcaggattcgggcttctttgagatcagtatcaaatatttactgaaatcctggagtaatacttctcccgttggcaacggttacatcaagcctccggttccacctgcttctggcacgcacagggagaaagggccgccaaccatgctacccatcaatgtggacccagacagtaaaccaggagaatatgtcctcaaaagtttatttgtcaacttcaccactcaggctgaacgcaagattcgtatcattatggcagagcccctggaaaagccattgacgaaatctctgcaacgtggagaagacccccaatttgatcaggtcatcagctcaatgagctccctttctgagtactgcctgccttccattctacgtacattatttgactggtataaaaggcaaaatggcattgaggatgaatcacatgaatacagaccaagaacaagcaataaatcaaaaagcgatgaacaacagcgagattatttaatggaaagacgggacctcgccattgattttattttttctttagtattaatagaagttttgaaacagattccacttcatcctgtaatagacagtttaatacatgatgttattaacttggctttcaagcactttaaatacaaagaagggtaccttggtcccaacactggcaatatgcatattgtggcagacctgtatgcagaagtcattggagtgttggcacaagccaaattccctgctgtaaagaagaaatttatggcggagctaaaagaattacggcacaaagagcagaacccatatgtggttcaaagcattatcagcttaataatgggcatgaaattctttcgaattaagatgtatccagtggaggattttgaggcctctcttcagtttatgcaggaatgtgcacattacttcctcgaggtcaaagacaaagatatcaagcatgccttggctgggctttttgttgaaatacttgttccagttgctgctgctgttaaaaatgaagtaaatgttccctgccttagaaattttgtggaaagcctgtatgacaccacgctggaactttcttctcgaaagaagcattccttggccttgtaccccctggtgacctgtttgctctgtgtcagtcagaagcagctgttcctgaacaggtggcacattttcctcaacaactgcttgtccaaccttaaaaacaaagatcccaagatggctcgagttgcactggaatctctctacagattactttgggtttacatgattcgaattaaatgtgaaagcaacacagctactcagagccgacttataaccatcatcacaacacttttccccaaagggtcccgcggtgtggtaccaagggacatgcctctgaacatctttgtgaaaatcatccagttcattgcccaggaacgtttagattttgcaatgaaagaaatcattttcgattttctttgtgtgggaaaaccagcaaaagcattcagtctcaacccagagagaatgaacattggtttacgggcattcttggtcatagctgatagcttgcagcagaaagatggggaacctcccatgccggttacaggagccgttcttccttcaggaaacacgttaagagtaaagaaaacatatttgagtaaaacactaactgaagaggaagccaaaatgataggcatgtccttatattactctcaagtacgaaaagctgtagacaacattttaaggcaccttgataaagaagtaggaaggtgtatgatgctgactaatgtacagatgttaaacaaagaaccggaagacatgatcacgggtgagagaaagccaaaaatagatcttttcaggacctgtgttgctgctattcctcgactgcttcctgatgggatgtcaaaacttgaacttattgacttactggctaggctctctattcatatggatgatgaattgcgacatattgcacaaaattctcttcagggtttacttgttgacttctcagattggagggaagatgtactatttggctttaccaacttcctgctccgggaagtaaatgatatgcatcacacactccttgattcgtccctgaagttgctgctgcagctgctcacccagtggaaactagtcatccagacacaaggaaaagtctatgaacaagccaacaaaatcagaaattcagagctcatcgcaaatggctccagtcacagaattcagtcggaacgaggtccccactgcagtgtactccacgctgtagaaggttttgctctggttttactctgcagtttccaggtggccacacgcaaactgtccgttttaatactcaaggaaattcgagcgttgtttattgccctggggcagcctgaggatgacgacaggccgatgattgatgtcatggatcagctaagttcttccattctagaaagttttattcatgtagcagtttcggattcagcaacattaccactcacccacaatgtggatctgcagtggttggtggaatggaacgcagtcctggtcaatagccattatgatgtgaaaagcccttcccatgtctggatatttgcacagtctgtcaaagacccctgggtcctctgcctcttcagcttcctccggcaggagaacttacccaagcactgccccacagccctcagctatgcctggccttatgccttcactcggctccagtcggtgatgcctctggtggacccaaatagcccaattaatgccaagaaaaccagcactgccggcagcggagacaactatgttactttgtggagaaattacctaattctttgttttggagttgcaaaacccagtattatgagcccaggacacttaagagcttccactccagaaataatggcgaccacacctgatggtacagtgagctacgataacaaggccataggcaccccatcggtgggagttctgttaaagcagttggtgcctttgatgagactagagagcattgagatcacagagtccttagttttaggatttggaagaacaaattcccttgttttcagagaattggtagaagaacttcatccattaatgaaagaagctctggaaagaagaccagagaacaagaaacgccgagaacggcgagacttgttaaggctacaactacttcgaatttttgaacttttggctgatgctggtgtaataagtgacagcacaaatggagccctagagcgggatactttagccctgggagctttgttcttagaatatgtggacttgacccgcatgctcctagaagctgaaaatgacaaagaagttgaaattcttaaagatatccgggcacattttagtgcaatggtggccaacttgattcagtgtgttccagttcaccaccgaagatttctcttcccccagcaaagtctgaggcaccaccttttcatcttattcagccagtgggcaggacccttcagcattatgttcactcctctggatcgttacagtgacagaaatcatcagattacaagatatcagtattgtgcattaaaagcaatgtcagcagtactgtgctgtggccctgtctttgacaatgtgggcctttccccagatggctacctatataaatggcttgacaacattctggcttgtcaagatttacgagttcatcaacttggctgcgaagttgttgtcttgctactggaacttaatcctgaccaaataaatctttttaactgggcaattgaccgatgctacacaggttcctaccaacttgcatctggctgcttcaaagccatagcaactgtgtgtggaagcaggaactatcccttcgacatagtgacattgttaaaccttgttctattcaaggcctctgacaccaacagagagatttatgaaatctccatgcagctcatgcagatccttgaagcaaagctttttgtatactcaaagaaagtcgctgagcaaagaccgggaagtattctctatggaacacacggcccgctgccacccctctacagcgtgtcactcgccctcttgtcatgtgagctggccaggatgtaccctgagctcacactccccctcttctcaggtaagccagcgattccccacaacacaccccaacgggcgccagatcatgcttacctacctgctgccctggctgcacaacatcgagctggtggacagcaggctcctcctcccgggtcgagccccagcagcccagaggacgaagtcaaggaccgggaaggtgacgtgactgcttctcacgggctgagaggaaatggctggggctctccagaagccacgtcactggtcctgaacaacctcatgtacatgacggccaagtatggagatgaagttcctgggccagaaatggaaaatgcttggaatgctttagccaacaatgagaaatggagcaacaacctgaggatcaccttgcagttcctgattagcctctgtggggtcagcagcgacacagttctcctaccctatattaaaaaagtggcaatatacttgtgccgtaacaacaccattcaaaccatggaagagcttctctttgagctgcagcagacagaacccgtgaaccccatcgtccagcattgtgacaacccgcccttctaccgcttcacggccagtagcaaggcttccgcagcagcctcaggaaccacctctagcagcaatacagtggttgctggccaggaaaatttcccagatgctgaggagaacaagatattgaaagaatctgatgaaaggtttagtaatgtcatcagagcccacactcgcctcgagtcaagatacagcaatagctctggaggatcctacgatgaagataaaaatgatccaatttctccctacacgggctggttgctgactattacagagaccaagcagccgcagcccttaccgatgccttgtactggaggatgctgggcccccctggttgactatctcccggagaccatcactccccgggggccactccacaggtgcaatattgctgtaatttttatgactgaaatggtggtggatcacagtgtacgagaagactgggcgcttcatctaccattattacttcatgctgtcttcttaggtttagaccactaccggcctgaagtctttgaacacagcaaaaaactgcttcttcacctcttgattgccctctcttgcaacagcaatttccattccattgcttccgtgctcctgcagacccgagagatgggtgaagctaagactctaaccgtgcagccagcctaccaacctgaatatctctatacaggtggctttgacttcctgagagaggaccagtcatccccggtgcctgactcagggcttagttcaagctccacctcctctagcatcagtctgggaggcagcagtggaaacctcccacagatgacccaggaggtagaagatgtggacacagctgctgaaacagatgagaaggcaaacaagctcattgagtttctcacgaccagggcatttggtccactttggtgccatgaagacatcacacctaaaaatcaaaattcaaagagtgctgaacagctcactaattttctacgtcacgttgtatctgtatttaaagattccaaatcaggcttccatctggagcaccagttgagtgaagttgcattgcagacagccctcgcaagctcttcaaggcactatgctggtcggtccttccagatattccgggccctcaagcaacctctgtcagcacatgccttatctgaccttctctcaagattggtggaggtgataggagaacatggagatgagattcagggttatgtaatggaagcgctcctaaccttggaggcggctgtggataacttgtctgactgcttgaagaacagtgacctcctaactgtattgtcccgctcttcctcaccagatttaagctccagcagtaaactaacagcaagcagaaagagcacaggacaactaaacatgaacccgggaaccaccagcggcaacaccgcaactgccgaacggagccggcatcaacgaagcttctctgtgcccaagaagtttggtgtcatcgaccgatcctctgacccacctcgaagtgccacactggacagaattcaggcttgtacccaacaaggcctctcctcaaaaaccagaagctcatcctccttgaaggacagtctcacggacccatcccacataaaccatcccaccaacctgctggccaccatattctgggtcacagtggccttgatggagtctgattttgagtttgaatacttaatggccttaaggctgttgagcagactactggcacatatgccactcgataaggctgagaaccgagaaaagcttgagaaactccaggcacagctgaagtgggccgacttctccgggctgcagcagctgctgctgaaaggattcacatccctcaccaccacagacctgaccctgcagctcttcagtctgctgacaccagtgtccaaaatatccatggtggatgcatcccacgctattgggtttccactgaatgtcttgtgtctcctgcctcagctgattcagcattttgaaaatcccaatcagttctgtaaggatatagccgaaaggattgctcaggtttgtttagaagagaagaaccccaaactttcaaatcttgcacatgtcatgactctttataaaacgcacagctacacgagggactgtgccacgtgggtcaatgtggtctgtcgataccttcatgaagcatatgctgacattaccttgaatatggttacctacctggcagagctgctggagaagggcctccctagtgtgcagcagcccctgctccaggtgatctacagtcttctcagctacatggacctttctgtcgttcctgtcaaacagttcaatgtggaagttctgaagacaattgaaaaatatgtgcaaagtgttcactggagagaagctctgaatatcttgaagctggtagtttctcggtcagccagccttgttttaccttcataccagcacagtgacctctcaaaaatagaaatacatcgagtgtggactagtgcttccaaggaattacctgggaaaaccctggacttccacttcgatatttcggagactccaatcatcgggaggcggtatgatgagctgcagaattcttctgggcgtgatgggaagcccagggccatggccgtcacccggagcacatcttccacttcctcaggctccaactccaacgtccttgttccagtgagctggaaaaggccccagtattctcagaagagaacaaaagagaagttggtacatgtcctttctctgtgtggccaagaagtaggattgagcaaaaatccatcagtgattttttcatcgtgtggggatctggatctgcttgagcaccagacaagcttggtatcttctgaggacggtgcccgagagcaggagaacatggatgacacaaacagcgagcagcagtttagagtcttcagagacttcgacttcctagatgtggagctggaggatggagagggtgagagtatggacaatttcaactggggagtgcgcagacgttctctggacagcctggataagtgtgatatgcagattctggaggagcgccaactgtcaggaagcactcctagcctgaataaaatgcaccatgaggactccgatgaatcatccgaggaggaggacctcacagccagccagatcctggagcactcagacctaatcatgactctctccccctctgaagagacgaatcccatggagctgctcaccacagcctgtgactcgacccctgcagaacctcattcctttaacaccagaatgtccagctttgatgcttccttgcctgatatgaataatctgcagatttctgagggttcaaaggctgaagctgttcgtgaggaggaggacaccaccgtgcatgaggatgatctttctagttccatcaatgaactcccagcagcttttgaatgcagcgacagctttagcctggacatgactgagggggaagaaaaaggcaatcgggcactggaccagtttaccctggcgagctttggagaaggtgacaggggagtctctccccctccctcgcccttcttctcagccatccttgccgcctttcagcccgcagcctgtgacgatgccgaggaggcctggcgcagccacatcaaccagcttatgtgtgactcagatggctcctgtgctgtgtatacatttcatgtgttctcctccttgtttaagaatattcagaaaaggttctgcttcctaacctgtgatgcagccagttaccttggagataacctccggggaatcggatccaaatttgtcagctcttcccagatgctcacctcctgctctgaatgtcctacactttttgtggatgccgagactctcctttcatgtggacttctggacaagctcaagttcagtgtgttagaactgcaagaatatttggatacctacaacaacaggaaagaggccacactctcttggcttgcaaattgtaaggcaacatttgcagggggatcaagagatggagtaattacctgtcaaccaggggactccgaagaaaagcaattggaactgtgtcagagattatataagctacacttccagctgctattgctttttcagtcctactgtaagctcatcggccaggtgcacgaagttagctccatgccagagctgctgaatatgtccagggaactgagtgacctaaagaaacacctgaaggaagccagtgcagtcattgcagctgaccctctctattcagacggcgcgtggtccgagcccaccttcacgtccactgaagcagccatccagtccatgctggagtgcctgaagaacaacgaactcggcaaagctttgcggcagatcagggagtgcagaagtctgtggcccaatgacatctttggaagcagttctgatgatgaggtccagacactactgaatatttatttccgtcaccaaactctgggacagacgggtacttatgccctggtggggtctaaccagagcctgaccgagatctgcaccaagctgatggagctgaacatggagatccgggacatgatccgcagggcccagagttaccgagtcctcactacttttcttccagactccagtgtttctggcactagtctctgacaggagcctcctgtccccactgggttccaaactgcagtgctgccatgctggggcaacgtcattcagtgtcttctcggccttcaaaaggcttggacagactgttctccctcttgttacctgtagggctttttctaaagaggatggcagaacttccaacgtgtagcaatactataagaaccaaggtagcttagaacgtcctggacagactccactcatcatgctgtgtggcacaaatgtgttacatttgaccgagcatatgcaactcgctactgaagaagtgacttccgttgcataccaaagccgactacactgaacagtaccttcctttctagaaacaattttagattggcaaaagtgcaatgttttcttcactcaaaaaattttatattctcaaacatgtatattctttccctgtcttgttccattttcttttcttttttcttttttctttttcctttctttcgtgggctgagaaaggggcaggcaaaatgaagctggccactgaaaactgtaagatggtcaaaagctgacagcctgtgtatgtgaaaagggaattgtaaatggactgcaatgtaatgtacactgtaatttgaatacaattactgtatctaaaaggagctgctatgaagtacctttcttatgttgctaggctactgtttctgaaagccctggatctctttgcaccaaaaatggtccagatagactctttttaaggatcttggctgctttttactagaaggttgcttttatgagcatatttatactgctgaaggatgagtgttaattttaattaactttgccgttttgtagagaaaactattcacaagataaattccaagtcttttcacctgtcaggcatgcatattttaatatctgtttggatagtcagaagtagaatcataaaggtaaaatatgagttgttactttgtttcttcgatgtcatattttatgtgtaatatatatgtaaagggccattcttaagttctctccttaaacttaatgctgtcaagtgttagatgtgtgcatgtgaacttgttgcactgcagaaacatattcagagtttatctatgtaacttattcactctgtaaatacatttaaagtttttgtgatgtaagcttaattgatattctgttcagaactttctttagactaaaaaaaaaaaaaaaagacaaa

SEQ ID NO: 452 - protein, 2000 aa, Homo sapien
MASQQDSGFFEISIKYLLKSWSNTSPVGNGYIKPPVPPASGTHREKGPPTMLPINVDPDSKPGEYVLKSLFVNFTTQAERKIRIIMAEPLEKPLTKSLQRGEDPQFDQVISSMSSLSEYCLPSILRTLFDWYKRQNGIEDESHEYRPRTSNKSKSDEQQRDYLMERRDLAIDFIFSLVLIEVLKQIPLHPVIDSLIHDVINLAFKHFKYKEGYLGPNTGNMHIVADLYAEVIGVLAQAKFPAVKKKFMAELKELRHKEQNPYVVQSIISLIMGMKFFRIKMYPVEDFEASLQFMQECAHYFLEVKDKDIKHALAGLFVEILVPVAAAVKNEVNVPCLRNFVESLYDTTLELSSRKKHSLALYPLVTCLLCVSQKQLFLNRWHIFLNNCLSNLKNKDPKMARVALESLYRLLWVYMIRIKCESNTATQSRLITIITTLFPKGSRGVVPRDMPLNIFVKIIQFIAQERLDFAMKEIIFDFLCVGKPAKAFSLNPERMNIGLRAFLVIADSLQQKDGEPPMPVTGAVLPSGNTLRVKKTYLSKTLTEEEAKMIGMSLYYSQVRKAVDNILRHLDKEVGRCMMLTNVQMLNKEPEDMITGERKPKIDLFRTCVAAIPRLLPDGMSKLELIDLLARLSIHMDDELRHIAQNSLQGLLVDFSDWREDVLFGFTNFLLREVNDMHHTLLDSSLKLLLQLLTQWKLVIQTQGKVYEQANKIRNSELIANGSSHRIQSERGPHCSVLHAVEGFALVLLCSFQVATRKLSVLILKEIRALFIALGQPEDDDRPMIDVMDQLSSSILESFIHVAVSDSATLPLTHNVDLQWLVEWNAVLVNSHYDVKSPSHVWIFAQSVKDPWVLCLFSFLRQENLPKHCPTALSYAWPYAFTRLQSVMPLVDPNSPINAKKTSTAGSGDNYVTLWRNYLILCFGVAKPSIMSPGHLRASTPEIMATTPDGTVSYDNKAIGTPSVGVLLKQLVPLMRLESIEITESLVLGFGRTNSLVFRELVEELHPLMKEALERRPENKKRRERRDLLRLQLLRIFELLADAGVISDSTNGALERDTLALGALFLEYVDLTRMLLEAENDKEVEILKDIRAHFSAMVANLIQCVPVHHRRFLFPQQSLRHHLFILFSQWAGPFSIMFTPLDRYSDRNHQITRYQYCALKAMSAVLCCGPVFDNVGLSPDGYLYKWLDNILACQDLRVHQLGCEVVVLLLELNPDQINLFNWAIDRCYTGSYQLASGCFKAIATVCGSRNYPFDIVTLLNLVLFKASDTNREIYEISMQLMQILEAKLFVYSKKVAEQRPGSILYGTHGPLPPLYSVSLALLSCELARMYPELTLPLFSGKPAIPHNTPQRAPDHAYLPAALAAQHRAGGQQAPPPGSSPSSPEDEVKDREGDVTASHGLRGNGWGSPEATSLVLNNLMYMTAKYGDEVPGPEMENAWNALANNEKWSNNLRITLQFLISLCGVSSDTVLLPYIKKVAIYLCRNNTIQTMEELLFELQQTEPVNPIVQHCDNPPFYRFTASSKASAAASGTTSSSNTVVAGQENFPDAEENKILKESDERFSNVIRAHTRLESRYSNSSGGSYDEDKNDPISPYTGWLLTITETKQPQPLPMPCTGGCWAPLVDYLPETITPRGPLHRCNIAVIFMTEMVVDHSVREDWALHLPLLLHAVFLGLDHYRPEVFEHSKKLLLHLLIALSCNSNFHSIASVLLQTREMGEAKTLTVQPAYQPEYLYTGGFDFLREDQSSPVPDSGLSSSSTSSSISLGGSSGNLPQMTQEVEDVDTAAETDEKANKLIEFLTTRAFGPLWCHEDITPKNQNSKSAEQLTNFLRHVVSVFKDSKSGFHLEHQLSEVALQTALASSSRHYAGRSFQIFRALKQPLSAHALSDLLSRLVEVIGEHGDEIQGYVMEALLTLEAAVDNLSDCLKNSDLLTVLSRSSSPDLSSSSKLTASRKSTGQLNMNPGTTSGNTATAERSRHQRSFSVPKKFGVIDRSSDPPRSA

SEQ ID NO: 453 - DNA, 696 bp, Homo sapien
ttccccccccccccccccccccccgcccgagcacaggacacagctgggttctgaagcttctgagttctgcagcctcacctctgagaaaacctcttttccaccaataccatgaagctctgcgtgactgtcctgtctctcctcatgctagtagctgccttctgctctccagcgctctcagcaccaatgggctcagaccctcccaccgcctgctgcttttcttacaccgcgaggaagcttcctcgcaactttgtggtagattactatgagaccagcagcctctgctcccagccagctgtggtattccaaaccaaaagaagcaagcaagtctgtgctgatcccagtgaatcctgggtccaggagtacgtgtatgacctggaactgaactgagctgctcagagacaggaagtcttcagggaaggtcacctgagcccggatgcttctccatgagacacatctcctccatactcaggactcctctccgcagttcctgtcccttctcttaatttaatcttttttatgtgccgtgttattgtattaggtgtcatttccattatttatattagtttagccaaaggataagtgtcctatggggatggtccactgtcactgtttctctgctgttgcaaatacatggataacacatttgattctgtgtgttttccataataaaactttaaaataaaatgcagacagtta

SEQ ID NO: 454 - protein, 92 aa, Homo sapien
MKLCVTVLSLLMLVAAFCSPALSAPMGSDPPTACCFSYTARKLPRNFVVDYYETSSLCSQPAVVFQTKRSKQVCADPSESWVQEYVYDLELN

SEQ ID NO: 455 - DNA, 604 bp, Homo sapien
ccacgcgtccgcgctgcgccacatcccaccggcccttacactgtggtgtccagcagcatccggcttcatggggggacttgaaccctgcagcaggctcctgctcctgcctctcctgctggctgtaagtggtctccgtcctgtccaggcccaggcccagagcgattgcagttgctctacggtgagcccgggcgtgctggcagggatcgtgatgggagacctggtgctgacagtgctcattgccctggccgtgtacttcctgggccggctggtccctcgggggcgaggggctgcggaggcagcgacccggaaacagcgtatcactgagaccgagtcgccttatcaggagctccagggtcagaggtcggatgtctacagcgacctcaacacacagaggccgtattacaaatgagcccgaatcatgacagtcagcaacatgatacctggatccagccattcctgaagcccaccctgcacctcattccaactcctaccgcgatacagacccacagagtgccatccctgagagaccagaccgctccccaatactctcctaaaataaacatgaagcacaaaaaaaaaaaaaaaaaaaaaaaaaaaaaaaaaa

SEQ ID NO: 456 - protein, 113 aa, Homo sapien
MGGLEPCSRLLLLPLLLAVSGLRPVQAQAQSDCSCSTVSPGVLAGIVMGDLVLTVLIALAVYFLGRLVPRGRGAAEAATRKQRITETESPYQELQGQRSDVYSDLNTQRPYYK

SEQ ID NO: 457 - DNA, 1521 bp, Homo sapien
gaattccgccgctgctacacgcctggtgggcagcatgtcggcaacagcggctgctcgtaagcggggaaagccggcctctggggccggggctggcgcgggggccggcaagcggcggcgaaaggccgactctgcgggggacaggggcaaatccaagggtggcggcaagatgaatgaggagatctccagcgactctgagagcgagagcctagctccaaggaagcctgaggaggaggaggaggaggagctggaggaaactgcacaggaaaagaagctgcgcttggccaagctctacctagagcagctccgtcagcaagaggaggagaaggctgaggcccgtgcatttgaggaggaccaggtggcggggcgcctgaaggaggatgtgcttgagcagaggggcaggctgcagaagttggtggcaaaagagatccaggccccagcctcagctgacattcgcgttttacgggggcaccagctctctatcacatgtttggtcgtcacccccgatgactcagccatcttctctgctgccaaagactgcagcatcattaagtggagcgtggagagtggacggaagctgcatgtgattcctcgagccaagaagggtgccgagggaaagccccctggccacagcagccacgtcctctgcatggccatctcctccgacggcaagtaccttgcctctggtgaccgcagcaagctcattctcatttgggaggcccagagctgccagcacttgtacaccttcacaggacaccgggatgcagtgtcgggtctggcattccgcagaggcacccaccagctctacagcacatcccacgatcgctccgtgaaggtgtggaatgtggcagagaactcctacgtggagacgctcttcggacaccaggacgctgtggctgcactggatgccttgagccgggagtgctgtgtgacggctgggggccgggatgggactgtacgtgtgtggaagatccccgaggagtcccagcttgtcttctatggccaccagggctccatcgactgcatccacctaatcaatgaggagcacatggtgtccggcgcggacgatggctctgtggccttgtggggtctctccaagaagcgaccacttgccctgcagcgtgaagctcacgggctgcggggagagccaggcctggagcagcccttctggatatcgtcggtggcagccctcctcaacacagaccttgtggccacaggctcccacagctcctgtgtgcggctttggcagtgtggggaaggcttccggcagcttgaccttctctgtgacatccccctggtgggttttatcaacagcctcaagttctccagctctggggacttcctggtggctggggtagggcaggagcacaggcttggccgatggtggagaatcaaagaggctcggaattctgtctgcatcatcccactccgcagggtccctgtacccccagctgctggttcctgacactcttatcctccttatttaagtccttcccaggctatgccccaccctctttgaagctt

SEQ ID NO: 458 - protein, 475 aa, Homo sapien
MSATAAARKRGKPASGAGAGAGAGKRRRKADSAGDRGKSKGGGKMNEEISSDSESESLAPRKPEEEEEEELEETAQEKKLRLAKLYLEQLRQQEEEKAEARAFEEDQVAGRLKEDVLEQRGRLQKLVAKEIQAPASADIRVLRGHQLSITCLVVTPDDSAIFSAAKDCSIIKWSVESGRKLHVIPRAKKGAEGKPPGHSSHVLCMAISSDGKYLASGDRSKLILIWEAQSCQHLYTFTGHRDAVSGLAFRRGTHQLYSTSHDRSVKVWNVAENSYVETLFGHQDAVAALDALSRECCVTAGGRDGTVRVWKIPEESQLVFYGHQGSIDCIHLINEEHMVSGADDGSVALWGLSKKRPLALQREAHGLRGEPGLEQPFWISSVAALLNTDLVATGSHSSCVRLWQCGEGFRQLDLLCDIPLVGFINSLKFSSSGDFLVAGVGQEHRLGRWWRIKEARNSVCIIPLRRVPVPPAAGS

SEQ ID NO: 459 - DNA, 3490 bp, Homo sapien
cgggagagcggcagcgggaccccagcgcgggcggcggcggctgggcgggagcccagagggcaggaactgctgccacaacctcaggctggacaccaaacacccgtgcccgccaatgcggcccagcccccggagagtcaggcccacagagcatgcccatgtgggccggcggtgtggggagccctcggcggggcatggcccctgcgtccacagatgacctctttgcccgcaagctgcgccacccagcaaggcccccgctgacaccgcacacctttgagccgaggccagtccggggcccactcctgcgcagggcagcgaatgcaggcgaggccaggccccccacgccagccagcccccgtgcccgtgcccacagccacgaagaggccagccgacctgcagccacttccacccggctcttcactgacccgcaggcactgctggggctgccagcagaggaaccagagcctgccttcccaccagtgcttgagcctcgatggtttgcccactatgacgtgcaaagcctgctctttgattgggctccgaggtctcaggggatggggagccactcagaggccagctctgggaccctggcttcagccgaggaccaggctgccagctcggacctgctgcatggggcacctggctttgtgtgtgagctcgggggtgagggtgagctaggcctgggtggaccagcatccccacctgtgccccctgcactgcccaacgcggccgtgtccatcctggaggagccacagaaccgaacctcggcctacagcctggagcacgcagacctgggtgctggctactaccgcaaatacttctatggcaaagaacatcagaacttcttcgggatggacgagtcgctgggcccggtggcagtgagcctgcggcgggaggagaaggagggcagcggagggggcaccctgcacagctaccgcgtcatcgtgcggaccacgcagctccggacactccgtggcaccatctcggaggacgcgctgccgccggggcccccacggggtctgtccccaaggaaacttctggagcacgtggcgccgcagctgagccccagctgcctgcgcctgggctcagcttcacccaaggtaccacggacgctgctcacactggatgagcaagtgctgagcttccaacgcaaggtgggcatcctgtactgccgggcaggccagggctcggaggaggagatgtacaacaaccaggaggcgggaccggccttcatgcagtttctcaccttgctgggcgatgtggtgcggctcaaaggctttgagagttaccgggcccagctagacaccaaaacggattccacaggcacgcactccctctacaccacataccaggaccacgagatcatgttccacgtgtccacgatgctgccttacacccctaataaccagcagcagctcctccggaagcgccacattggcaacgacattgtgaccatcgtgttccaggagcctggcagcaagcccttctgccccaccaccatccgctcgcacttccagcacgtgttcctagtggtgcgggcacacacaccctgcaggccacacaccacctacagggtggccgtgagccgcacccaggacacccctgccttcgggccagctctgcctgctggcggaggccccttcgcagccaacgccgacttccgggccttcctgctggccaaagcgctgaatggtgagcaggcggccggccacgcgcgccagttccacgccatggccacgcgcacccgccagcagtacctgcaagacctggccaccaacgaggtgaccactacgtcgctggactcggcttcacgcttcggcctgccctccctgggtgggaggcgccgggcggcccctcggggcccaggcgccgagctgcaggcagcgggctcactggtgtggggagtgcgcgcggcgcccggggcgcgggtcgccgccggggctcaggcgagcggccccgaaggcatcgaggtgccctgcctgctgggcatctcggccgaggctctggtgctggtggcgccgcgcgacggccgcgtagtgttcaattgcgcctgtcgcgacgtgctggcctggaccttctccgagcagcagctggacctgtaccacggccgcggggaggcgatcacgctgcgcttcgacgggtcccccggccaagccgtgggcgaggtggtggcgcgcctgcagctggtgagccgtggctgcgagacccgcgagctggcgctgccccgcgacggtcaaggccgcctgggcttcgaggtggacgccgagggattcgtcacgcacgtggagcgcttcacattcgccgagacggcggctgcggccggggcgcgcctcctgcgcgtgtgcggccagacgctgcccagcctccggcccgaggccgctgcccagctcctgcgctcggcgcccaaggtctgcgtcaccgtcctgccccccgacgagagcggccggccccgcaggagtttttcggagctgtacacgctgtcgctgcaggacgctagccggcggggggccccagatcctgtgcaggatgaggtccagggggtgaccctgctgcccaccacaaagcagctgctgcacctgtgcctgcaagatggtggcagtcctccagggcctggggatctggccgaggagaggactgagttcctgcacagccagaactcgctgtcaccacgcagctctctgtcggatgaggccccagtcctgcccaacaccaccccggacctcctcctggccaccacagccaagccatcagtacccagtgctgacagtgagacacccctgacccaggacaggccaggcagtcccagtggctctgaggacaagggcaacccggcgccggagctcagggcctcctttctgccacgtaccttgtctctgcggaactccatcagcaggatcatgtcggaggcgggcagtgggaccctggaggacgagtggcaggccatctcggagattgcctctacttgcaacaccattctggagtcgctgtcccgagagggacagcccatcccagagagtggagaccctaagggaactccaaaatctgatgctgagccagagcctgggaacctctcagagaaggtctctcacttggagtccatgctcaggaagctgcaggaggacctgcagaaggagaaggcggacagggcggccctggaggaggaggtgcggagcctgagacacaacaaccggcggctgcaggcggagtctgagagtgcagccacacgcctcctcctggcctccaagcagctgggctcacccaccgccgacctggcctgagccgtctggaaccacctgggcccctggagggcactgtggtcacactgggccctcctcaggaactctccctgcgcagaggcgtgtcttagcactgcccccctccctagcccccttatttggtggcggaagtggcctccaccccttccctgtttgtaaatattctgtgaagaaaagaggacttcagggagtaaaaaagccactgatgtctgtgtctg

SEQ ID NO: 460 - protein, 1041 aa, Homo sapien
MPMWAGGVGSPRRGMAPASTDDLFARKLRHPARPPLTPHTFEPRPVRGPLLRRAANAGEARPPTPASPRARAHSHEEASRPAATSTRLFTDPQALLGLPAEEPEPAFPPVLEPRWFAHYDVQSLLFDWAPRSQGMGSHSEASSGTLASAEDQAASSDLLHGAPGFVCELGGEGELGLGGPASPPVPPALPNAAVSILEEPQNRTSAYSLEHADLGAGYYRKYFYGKEHQNFFGMDESLGPVAVSLRREEKEGSGGGTLHSYRVIVRTTQLRTLRGTISEDALPPGPPRGLSPRKLLEHVAPQLSPSCLRLGSASPKVPRTLLTLDEQVLSFQRKVGILYCRAGQGSEEEMYNNQEAGPAFMQFLTLLGDVVRLKGFESYRAQLDTKTDSTGTHSLYTTYQDHEIMFHVSTMLPYTPNNQQQLLRKRHIGNDIVTIVFQEPGSKPFCPTTIRSHFQHVFLVVRAHTPCRPHTTYRVAVSRTQDTPAFGPALPAGGGPFAANADFRAFLLAKALNGEQAAGHARQFHAMATRTRQQYLQDLATNEVTTTSLDSASRFGLPSLGGRRRAAPRGPGAELQAAGSLVWGVRAAPGARVAAGAQASGPEGIEVPCLLGISAEALVLVAPRDGRVVFNCACRDVLAWTFSEQQLDLYHGRGEAITLRFDGSPGQAVGEVVARLQLVSRGCETRELALPRDGQGRLGFEVDAEGFVTHVERFTFAETAAAAGARLLRVCGQTLPSLRPEAAAQLLRSAPKVCVTVLPPDESGRPRRSFSELYTLSLQDASRRGAPDPVQDEVQGVTLLPTTKQLLHLCLQDGGSPPGPGDLAEERTEFLHSQNSLSPRSSLSDEAPVLPNTTPDLLLATTAKPSVPSADSETPLTQDRPGSPSGSEDKGNPAPELRASFLPRTLSLRNSISRIMSEAGSGTLEDEWQAISEIASTCNTILESLSREGQPIPESGDPKGTPKSDAEPEPGNLSEKVSHLESMLRKLQEDLQKEKADRAALEEEVRSLRHNNRRLQAESESAATRLLLASKQLGSPTADLA

SEQ ID NO: 461 - DNA, 627 bp, Homo sapien
agtctccggcgagttgttgcctgggctggacgtggttttgtctgctgcgcccgctcttcgcgctctcgtttcattttctgcagcgcgccacgaggatggcccacaagcagatctactactcggacaagtacttcgacgaacactacgagtaccggcatgttatgttacccagagaactttccaaacaagtacctaaaactcatctgatgtctgaagaggagtggaggagacttggtgtccaacagagtctaggctgggttcattacatgattcatgagccagaaccacatattcttctctttagacgacctcttccaaaagatcaacaaaaatgaagtttatctggggatcgtcaaatctttttcaaatttaatgtatatgtgtatataaggtagtattcagtgaatacttgagaaatgtacaaatctttcatccatacctgtgcatgagctgtattcttcacagcaacagagctcagttaaatgcaactgcaagtaggttactgtaagatgtttaagataaaagttcttccagtcagtttttctcttaagtgcctgtttgagtttactgaaacagtttacttttgttcaataaagtttgtatgttgcatttaaaaaaaaaaaaaaa

SEQ ID NO: 462 - protein, 79 aa, Homo sapien
MAHKQIYYSDKYFDEHYEYRHVMLPRELSKQVPKTHLMSEEEWRRLGVQQSLGWVHYMIHEPEPHILLFRRPLPKDQQK

SEQ ID NO: 463 - DNA, 649 bp, Homo sapien
cgtgtcagtggtggacctgacctgctcctggccccttggctggccgggctgtttctggccatgggtcgctcccgccggacaggcgcgcaccgagcgcactctctagcccggcagatgaaggcgaagcggcggcggccggacttggatgagattcaccgcgagctgcggcctcagggatccgcacgaccccagcccgacccaaacgccgagttcgaccccgacctgccagggggcggtctgcaccgctgtctggcctgcgcgaggtacttcatcgattccaccaacctgaagacccacttccgatccaaagaccacaagaaaaggctgaagcagctgagcgtcgagccctacagtcaggaagaggcggagagggcagcgggtatgggatcctatgtgccccccaggcggctggcagtgcccacggaagtgtccactgaggtccctgagatggatacctctacctgacatggcctgaagatgcagggcagaggaattgcccatggacagtgacgcaaggactaggctgggagggagcgtgccaaccccttttgcctctgggtttggggagcggagggcctcttcttggtgccctgcccccaataaaggaactggacaaagagaaaaaaaaaaaaaaaaaaaaaaaaaaaaa

SEQ ID NO: 464 - protein, 116 aa, Homo sapien
MKAKRRRPDLDEIHRELRPQGSARPQPDPNAEFDPDLPGGGLHRCLACARYFIDSTNLKTHFRSKDHKKRLKQLSVEPYSQEEAERAAGMGSYVPPRRLAVPTEVSTEVPEMDTST

SEQ ID NO: 465 - DNA, 1061 bp, Homo sapien
ctctgttttctcaaagctgaagtcggctaggtttgcaaagctgtgggctgagcactcaggcaatcacactctcagaaactgcggcggctctggactgcagcctcccaaggctccatgccagacaaagcatgcgtgtcacacttgctacaatagcctggatggtttcttttgtctccaattattcacacacagcaaatattttgccagatatcgaaaatgaagatttcatcaaagactgcgttcgaatccataacaagttccgatcagaggtgaaaccaacagccagtgatatgctatacatgacttgggacccagcactagcccaaattgcaaaagcatgggccagcaattgccagttttcacataatacacggctgaagccaccccacaagctgcacccaaacttcacttcactgggagagaacatctggactgggtctgtgcccattttttctgtgtcttccgccatcacaaactggtatgacgaaatccaggactatgacttcaagactcggatatgcaaaaaagtctgtggccactacactcaggttgtttgggcagatagttacaaagttggctgcgcagttcaattttgccctaaagtttctggctttgacgctctttccaatggagcacattttatatgcaactacggaccaggagggaattacccaacttggccatataagagaggagccacctgcagtgcctgccccaataatgacaagtgtttggacaatctctgtgttaaccgacagcgagaccaagtgaaacgttactactctgttgtatatccaggctggcccatatatccacgtaacagatacacttctctctttctcattgttaattcagtaattctaatactgtctgttataattaccattttggtacagctcaagtaccctaatttagttcttttggactaatacaattcaggaaagaaaaaacccaaaaaccaacctcattcacatatggcttttttttaaccaataacaattaggtgtacttctattttaaaacatttcagaaaaaaatatatgttatagcaatactcttac

SEQ ID NO: 466 - protein, 266 aa, Homo sapien
MRVTLATIAWMVSFVSNYSHTANILPDIENEDFIKDCVRIHNKFRSEVKPTASDMLYMTWDPALAQIAKAWASNCQFSHNTRLKPPHKLHPNFTSLGENIWTGSVPIFSVSSAITNWYDEIQDYDFKTRICKKVCGHYTQVVWADSYKVGCAVQFCPKVSGFDALSNGAHFICNYGPGGNYPTWPYKRGATCSACPNNDKCLDNLCVNRQRDQVKRYYSVVYPGWPIYPRNRYTSLFLIVNSVILILSVIITILVQLKYPNLVLLD

SEQ ID NO: 467 - DNA, 4604 bp, Homo sapien
ggaacagcttgtccacccgccggccggaccagaagcctttgggtctgaagtgtctgtgagacctcacagaagagcacccctgggctccacttacctgccccctgctccttcagggatggaggcaatggcggccagcacttccctgcctgaccctggagactttgaccggaacgtgccccggatctgtggggtgtgtggagaccgagccactggctttcacttcaatgctatgacctgtgaaggctgcaaaggcttcttcaggcgaagcatgaagcggaaggcactattcacctgccccttcaacggggactgccgcatcaccaaggacaaccgacgccactgccaggcctgccggctcaaacgctgtgtggacatcggcatgatgaaggagttcattctgacagatgaggaagtgcagaggaagcgggagatgatcctgaagcggaaggaggaggaggccttgaaggacagtctgcggcccaagctgtctgaggagcagcagcgcatcattgccatactgctggacgcccaccataagacctacgaccccacctactccgacttctgccagttccggcctccagttcgtgtgaatgatggtggagggagccatccttccaggcccaactccagacacactcccagcttctctggggactcctcctcctcctgctcagatcactgtatcacctcttcagacatgatggactcgtccagcttctccaatctggatctgagtgaagaagattcagatgacccttctgtgaccctagagctgtcccagctctccatgctgccccacctggctgacctggtcagttacagcatccaaaaggtcattggctttgctaagatgataccaggattcagagacctcacctctgaggaccagatcgtactgctgaagtcaagtgccattgaggtcatcatgttgcgctccaatgagtccttcaccatggacgacatgtcctggacctgtggcaaccaagactacaagtaccgcgtcagtgacgtgaccaaagccggacacagcctggagctgattgagcccctcatcaagttccaggtgggactgaagaagctgaacttgcatgaggaggagcatgtcctgctcatggccatctgcatcgtctccccagatcgtcctggggtgcaggacgccgcgctgattgaggccatccaggaccgcctgtccaacacactgcagacgtacatccgctgccgccacccgcccccgggcagccacctgctctatgccaagatgatccagaagctagccgacctgcgcagcctcaatgaggagcactccaagcagtaccgctgcctctccttccagcctgagtgcagcatgaagctaacgccccttgtgctcgaagtgtttggcaatgagatctcctgactaggacagcctgtgcggtgcctgggtggggctgctcctccagggccacgtgccaggcccggggctggcggctactcagcagccctcctcacccgtctggggttcagcccctcctctgccacctcccctatccacccagcccattctctctcctgtccaacctaacccctttcctgcgggcttttccccggtcccttgagacctcagccatgaggagttgctgtttgtttgacaaagaaacccaagtgggggcagagggcagaggctggaggcaggccttgcccagagatgcctccaccgctgcctaagtggctgctgactgatgttgagggaacagacaggagaaatgcatccattcctcagggacagagacacctgcacctccccccactgcaggccccgcttgtccagcgcctagtggggtctccctctcctgccttactcacgataaataatcggcccacagctcccaccccacccccttcagtgcccaccaacatcccattgccctggttatattctcacgggcagtagctgtggtgaggtgggttttcttcccatcactggagcaccaggcacgaacccacctgctgagagacccaaggaggaaaaacagacaaaaacagcctcacagaagaatatgacagctgtccctgtcaccaagctcacagttcctcgccctgggtctaaggggttggttgaggtggaagccctccttccacggatccatgtagcaggactgaattgtccccagtttgcagaaaagcacctgccgacctcgtcctccccctgccagtgccttacctcctgcccaggagagccagccctccctgtcctcctcggatcaccgagagtagccgagagcctgctcccccaccccctccccaggggagagggtctggagaagcagtgagccgcatcttctccatctggcagggtgggatggaggagaagaattttcagaccccagcggctgagtcatgatctccctgccgcctcaatgtggttgcaaggccgctgttcaccacagggctaagagctaggctgccgcaccccagagtgtgggaagggagagcggggcagtctcgggtggctagtcagagagagtgtttgggggttccgtgatgtagggtaaggtgccttcttattctcactccaccacccaaaagtcaaaaggtgcctgtgaggcaggggcggagtgatacaacttcaagtgcatgctctctgcaggtcgagcccagcccagctggtgggaagcgtctgtccgtttactccaaggtgggtctttgtgagagtgagctgtaggtgtgcgggaccggtacagaaaggcgttcttcgaggtggatcacagaggcttcttcagatcaatgcttgagtttggaatcggccgcattccctgagtcaccaggaatgttaaagtcagtgggaacgtgactgccccaactcctggaagctgtgtccttgcacctgcatccgtagttccctgaaaacccagagaggaatcagacttcacactgcaagagccttggtgtccacctggccccatgtctctcagaattcttcaggtggaaaaacatctgaaagccacgttccttactgcagaatagcatatatatcgcttaatcttaaatttattagatatgagttgttttcagactcagactccatttgtattatagtctaatatacagggtagcaggtaccactgatttggagatatttatggggggagaacttacattgtgaaacttctgtacattaattattattgctgttgttattttacaagggtctagggagagacccttgtttgattttagctgcagaactgtattggtccagcttgctcttcagtgggagaaaaacacttgtaagttgctaaacgagtcaatcccctcattcaggaaaactgacagaggagggcgtgactcacccaagccatatataactagctagaagtgggccaggacaggccgggcgcggtggctcacgcctgtaatcccagcagtttgggaggtcgaggtaggtggatcacctgaggtcgggagttcgagaccaacctgaccaacatggagaaaccctgtctctattaaaaatacaaaaaaaaaaaaaaaaaaaaatagccgggcatggtggcgcaagcctgtaatcccagctactcaggaggctgaggcagaagaattgaacccaggaggtggaggttgcagtgagctgagatcgtgccgttactctccaacctggacaacaagagcgaaactccgtcttagaagtggaccaggacaggaccagattttggagtcatggtccggtgtccttttcactacaccatgtttgagctcagacccccactctcattccccaggtggctgacccagtccctgggggaagccctggatttcagaaagagccaagtctggatctgggaccctttccttccttccctggcttgtaactccaccaagcccatcagaaggagaaggaaggagactcacctctgcctcaatgtgaatcagaccctaccccaccacgatgtgccctggctgctgggctctccacctcaggccttggataatgctgttgcctcatctataacatgcatttgtctttgtaatgtcaccaccttcccagctctccctctggccctgcttcttcggggaactcctgaaatatcagttactcagccctgggccccaccacctaggccactcctccaaaggaagtctaggagctgggaggaaaagaaaagaggggaaaatgagtttttatggggctgaacggggagaaaaggtcatcatcgattctactttagaatgagagtgtgaaatagacatttgtaaatgtaaaacttttaaggtatatcattataactgaaggagaaggtgccccaaaatgcaagattttccacaagattcccagagacaggaaaatcctctggctggctaactggaagcatgtaggagaatccaagcgaggtcaacagagaaggcaggaatgtgtggcagatttagtgaaagctagagatatggcagcgaaaggatgtaaacagtgcctgctgaatgatttccaaagagaaaaaaagtttgccagaagtttgtcaagtcaaccaatgtagaaagctttgcttatggtaataaaaatggctcatacttatatagcacttactttgtttgcaagtactgctgtaaataaatgctttatgcaaacc

SEQ ID NO: 468 - protein, 427 aa, Homo sapien
MEAMAASTSLPDPGDFDRNVPRICGVCGDRATGFHFNAMTCEGCKGFFRRSMKRKALFTCPFNGDCRITKDNRRHCQACRLKRCVDIGMMKEFILTDEEVQRKREMILKRKEEEALKDSLRPKLSEEQQRIIAILLDAHHKTYDPTYSDFCQFRPPVRVNDGGGSHPSRPNSRHTPSFSGDSSSSCSDHCITSSDMMDSSSFSNLDLSEEDSDDPSVTLELSQLSMLPHLADLVSYSIQKVIGFAKMIPGFRDLTSEDQIVLLKSSAIEVIMLRSNESFTMDDMSWTCGNQDYKYRVSDVTKAGHSLELIEPLIKFQVGLKKLNLHEEEHVLLMAICIVSPDRPGVQDAALIEAIQDRLSNTLQTYIRCRHPPPGSHLLYAKMIQKLADLRSLNEEHSKQYRCLSFQPECSMKLTPLVLEVFGNEIS

SEQ ID NO: 469 - DNA, 1472 bp, Homo sapien
ccggagcggggatcaccttaacttgactgtggtcccccagccctccaagaaatgcccataaaccaaggaggagagggtaaaaaatagaagaatacatggaattggggagaagaatgggaaaaaagatgggagtgactgcataatgtcagcattttgtgcttttggctcagcatttggattggatggaggattttcatcctgaaaccagccctccgtcgccaccgaccatggaataattgtcttccacgaaactcttccctggtgccaaaaagggttttatgtatatatttgagagctccacatccctggatctgaatcctccacttcccactggaaccatgcccctcccagtcccgtttctcccctctaggggatggaggctgagagaccccaggaagaagaggatggtgagcagggcccccctcaggatgaggaaggctggccccctccaaactccaccactcggccttggcgatctgctcctccatcccctcctcctccagggacccgccacacagccctgggaccccgctcggcctccctgctctccctgcagactgaactccttctggacctggtggctgaagcccagtcccgccgcctggaggagcagagggccaccttctacaccccccaaaacccctcaagcctagcccctgccccactccgtcctctcgaggacagagaacagctttacagcactatcctcagtcaccagtgccagcggatggaagcccagcggtcagagcctcccctccctccaggggggcaagagctcctggagttgctgctgagagttcagggtgggggtcgaatggaggagcaaaggtcccggccccccacacacacctgctgagacttgagccccaaccagcccttccttgccactggtctcaaagctgggcagcccattgcatgccctcaactcttgcttggcaggggtaccagagactgaaagacacggcacaaatctcaatattcatctcccacatcaccttccctgggaactggacagggtgaaagtcctcaaactctgggaacaggcgagatggaacagggatttaactccccgcccacaggtccatgggagcttgaggcagtaagggggatcccaggcacccatctcaaggagtggctgggagtcttttccctaacttgtggggacaccaccagttgtcaagctactaggcagtagggtctgagggctcaggcctccacctgagaggttataacctgagagacagctctacccttcctcccagtaagaagggaaggtgggtgggcacctgagagattaagactattctcccagtcccactaccagcacccccgatccctgagactgaggggtttacgggctgtgaatggaccttcagccctgcccaccctccctccccactgctgctgagtctgtctgatgttttggttgtgtgaataaatataattcccctctggaaaaaaaaaaaaaaaaa

SEQ ID NO: 470 - protein, 160 aa, Homo sapien
MEAERPQEEEDGEQGPPQDEEGWPPPNSTTRPWRSAPPSPPPPGTRHTALGPRSASLLSLQTELLLDLVAEAQSRRLEEQRATFYTPQNPSSLAPAPLRPLEDREQLYSTILSHQCQRMEAQRSEPPLPPGGQELLELLLRVQGGGRMEEQRSRPPTHTC

SEQ ID NO: 471 - DNA, 1885 bp, Homo sapien
cgggcactcaccgtgtgtagttggcatctccgcgcgtccggacacccgatcccagcatccctgcctgcaggactgttcgtgttcagctcgcgtcctgcagctgtccgaggtgctccagttggaggctgaggttcccgggctctgtcgctgagtgggcggcggcaccggcggagatgcctgggaagaaggcgcgcaagaacgctcaaccgagccccgcgcgggctccagcagagctggaagtcgagtgtgctactcaactcaggagatttggagacaaactgaacttccggcagaaacttctgaatctgatatccaaactcttctgctcaggaacctgactgcatcaaaaacttgcatgaggggactccttcaaaagagttttctcaggaggtgcacgtttcatcaatttgaagaaagactgcattgtaattgagaggaatgtgaaggtgcattcatgggtgcccttggaaacggaagatggaatacatcaaagtgaatttctgttcaagttttcccagattatcattctttgggatgagagaacattataaaaccactttgtttattttaaagcaagaatggaagacccttgaaaataaagaagtaattattgacacatttcttttttacttagagaatcgttctagtgtttttgccgaagattaccgctggcctactgtgaaggtagatgacctgtgattagactgggcggctggggagaaacagttcagtgcattgttgttgttgctgtttttggtgttttgcttttcagtgccaactcagcacattgtatatgattcggtttatacatattaccttgttataatgaaaaaactcattctgagaacactgaaatgttatactcagtgttgatttcttcggtcactacacaacgtaaaatcatttgtttcttttgactcaaattgtattgcttctgttcagatgatctttcattcaatgtgttcctgttgggcgttactagaaactatggaaaactggaaaataactttgaaaaaattggataaagtataggagggttacttggggccagtaaatcagtagactgaacattcaatataataaaagaacatggggattttgtataaccagggataataaaaagaaaaagaagttaatttttaattgatgtttttgaaacttagtagaacaaatattcagaagtaacttgataagatatgaatgtttctaaagagtttctaaaggttcgaaatgctccttgtcacattagtgtgcatcctacaaaaagtgatctcttaatgtaaattaagaatattttcataattggaatatacttttcttaaaaaaaaggaacagttagttctcatctagaatgaaagttccatatatgcattggtgaatatatatgtatacacatacttacatacttatatgggtatctgtatagataatttgtattagagtattatatagcttcttagtagggtctcaagtaagttcattttttttatctgggctatatacagtcctcaaataaataatgtcttgattttatttcagcaggaataattttatttattttgcctatttataattaaagtatttttctttagtttgaaatgtgtattaaagttacatttttgagttacaagagtcttataactacttgaatttttagttaaaatgtcttaatgtaggttgtagtcactttagatggaaaattacctcacatctgttttcttcagtattacttaagattgtttatttagtggtagagagattttttttttcagcctagaggcagctattttaccatctggtatttatggtctaatttgtatttaaacatatgcacacatataaaagttgatactgtggcagtaaactattaaaagttttcactgtt

SEQ ID NO: 472 - protein, 54 aa, Homo sapien
MPGKKARKNAQPSPARAPAELEVECATQLRRFGDKLNFRQKLLNLISKLFCSGT

SEQ ID NO: 473 - DNA, 4132 bp, Homo sapien
gatgacggtctcagcctcctcccgaccccttcctgcgcgtccgctcttcccctgcgcccgcccgcgcccctccgcccgcgccccggccccgccccaggcctcgcctccgcttcgccgccgccgccggccgcagccaggagcagcagccgcgcctgcagaccggcctcgcggagcccgcgcgccgagccccacaatggcttattcagaagagcataaaggtatgccctgtggtttcatccgccagaattccggcaactccatttccttggactttgagcccagtatagagtaccagtttgtggagcggttggaagagcgctacaaatgtgccttctgccactcggtgcttcacaacccccaccagacaggatgtgggcaccgcttctgccagcactgcatcctgtccctgagagaattaaacacagtgccaatctgccctgtagataaagaggtcatcaaatctcaggaggtttttaaagacaattgttgcaaaagagaagtcctcaacttatatgtatattgcagcaatgctcctggatgtaatgccaaggttattctgggccggtaccaggatcaccttcagcagtgcttatttcaacctgtgcagtgttctaatgagaagtgccgggagccagtcctacggaaagacctgaaagagcatttgagtgcatcctgtcagtttcgaaaggaaaaatgcctttattgcaaaaaggatgtggtagtcatcaatctacagaatcatgaggaaaacttgtgtcctgaatacccagtattttgtcccaacaattgtgcgaagattattctaaaaactgaggtagatgaacacctggctgtatgtcctgaagctgagcaagactgtccttttaagcactatggctgtgctgtaacggataaacggaggaacctgcagcaacatgagcattcagccttacgggagcacatgcgtttggttttagaaaagaatgtccaattagaagaacagatttctgacttacacaagagcctagaacagaaagaaagtaaaatccagcagctagcagaaactataaagaaacttgaaaaggagttcaagcagtttgcacagttgtttggcaaaaatggaagcttcctcccaaacatccaggtttttgccagtcacattgacaagtcagcttggctagaagctcaagtgcatcaattattacaaatggttaaccagcaacaaaataaatttgacctgagacctttgatggaagcagttgatacagtgaaacagaaaattaccctgctagaaaacaatgatcaaagattagccgttttagaagaggaaactaacaaacatgatacccacattaatattcataaagcacagctgagtaaaaatgaagagcgatttaaactgctggagggtacttgctataatggaaagctcatttggaaggtgacagattacaagatgaagaagagagaggcggtggatgggcacacagtgtccatcttcagccagtccttctacaccagccgctgtggctaccggctctgtgctagagcatacctgaatggggatgggtcagggagggggtcacacctgtccctatactttgtggtcatgcgaggagagtttgactcactgttgcagtggccattcaggcagagggtgaccctgatgcttctggaccagagtggcaaaaagaacattatggagaccttcaaacctgaccccaatagcagcagctttaaaagacctgatggggagatgaacattgcatctggctgtccccgctttgtggctcattctgttttggagaatgccaagaacgcctacattaaagatgacactctgttcttgaaagtggccgtggacttaactgacctggaggatctctagtcactgttatggggtgataagaggacttcttggggccagaactgtggaggagagcacatttgattatcatattgacctggatttagactcaaagcacatttgtatttgcctttttccttaacgtttgaagtcagtttaaaacttctgaagtgctgtctttttacattttactctgtcccagtttgaaacttaaaactcttagaatattctcttattatttatatttttatatttcttgaaagatggtaagtttcttgaagtttttggggcgtttctcttttactggtgcttagcgcagtgtctcgggcactctaaatattgagtgttatggaggacacagaggtagcagaatcccagttgaaaatgttttgatattttattgtttggcctattgattctagacctggccttaagtctgcaaaagccatctttataaggtaggctgttccagttaagaagtgggtgatgtagttacaaagataatatgctcagtttggacctttttttcagttaaatgctaaatatatgaaaattactatacctctaagtattttcatgaaattcaccagcagtttgcaagcacagttttgcaaggctgcataagaactggtgaatggggtaagcattttcattcttcctgctgaagtaaagcagaaagtactgcatagtatatgagatatagccagctagctaaagttcagattttgttaggttcaaccctatgaaaaaaactattttcataggtcaaaaatggtaaaaaattagcagtttcataagattcaaccaaataaatatatatatacacacacacatacatatacacctatatatgtgtgtatacaaacagttcgaatgtattttggtgacagtaataaatcaatgtgaggatggatagaatttagtatatgatagagaaaatgtcataaatggataaaaggaatttacaacttgaggagaaaacctttacaatttcctatgggtgtcagaagtactctcagcgaaaactgatggctaaaacagtatctactattctctgataactttttttttgagacagagtttcattgtcacccaggctggagtacagtggcatgatctcagctcactgcaaactctgcctcccgaattcaagtgattctcctgcctcagcctcctgagtagctgggattacaggcgcccgtcaccacacccaggtaatttttgtatttttagtagagacggagttttgccatgttggccaagctgatctcaaactcctgacctcaagtgatctgcccgcctcggcctcccaaagtgctgagattacaggcatgacccaccgcgtcaagcctctgacaactattgaatttgtaagctgctatgcaaatgggcatttatataaacttgtgatgtttcttgtcagaattctgagtactctgtgaagaacagaaatgatcatattcttatgcatctatctgtatgggtctgaaggtgtatatacaaactgagatgagtccttatgactcttgataagcctgagtttaacaacaacaaaaatgccaagttgtcctgagcccttctgcgttgttatgccacttccctactgctcatatgcacgctggctcccctgggcacgcaaggatgagtatgggccatgggcccctgtagagctgcttacctggtgatgaccatgcaccttacaatttctgaacagttaaccctatagaagcatgctttatatgagtgtcttctgggaagaggaaccttcttaatctcttctgtgggattttcaaaatgctaaagactcacactgcagcaatcatcccagatgattaaattcaaagaaataggttcacaacaggaatatactgaagaactagagtgtcactgctggtgaactgtggcacggttgctcaacacatcacctcggacaaattcaggaagcatttctttagcccacaagtccagacccaggtgctctgtatgtttgtttttaatattcatcatatccaagttcactctgtcttcctgagcagtggaagatcatattgctgtaacttcttttaagtagttgatgtggaaaacattttaaagtgaatttgtcaaaatgctggttttgtgttttatccaacttttgtgcatatatataaagtatgtcatggcatggtttgcttaggagttcagagttccttcatcatcgaaatagtgattaagtgatcccagaacaaggaatactagagtaaaaagcacctctttttcacaaaaaaaaaaaaaaaaaaaaaaaaa

SEQ ID NO: 474 - protein, 557 aa, Homo sapien
MAYSEEHKGMPCGFIRQNSGNSISLDFEPSIEYQFVERLEERYKCAFCHSVLHNPHQTGCGHRFCQHCILSLRELNTVPICPVDKEVIKSQEVFKDNCCKREVLNLYVYCSNAPGCNAKVILGRYQDHLQQCLFQPVQCSNEKCREPVLRKDLKEHLSASCQFRKEKCLYCKKDVVVINLQNHEENLCPEYPVFCPNNCAKIILKTEVDEHLAVCPEAEQDCPFKHYGCAVTDKRRNLQQHEHSALREHMRLVLEKNVQLEEQISDLHKSLEQKESKIQQLAETIKKLEKEFKQFAQLFGKNGSFLPNIQVFASHIDKSAWLEAQVHQLLQMVNQQQNKFDLRPLMEAVDTVKQKITLLENNDQRLAVLEEETNKHDTHINIHKAQLSKNEERFKLLEGTCYNGKLIWKVTDYKMKKREAVDGHTVSIFSQSFYTSRCGYRLCARAYLNGDGSGRGSHLSLYFVVMRGEFDSLLQWPFRQRVTLMLLDQSGKKNIMETFKPDPNSSSFKRPDGEMNIASGCPRFVAHSVLENAKNAYIKDDTLFLKVAVDLTDLEDL

SEQ ID NO: 475 - DNA, 2060 bp, Homo sapien
ctggcttcggcctcagccccaccatggtgacgcttgctgaactgctggtgctcctggccgctctcctggccacggtctcgggctatttcgttagcatcgacgcccatgctgaagagtgcttctttgagcgggtcacctcgggcaccaagatgggcctcatcttcgaggtggcggagggcggcttcctggacatcgacgtggagattacaggaccagataacaaaggaatttacaaaggagacagagaatccagtgggaaatacacatttgctgctcacatggatggaacatacaaattttgttttagtaaccggatgtccaccatgactccaaaaatagtgatgttcaccattgatattggggaggctccaaaaggacaagatatggaaacagaagctcaccagaacaagctagaagaaatgatcaatgagctagcagtggcgatgacagctgtaaagcacgaacaggaatacatggaagtccgggagagaatacacagagccatcaacgacaacacaaacagcagagtggtcctttggtccttctttgaagctcttgttctagttgccatgacattgggacagatctactacctgaagagattttttgaagtccggagagttgtttaaaaagcctcttcctgatgatcccaactcagaattcactgtttaccaaacaccttggtcataataatgtcattagtttctccatttttattttctgaactgtacattcacaacttatgtttctttgagattaatagatattgggggaaaaacgcctttttaggaaaattatagtgaaaatttgacagttgattggcataatttcttgtttgaatgctgcctccattatataggtccttccaggaactcaaacactgtaagtgaaatatgggagtatagtttttattatttcttcttttccttttgttttcataatataatgcagtttgttcaggaaatcagcacaaagcctgatagtactttactaaaatgactgcattctttggattccttcagtctatggttcaagtcactaaagattcatttttgttgagtccttatgagaaacagcagtatgaatcttgacggtttctgcccgtcctaatggcagagctctctgacttgggtgtatgctgccaggctgggtactttcatactttgttttcttgttttgctttaaaactacgactcagcatacattttcccacatacatttttacattgtaccttaggactcagtcatctccacttaaattgatgacacaagcagctaataaccatttctgggtttctgcctaaccccctaattgtctgttaaagccaattctctgggtgtcccagtgagtggtggctttttttctttccacattggcacattcacttctcccactcttggcatgtaagaaataagcatttacataattggaaaaatctggatttctgatgccaaagggttaaagcttcttggatttcatttcattgatatacagccactattttatttttgatcagtggcctttgggccactgttcagggtactgaccatcagtgtcagcattagggttttggtttttgtttcttttgggtatttcttttttggcacatgtgaatcttgttttgtgtaaaatgaaattactttctcttgttctctgatgatgggtttaaaattaaaagagcatccggttttggtatggggatgatccaggattatgttgtgactgatacatattagttacttgtgctttttttttttttttttggatctttgcaagggcaaaactacaagtaacgagttttatataattaatttaaatttgttacaggttttcatgttcaggataaaccatacttccaccttgggtgagaacacttgcaacagtttattaatgaggtgactttcaccttaggacaactgttgcatgccaagttttttgtgtgtgtgaaacacttcaaaactgatttaaaagatgtaaatttaaaattggttgtatctaatatgccccaggttcggtaaataaacaattctttttaaaaaaaaaaaaaaaaaaaaaaaaa

SEQ ID NO: 476 - protein, 201 aa, Homo sapien
MVTLAELLVLLAALLATVSGYFVSIDAHAEECFFERVTSGTKMGLIFEVAEGGFLDIDVEITGPDNKGIYKGDRESSGKYTFAAHMDGTYKFCFSNRMSTMTPKIVMFTIDIGEAPKGQDMETEAHQNKLEEMINELAVAMTAVKHEQEYMEVRERIHRAINDNTNSRVVLWSFFEALVLVAMTLGQIYYLKRFFEVRRVV

SEQ ID NO: 477 - DNA, 2497 bp, Homo sapien
gggcgccgaggctccccgccgctcgctgctccccggcccgcgccatgccctcctacacggtcaccgtggccactggcagccagtggttcgccggcactgacgactacatctacctcagcctcgtgggctcggcgggctgcagcgagaagcacctgctggacaagcccttctacaacgacttcgagcgtggcgcggtggattcatacgacgtgactgtggacgaggaactgggcgagatccagctggtcagaatcgagaagcgcaagtactggctgaatgacgactggtacctgaagtacatcacgctgaagacgccccacggggactacatcgagttcccctgctaccgctggatcaccggcgatgtcgaggttgtcctgagggatggacgcgcaaagttggcccgagatgaccaaattcacattctcaagcaacaccgacgtaaagaactggaaacacggcaaaaacaatatcgatggatggagtggaaccctggcttccccttgagcatcgatgccaaatgccacaaggatttaccccgtgatatccagtttgatagtgaaaaaggagtggactttgttctgaattactccaaagcgatggagaacctgttcatcaaccgcttcatgcacatgttccagtcttcttggaatgacttcgccgactttgagaaaatctttgtcaagatcagcaacactatttctgagcgggtcatgaatcactggcaggaagacctgatgtttggctaccagttcctgaatggctgcaaccctgtgttgatccggcgctgcacagagctgcccgagaagctcccggtgaccacggagatggtagagtgcagcctggagcggcagctcagcttggagcaggaggtccagcaagggaacattttcatcgtggactttgagctgctggatggcatcgatgccaacaaaacagacccctgcacactccagttcctggccgctcccatctgcttgctgtataagaacctggccaacaagattgtccccattgccatccagctcaaccaaatcccgggagatgagaaccctattttcctcccttcggatgcaaaatacgactggcttttggccaaaatctgggtgcgttccagtgacttccacgtccaccagaccatcacccaccttctgcgaacacatctggtgtctgaggtttttggcattgcaatgtaccgccagctgcctgctgtgcaccccattttcaagctgctggtggcacacgtgagattcaccattgcaatcaacaccaaggcccgtgagcagctcatctgcgagtgtggcctctttgacaaggccaacgccacagggggcggtgggcacgtgcagatggtgcagagggccatgaaggacctgacctatgcctccctgtgctttcccgaggccatcaaggcccggggcatggagagcaaagaagacatcccctactacttctaccgggacgacgggctcctggtgtgggaagccatcaggacgttcacggccgaggtggtagacatctactacgagggcgaccaggtggtggaggaggacccggagctgcaggacttcgtgaacgatgtctacgtgtacggcatgcggggccgcaagtcctcaggcttccccaagtcggtcaagagccgggagcagctgtcggagtacctgaccgtggtgatcttcaccgcctccgcccagcacgccgcggtcaacttcggccagtacgactggtgctcctggatccccaatgcgcccccaaccatgcgagccccgccaccgactgccaagggcgtggtgaccattgagcagatcgtggacacgctgcccgaccgcggccgctcctgctggcatctgggtgcagtgtgggcgctgagccagttccaggaaaacgagctgttcctgggcatgtacccagaagagcattttatcgagaagcctgtgaaggaagccatggcccgattccgcaagaacctcgaggccattgtcagcgtgattgctgagcgcaacaagaagaagcagctgccatattactacttgtccccagaccggattccgaacagtgtggccatctgagcacactgccagtctcactgtgggaaggccagctgccccagccagatggactccagcctgcctggcaggctgtctggccaggcctcttggcagtcacatctcttcctccgaggccagtacctttccatttattctttgatcttcagggaactgcatagattgtatcaaagtgtaaacaccatagggacccattctacacagagcaggactgcacaggcgtcctgtccacacccagctcagcatttccacaccaagcagcaacagcaaatcacgaccactgatagatgtctattcttgttggagacatgggatgattattttctgttctatttgtgcttagtccaattccttgcacatagtaggtacccaattcaattactattgaatgaattaagaattggttgccataaaaataaatcagttcattt

SEQ ID NO: 478 - protein, 674 aa, Homo sapien
MPSYTVTVATGSQWFAGTDDYIYLSLVGSAGCSEKHLLDKPFYNDFERGAVDSYDVTVDEELGEIQLVRIEKRKYWLNDDWYLKYITLKTPHGDYIEFPCYRWITGDVEVVLRDGRAKLARDDQIHILKQHRRKELETRQKQYRWMEWNPGFPLSIDAKCHKDLPRDIQFDSEKGVDFVLNYSKAMENLFINRFMHMFQSSWNDFADFEKIFVKISNTISERVMNHWQEDLMFGYQFLNGCNPVLIRRCTELPEKLPVTTEMVECSLERQLSLEQEVQQGNIFIVDFELLDGIDANKTDPCTLQFLAAPICLLYKNLANKIVPIAIQLNQIPGDENPIFLPSDAKYDWLLAKIWVRSSDFHVHQTITHLLRTHLVSEVFGIAMYRQLPAVHPIFKLLVAHVRFTIAINTKAREQLICECGLFDKANATGGGGHVQMVQRAMKDLTYASLCFPEAIKARGMESKEDIPYYFYRDDGLLVWEAIRTFTAEVVDIYYEGDQVVEEDPELQDFVNDVYVYGMRGRKSSGFPKSVKSREQLSEYLTVVIFTASAQHAAVNFGQYDWCSWIPNAPPTMRAPPPTAKGVVTIEQIVDTLPDRGRSCWHLGAVWALSQFQENELFLGMYPEEHFIEKPVKEAMARFRKNLEAIVSVIAERNKKKQLPYYYLSPDRIPNSVAI

SEQ ID NO: 479 - DNA, 5065 bp, Homo sapien
cgctcgatcttgggacccaccgctgccctcagctccgagtccagggcgagtgcagagcacagcgggcggaggaccccgggcgcgggcgcggacggcacgcggggcatgaacctggagggcggcggccgaggcggagagttcggcatgagcgcggtgagctgcggcaacgggaagctccgccagtggctgatcgaccagatcgacagcggcaagtaccccgggctggtgtgggagaacgaggagaagagcatcttccgcatcccctggaagcacgcgggcaagcaggactacaaccgcgaggaggacgccgcgctcttcaaggcttgggcactgtttaaaggaaagttccgagaaggcatcgacaagccggaccctcccacctggaagacgcgcctgcggtgcgctttgaacaagagcaatgactttgaggaactggttgagcggagccagctggacatctcagacccgtacaaagtgtacaggattgttcctgagggagccaaaaaaggagccaagcagctcaccctggaggacccgcagatgtccatgagccacccctacaccatgacaacgccttacccttcgctcccagcccagcaggttcacaactacatgatgccacccctcgaccgaagctggagggactacgtcccggatcagccacacccggaaatcccgtaccaatgtcccatgacgtttggaccccgcggccaccactggcaaggcccagcttgtgaaaatggttgccaggtgacaggaaccttttatgcttgtgccccacctgagtcccaggctcccggagtccccacagagccaagcataaggtctgccgaagccttggcgttctcagactgccggctgcacatctgcctgtactaccgggaaatcctcgtgaaggagctgaccacgtccagccccgagggctgccggatctcccatggacatacgtatgacgccagcaacctggaccaggtcctgttcccctacccagaggacaatggccacaggaaaaacattgagaacctgctgagccacctggagaggggcgtggtcctctggatggcccccgacgggctctatgcgaaaagactgtgccagagcacgatctactgggacgggcccctggcgctgtgcaacgaccggcccaacaaactggagagagaccagacctgcaagctctttgacacacagcagttcttgtcagagctgcaagcgtttgctcaccacggccgctccctgccaagattccaggtgactctatgctttggagaggagtttccagaccctcagaggcaaagaaagctcatcacagctcacgtagaacctctgctagccagacaactatattattttgctcaacaaaacagtggacatttcctgaggggctacgatttaccagaacacatcagcaatccagaagattaccacagatctatccgccattcctctattcaagaatgaaaaatgtcaagatgagtggttttctttttccttttttttttttttttttttgatacggagatacggggtcttgctctgtctcccaggctggagtgcagtgacacaatctcagctcactgtgacctccgcctcctgggttcaagagactctcctgcctcagcctccctggtagctgggattacaggtgtgagccactgcacccacccaagacaagtgattttcattgtaaatatttgactttagtgaaagcgtccaattgactgccctcttactgttttgaggaactcagaagtggagatttcagttcagcggttgaggagaattgcggcgagacaagcatggaaaatcagtgacatctgattggcagatgagcttatttcaaaaggaagggtggctttgcattttcttgtgttctgtagactgccatcattgatgatcactgtgaaaattgaccaagtgatgtgtttacatttactgaaatgcgctctttaatttgttgtagattaggtcttgctggaagacagagaaaacttgcctttcagtattgacactgactagagtgatgactgcttgtaggtatgtctgtgccatttctcagggaagtaagatgtaaattgaagaagcctcacacgtaaaagaaatgtattaatgtatgtaggagctgcagttcttgtggaagacacttgctgagtgaaggaaatgaatctttgactgaagccgtgcctgtagccttggggaggcccatcccccacctgccagcggtttcctggtgtgggtccctctgccccaccctccttcccattggctttctctccttggcctttcctggaagccagttagtaaacttcctattttcttgagtcaaaaaacatgagcgctactcttggatgggacatttttgtctgtcctacaatctagtaatgtctaagtaatggttaagttttcttgtttctgcatctttttgaccctcattctttagagatgctaaaattcttcgcataaagaagaagaaattaaggaacataaatcttaatacttgaactgttgcccttctgtccaagtacttaactatctgttcccttcctctgtgccacgctcctctgtttgtttggctgtccagcgatcagccatggcgacactaaaggaggaggagccggggactcccaggctggagagcactgccaggacccaccactggaagcaggatggagctgactacggaactgcacactcagtgggctgtttctgcttatttcatctgttctatgcttcctcgtgccaattatagtttgacagggccttaaaattacttggctttttccaaatgcttctatttatagaaatcccaaagacctccacttgcttaagtatacctatcacttacatttttgtggttttgagaaagtacagcagtagactggggcgtcacctccaggccgtttctcatactacaggatatttactattactcccaggattcagcagaagattgcgttagctctcaaatgtgtgttcctgcttttctaatggatattttaaattcattcaacaagcacctagtaagtgcctgctgtatccctacattacacagttcagcctttatcaagcttagtgagcagtgagcactgaaacattattttttaatgtttaaaaagtttctaatattaaagtcagaatattaatacaattaatattaatattaactacagaaaagacaaacagtagagaacagcaaaaaaataaaaaggatctccttttttcccagcccaaattctcctctctaaaagtgtccacaagaaggggtgtttattcttccaacacatttcacttttctgtaaatatacataaacttaaaaagaaaacctcatggagtcatcttgcacacacttttcatgcagtgctctttgtagctaaacagtgaagatttacctcgttctgctcagaggccttgctgtggagctccactgccatgtacccagtagggtttgacatttcattagccatgcaacatggatatgtattgggcagcagactgtgtttcgtgaactgcagtgatgtatacatcttatagatgcaaagtattttggggtatattatcctaagggaagataaagatgatattaagaactgctgtttcacggggcccttacctgtgaccctctttgctgaagaatatttaaccccacacagcacttcaaagaagctgtcttggaagtctgtctcaggagcaccctgtcttcttaattctccaagcggatgctccatttcaattgctttgtgacttcttcttctttgtttttttaaatattatgctgctttaacagtggagctgaattttctggaaaatgcttcttggctggggccactacctcctttcctatctttacatctatgtgtatgttgactttttaaaattctgagtgatccagggtatgacctagggaatgaactagctatggaaataactcagggttaggaatcctagcacttgtctcaggactctgaaaaggaacggcttcctcattccttgtcttgataaagtggaattggcaaactagaatttagtttgtactcagtggacagtgctgttgaagatttgaggacttgttaaagagcactgggtcatatggaaaaaatgtatgtgtctccccaggtgcattttcttggtttatgtcttgttcttgagattttgtatatttaggaaaacctcaagcagtaattaatatctcctggaacactatagagaaccaagtgaccgactcatttacaactgaaacctaggaagcccctgagtcctgagcgaaaacaggagagttagtcgccctacagaaaacccagctagactattgggtatgaactaaaaagagactgtgccatggtgagaaaaatgtaaaatcctacagtggaatgagcagcccttacagtgttgttaccaccaagggcaggtaggtattagtgtttgaaaaagctggtctttgagcgagggcataaatacagctagccccaggggtggaacaactgtgggagtcttgggtactcgcacctcttggctttgttgatgctccgccaggaaggccacttgtgtgtgcgtgtcagttacttttttagtaacaattcagatccagtgtaaacttccgttcattgctctccagtcacatgcccccacttccccacaggtgaaagtttttctgaagtgttgggattggttaaggtctttatttgtattacgtatctccccaagtcctctgtggccagctgcatctgtctgaatggtgcgtgaaggctctcagaccttacacaccattttgtaagttatgttttacatgccccgtttttgagactgatctcgatgcaggtggatctccttgagatcctgatagcctgttacaggaatgaagtaaaggtcagttttttttgtattgattttcacagctttgaggaacatgcataagaaatgtagctgaagtagaggggacgtgagagaagggccaggccggcaggccaaccctcctccaatggaaattcccgtgttgcttcaaactgagacagatgggacttaacaggcaatggggtccacttccccctcttcagcatcccccgtacc

SEQ ID NO: 480 - protein, 451 aa, Homo sapien
MNLEGGGRGGEFGMSAVSCGNGKLRQWLIDQIDSGKYPGLVWENEEKSIFRIPWKHAGKQDYNREEDAALFKAWALFKGKFREGIDKPDPPTWKTRLRCALNKSNDFEELVERSQLDISDPYKVYRIVPEGAKKGAKQLTLEDPQMSMSHPYTMTTPYPSLPAQQVHNYMMPPLDRSWRDYVPDQPHPEIPYQCPMTFGPRGHHWQGPACENGCQVTGTFYACAPPESQAPGVPTEPSIRSAEALAFSDCRLHICLYYREILVKELTTSSPEGCRISHGHTYDASNLDQVLFPYPEDNGHRKNIENLLSHLERGVVLWMAPDGLYAKRLCQSTIYWDGPLALCNDRPNKLERDQTCKLFDTQQFLSELQAFAHHGRSLPRFQVTLCFGEEFPDPQRQRKLITAHVEPLLARQLYYFAQQNSGHFLRGYDLPEHISNPEDYHRSIRHSSIQE

SEQ ID NO: 481 - DNA, 4242 bp, Homo sapien
gaattcggcgctgagtgacccgagtcgggacgcgggctgcgcgcgcgggaccccggagcccaaacccggggcaggcgggcagctgtgcccgggcggcacggccagcttcctgatttctcccgattccttccttctccctggagcggccgacaatgtccaccacggtcaatgtagattcccttgcggaatatgagaagagccagatcaagagagccctggagctggggacggtgatgactgtgttcagcttccgcaagtccacccccgagcggagaaccgtccaggtgatcatggagacgcggcaggtggcctggagcaagaccgccgacaagatcgagggcttcttggatatcatggaaataaaagaaatccgcccagggaagaactccaaagatttcgagcgagcaaaagcagttcgccagaaagaagactgctgcttcaccatcctatatggcactcagttcgtcctcagcacgctcagcttggcagctgactctaaagaggatgcagttaactggctctctggcttgaaaatcttacaccaggaagcgatgaatgcgtccacgcccaccattatcgagagttggctgagaaagcagatatattctgtggatcaaaccagaagaaacagcatcagtctccgagagttgaagaccatcttgcccctgatcaactttaaagtgagcagtgccaagttccttaaagataagtttgtggaaataggagcacacaaagatgagctcagctttgaacagttccatctcttctataaaaaacttatgtttgaacagcaaaaatcgattctcgatgaattcaaaaaggattcgtccgtgttcatcctggggaacactgacaggccggatgcctctgctgtttacctgcatgacttccagaggtttctcatacatgaacagcaggagcattgggctcaggatctgaacaaagtccgtgagcggatgacaaagttcattgatgacaccatgcgtgaaactgctgagcctttcttgtttgtggatgagttcctcacgtacctgttttcacgagaaaacagcatctgggatgagaagtatgacgcggtggacatgcaggacatgaacaaccccctgtctcattactggatctcctcgtcacataacacgtaccttacaggtgaccagctgcggagcgagtcgtccccagaagcttacatccgctgcctgcgcatgggctgtcgctgcattgaactggactgctgggacgggcccgatgggaagccggtcatctaccatggctggacgcggactaccaagatcaagtttgatgacgtcgtgcaggccatcaaagaccacgcctttgttacctcgagcttcccagtgatcctgtccatcgaggagcactgcagcgtggagcaacagcgtcacatggccaaggccttcaaggaagtatttggcgacctgctgttgacgaagcccacggaggccagtgctgaccagctgccctcgcccagccagctgcgggagaagatcatcatcaagcataagaagctgggcccccgaggcgatgtggatgtcaacatggaggacaagaaggacgaacacaagcaacagggggagctgtacatgtgggattccattgaccagaaatggactcggcactactgcgccattgctgatgccaagctgtccttcagtgatgacattgaacagactatggaggaggaagtgccccaggatataccccctacagaactacattttggggagaaatggttccacaagaaggtggagaagaggacgagtgccgagaagttgctgcaggaatactgcatggagacggggggcaaggatggcaccttcctggttcgggagagcgagaccttccccaatgactacaccctgtccttctggcggtcaggccgggtccagcactgccggatccgctccaccatggagggcgggaccctgaaatactacttgactgacaacctgaggttcaggaggatgtatgccctcatccagcactaccgcgagacgcacctgccgtgcgccgagttcgagctgcggctcacggaccctgtgcccaaccccaacccccacgagtccaagccgtggtactatgacagcctgagccgcggagaggcagaggacatgctgatgaggattccccgggacggggccttcctgatccggaagcgagaggggagcgactcctatgccatcaccttcagggctaggggcaaggtaaagcattgtcgcatcaaccgggacggccggcactttgtgctggggacctccgcctattttgagagtctggtggagctcgtcagttactacgagaagcattcactctaccgaaagatgagactgcgctaccccgtgacccccgagctcctggagcgctacaatacggaaagagatataaactccctctacgacgtcagcagaatgtatgtggatcccagtgaaatcaatccgtccatgcctcagagaaccgtgaaagctctgtatgactacaaagccaagcgaagcgatgagctgagcttctgccgtggtgccctcatccacaatgtctccaaggagcccgggggctggtggaaaggagactatggaaccaggatccagcagtacttcccatccaactacgtcgaggacatctcaactgcagacttcgaggagctagaaaagcagattattgaagacaatcccttagggtctctttgcagaggaatattggacctcaatacctataacgtcgtgaaagcccctcagggaaaaaaccagaagtcctttgtcttcatcctggagcccaaggagcagggcgatcctccggtggagtttgccacagacagggtggaggagctctttgagtggtttcagagcatccgagagatcacgtggaagattgacagcaaggagaacaacatgaagtactgggagaagaaccagtccatcgccatcgagctctctgacctggttgtctactgcaaaccaaccagcaaaaccaaggacaacttagaaaatcctgacttccgagaaatccgctcctttgtggagacgaaggctgacagcatcatcagacagaagcccgtcgacctcctgaagtacaatcaaaagggcctgacccgcgtctacccaaagggacaaagagttgactcttcaaactacgaccccttccgcctctggctgtgcggttctcagatggtggcactcaatttccagacggcagataagtacatgcagatgaatcacgcattgttttctctcaacgggcgcacgggctacgttctgcagcctgagagcatgaggacagagaaatatgacccgatgccacccgagtcccagaggaagatcctgatgacgctgacagtcaaggttctcggtgctcgccatctccccaaacttggacgaagtattgcctgtccctttgtagaagtggagatctgtggagccgagtatggcaacaacaagttcaagacgacggttgtgaatgataatggcctcagccctatctgggctccaacacaggagaaggtgacatttgaaatttatgacccaaacctggcatttctgcgctttgtggtttatgaagaagatatgttcagcgatcccaactttcttgctcatgccacttaccccattaaagcagtcaaatcaggattcaggtccgttcctctgaagaatgggtacagcgaggacatagagctggcttccctcctggttttctgtgagatgcggccagtcctggagagcgaagaggaactttactcctcctgtcgccagctgaggaggcggcaagaagaactgaacaaccagctctttctgtatgacacacaccagaacttgcgcaatgccaaccgggatgccctggttaaagagttcagtgttaatgagaaccactccagctgtaccaggagaaatgcaacaagaggttaagagagaagagagtcagcaacagcaagttttactcatagaagctggggtatgtgtgtaagggtattgtgtgtgtgcgcatgtgtgtttgcatgtaggagaacgtgccctattcacactctgggaagacgctaatctgtgacatcttttcttcaagcctgccatcaaggacatttcttaagacccaactggcatgagttggggtaatttcctattattttcatcttggacaacttctaacttatatctttatagaggattccccaaaatgtgctcctcatttttggcctctcatgttccaaacctcattgaataaaaagcaatgaaaaccttg

SEQ ID NO: 482 - protein, 1252 aa, Homo sapien
MSTTVNVDSLAEYEKSQIKRALELGTVMTVFSFRKSTPERRTVQVIMETRQVAWSKTADKIEGFLDIMEIKEIRPGKNSKDFERAKAVRQKEDCCFTILYGTQFVLSTLSLAADSKEDAVNWLSGLKILHQEAMNASTPTIIESWLRKQIYSVDQTRRNSISLRELKTILPLINFKVSSAKFLKDKFVEIGAHKDELSFEQFHLFYKKLMFEQQKSILDEFKKDSSVFILGNTDRPDASAVYLHDFQRFLIHEQQEHWAQDLNKVRERMTKFIDDTMRETAEPFLFVDEFLTYLFSRENSIWDEKYDAVDMQDMNNPLSHYWISSSHNTYLTGDQLRSESSPEAYIRCLRMGCRCIELDCWDGPDGKPVIYHGWTRTTKIKFDDVVQAIKDHAFVTSSFPVILSIEEHCSVEQQRHMAKAFKEVFGDLLLTKPTEASADQLPSPSQLREKIIIKHKKLGPRGDVDVNMEDKKDEHKQQGELYMWDSIDQKWTRHYCAIADAKLSFSDDIEQTMEEEVPQDIPPTELHFGEKWFHKKVEKRTSAEKLLQEYCMETGGKDGTFLVRESETFPNDYTLSFWRSGRVQHCRIRSTMEGGTLKYYLTDNLRFRRMYALIQHYRETHLPCAEFELRLTDPVPNPNPHESKPWYYDSLSRGEAEDMLMRIPRDGAFLIRKREGSDSYAITFRARGKVKHCRINRDGRHFVLGTSAYFESLVELVSYYEKHSLYRKMRLRYPVTPELLERYNTERDINSLYDVSRMYVDPSEINPSMPQRTVKALYDYKAKRSDELSFCRGALIHNVSKEPGGWWKGDYGTRIQQYFPSNYVEDISTADFEELEKQIIEDNPLGSLCRGILDLNTYNVVKAPQGKNQKSFVFILEPKEQGDPPVEFATDRVEELFEWFQSIREITWKIDSKENNMKYWEKNQSIAIELSDLVVYCKPTSKTKDNLENPDFREIRSFVETKADSIIRQKPVDLLKYNQKGLTRVYPKGQRVDSSNYDPFRLWLCGSQMVALNFQTADKYMQMNHALFSLNGRTGYVLQPESMRTEKYDPMPPESQRKILMTLTVKVLGARHLPKLGRSIACPFVEVEICGAEYGNNKFKTTVVNDNGLSPIWAPTQEKVTFEIYDPNLAFLRFVVYEEDMFSDPNFLAHATYPIKAVKSGFRSVPLKNGYSEDIELASLLVFCEMRPVLESEEELYSSCRQLRRRQEELNNQLFLYDTHQNLRNANRDALVKEFSVNENHSSCTRRNATRG

SEQ ID NO: 483 - DNA, 1413 bp, Homo sapien
agggaataaaggctcagggaccggcagttctactctagagcccaccagcctctcagagcctccggtgactggcctgtgtctccccctggatggacatgtggacggcgctgctcatcctgcaagccttgttgctaccctccctggctgatggtgccacccctgccctgcgctttgtagccgtgggtgactggggaggggtccccaatgccccattccacacggcccgggaaatggccaatgccaaggagatcgctcggactgtgcagatcctgggtgcagacttcatcctgtctctaggggacaatttttacttcactggtgtgcaagacatcaatgacaagaggttccaggagacctttgaggacgtattctctgaccgctcccttcgcaaagtgccctggtacgtgctagccggaaaccatgaccaccttggcaatgtctctgcccagattgcatactctaagatctccaagcgctggaacttccccagccctttctaccgcctgcacttcaagatcccacagaccaatgtgtctgtggccatttttatgctggacacagtgacactatgtggcaactcagatgacttcctcagccagcagcctgagaggccccgagacgtgaagctggcccgcacacagctgtcctggctcaagaaacagctggcggcggccagggaggactacgtgctggtggctggccactaccccgtgtggtccatagccgagcacgggcctacccactgcctggtcaagcagctacggccactgctggccacatacggggtcactgcctacctgtgcggccacgatcacaatctgcagtacctgcaagatgagaatggcgtgggctacgtgctgagtggggctgggaatttcatggacccctcaaagcggcaccagcgcaaggtccccaacggctatctgcgcttccactatgggactgaagactcactgggtggctttgcctatgtggagatcagctccaaagagatgactgtcacttacatcgaggcctcgggcaagtccctctttaagaccaggctgccgaggcgagccaggccctgaactcccatgactgcccagctctgaggcccgatctccactgttgggtgggtggcctgccgggaccctgctcacaggcaggcttttcctccaacctgtggcgctgcagcagggcaggaaggggaaacacagctgatgaactgtggtgccacatgacccttgtggcacagatgcccacgtatgtgaaacacacatggacatgtgtcccagccacagtgttatgctctgtggctggctcacctttgctgagttccggggtgcaatgggggagggagggagggaaagcttcctcctaaatcaagcatctttctgttactgatgttcaataaaagaatagttgccaaggctg

SEQ ID NO: 484 - protein, 325 aa, Homo sapien
MDMWTALLILQALLLPSLADGATPALRFVAVGDWGGVPNAPFHTAREMANAKEIARTVQILGADFILSLGDNFYFTGVQDINDKRFQETFEDVFSDRSLRKVPWYVLAGNHDHLGNVSAQIAYSKISKRWNFPSPFYRLHFKIPQTNVSVAIFMLDTVTLCGNSDDFLSQQPERPRDVKLARTQLSWLKKQLAAAREDYVLVAGHYPVWSIAEHGPTHCLVKQLRPLLATYGVTAYLCGHDHNLQYLQDENGVGYVLSGAGNFMDPSKRHQRKVPNGYLRFHYGTEDSLGGFAYVEISSKEMTVTYIEASGKSLFKTRLPRRARP

SEQ ID NO: 485 - DNA, 4407 bp, Homo sapien
tttcgactcgcgctccggctgctgtcacttggctctctggctggagcttgaggacgcaaggagggtttgtcactggcagactcgagactgtaggcactgccatggcccctgtgctcagtaaggactcggcggacatcgagagtatcctggctttaaatcctcgaacacaaactcatgcaactctgtgttccacttcggccaagaaattagacaagaaacattggaaaagaaatcctgataagaactgctttaattgtgagaagctggagaataattttgatgacatcaagcacacgactcttggtgagcgaggagctctccgagaagcaatgagatgcctgaaatgtgcagatgccccgtgtcagaagagctgtccaactaatcttgatattaaatcattcatcacaagtattgcaaacaagaactattatggagctgctaagatgatattttctgacaacccacttggtctgacttgtggaatggtatgtccaacctctgatctatgtgtaggtggatgcaatttatatgccactgaagagggacccattaatattggtggattgcagcaatttgctactgaggtattcaaagcaatgagtatcccacagatcagaaatccttcgctgcctcccccagaaaaaatgtctgaagcctattctgcaaagattgctctttttggtgctgggcctgcaagtataagttgtgcttcctttttggctcgattggggtactctgacatcactatatttgaaaaacaagaatatgttggtggtttaagtacttctgaaattcctcagttccggctgccgtatgatgtagtgaattttgagattgagctaatgaaggaccttggtgtaaagataatttgcggtaaaagcctttcagtgaatgaaatgactcttagcactttgaaagaaaaaggctacaaagctgctttcattggaataggtttgccagaacccaataaagatgccatcttccaaggcctgacgcaggaccaggggttttatacatccaaagactttttgccacttgtagccaaaggcagtaaagcaggaatgtgcgcctgtcactctccattgccatcgatacggggagtcgtgattgtacttggagctggagacactgccttcgactgtgcaacatctgctctacgttgtggagctcgccgagtgttcatcgtcttcagaaaaggctttgttaatataagagctgtccctgaggagatggagcttgctaaggaagaaaagtgtgaatttctgccattcctgtccccacggaaggttatagtaaaaggtgggagaattgttgctatgcagtttgttcggacagagcaagatgaaactggaaaatggaatgaagatgaagatcagatggtccatctgaaagccgatgtggtcatcagtgcctttggttcagttctgagtgatcctaaagtaaaagaagccttgagccctataaaatttaacagatggggtctcccagaagtagatccagaaactatgcaaactagtgaagcatgggtatttgcaggtggtgatgtcgttggtttggctaacactacagtggaatcggtgaatgatggaaagcaagcttcttggtacattcacaaatacgtacagtcacaatatggagcttccgtttctgccaagcctgaactacccctcttttacactcctattgatctggtggacattagtgtagaaatggccggattgaagtttataaatccttttggtcttgctagcgcaactccagccaccagcacatcaatgattcgaagagcttttgaagctggatggggttttgccctcaccaaaactttctctcttgataaggacattgtgacaaatgtttcccccagaatcatccggggaaccacctctggccccatgtatggccctggacaaagctcctttctgaatattgagctcatcagtgagaaaacggctgcatattggtgtcaaagtgtcactgaactaaaggctgacttcccagacaacattgtgattgctagcattatgtgcagttacaataaaaatgactggacggaacttgccaagaagtctgaggattctggagcagatgccctggagttaaatttatcatgtccacatggcatgggagaaagaggaatgggcctggcctgtgggcaggatccagagctggtgcggaacatctgccgctgggttaggcaagctgttcagattcctttttttgccaagctgaccccaaatgtcactgatattgtgagcatcgcaagagctgcaaaggaaggtggtgccaatggcgttacagccaccaacactgtctcaggtctgatgggattaaaatctgatggcacaccttggccagcagtggggattgcaaagcgaactacatatggaggagtgtctgggacagcaatcagacctattgctttgagagctgtgacctccattgctcgtgctctgcctggatttcccattttggctactggtggaattgactctgctgaaagtggtcttcagtttctccatagtggtgcttccgtcctccaggtatgcagtgccattcagaatcaggatttcactgtgatcgaagactactgcactggcctcaaagccctgctttatctgaaaagcattgaagaactacaagactgggatggacagagtccagctactgtgagtcaccagaaagggaaaccagttccacgtatagctgaactcatggacaagaaactgccaagttttggaccttatctggaacagcgcaagaaaatcatagcagaaaacaagattagactgaaagaacaaaatgtagctttttcaccacttaagagaagctgttttatccccaaaaggcctattcctaccatcaaggatgtaataggaaaagcactgcagtaccttggaacatttggtgaattgagcaacgtagagcaagttgtggctatgattgatgaagaaatgtgtatcaactgtggtaaatgctacatgacctgtaatgattctggctaccaggctatacagtttgatccagaaacccacctgcccaccataaccgacacttgtacaggctgtactctgtgtctcagtgtttgccctattgtcgactgcatcaaaatggtttccaggacaacaccttatgaaccaaagagaggcgtacccttatctgtgaatccggtgtgttaaggtgatttgtgaaacagttgctgtgaactttcatgtcacctacatatgctgatctcttaaaatcatgatccttgtgttcagctctttccaaattaaaacaaatatacattttctaaataaaaatatgtaatttcaaaatacatttgtaagtgtaaaaaatgtctcatgtcaatgaccattcaattagtggcataaaatagaataattcttttctgaggatagtagttaaataactgtgtggcagttaattggatgttcactgccagttgtcttatgtgaaaaattaactttttgtgtggcaattagtgtgacagtttccaaattgccctatgctgtgctccatatttgatttctaattgtaagtgaaattaagcattttgaaacaaagtactctttaacatacaagaaaatgtatccaaggaaacattttatcaataaaaattacctttaattttaatgctgtttctaagaaaatgtagttagctccataaagtacaaatgaagaaagtcaaaaattatttgctatggcaggataagaaagcctaaaattgagtttgtggactttattaagtaaaatccccttcgctgaaattgcttatttttggtgttggatagaggatagggagaatatttactaactaaataccattcactactcatgcgtgagatgggtgtacaaactcatcctcttttaatggcatttctctttaaactatgttcctaaccaaatgagatgataggatagatcctggttaccactcttttactgtgcacatatgggccccggaattctttaatagtcaccttcatgattatagcaactaatgtttgaacaaagctcaaagtatgcaatgcttcattattcaagaatgaaaaatataatgttgataatatatattaagtgtgccaaatcagtttgactactctctgttttagtgtttatgtttaaaagaaatatattttttgttattattagataatatttttgtatttctctattttcataatcagtaaatagtgtcatataaactcatttatctcctcttcatggcatcttcaatatgaatctataagtagtaaatcagaaagtaacaatctatggcttatttctatgacaaattcaagagctagaaaaataaaatgtttcattatgcacttttagaaatgcatatttgccacaaaacctgtattactgaataatatcaaataaaatatcataaagcatttt

SEQ ID NO: 486 - protein, 1025 aa, Homo sapien
MAPVLSKDSADIESILALNPRTQTHATLCSTSAKKLDKKHWKRNPDKNCFNCEKLENNFDDIKHTTLGERGALREAMRCLKCADAPCQKSCPTNLDIKSFITSIANKNYYGAAKMIFSDNPLGLTCGMVCPTSDLCVGGCNLYATEEGPINIGGLQQFATEVFKAMSIPQIRNPSLPPPEKMSEAYSAKIALFGAGPASISCASFLARLGYSDITIFEKQEYVGGLSTSEIPQFRLPYDVVNFEIELMKDLGVKIICGKSLSVNEMTLSTLKEKGYKAAFIGIGLPEPNKDAIFQGLTQDQGFYTSKDFLPLVAKGSKAGMCACHSPLPSIRGVVIVLGAGDTAFDCATSALRCGARRVFIVFRKGFVNIRAVPEEMELAKEEKCEFLPFLSPRKVIVKGGRIVAMQFVRTEQDETGKWNEDEDQMVHLKADVVISAFGSVLSDPKVKEALSPIKFNRWGLPEVDPETMQTSEAWVFAGGDVVGLANTTVESVNDGKQASWYIHKYVQSQYGASVSAKPELPLFYTPIDLVDISVEMAGLKFINPFGLASATPATSTSMIRRAFEAGWGFALTKTFSLDKDIVTNVSPRIIRGTTSGPMYGPGQSSFLNIELISEKTAAYWCQSVTELKADFPDNIVIASIMCSYNKNDWTELAKKSEDSGADALELNLSCPHGMGERGMGLACGQDPELVRNICRWVRQAVQIPFFAKLTPNVTDIVSIARAAKEGGANGVTATNTVSGLMGLKSDGTPWPAVGIAKRTTYGGVSGTAIRPIALRAVTSIARALPGFPILATGGIDSAESGLQFLHSGASVLQVCSAIQNQDFTVIEDYCTGLKALLYLKSIEELQDWDGQSPATVSHQKGKPVPRIAELMDKKLPSFGPYLEQRKKIIAENKIRLKEQNVAFSPLKRSCFIPKRPIPTIKDVIGKALQYLGTFGELSNVEQVVAMIDEEMCINCGKCYMTCNDSGYQAIQFDPETHLPTITDTCTGCTLCLSVCPIVDCIKMVSRTTPYEPKRGVPLSVNPVC

SEQ ID NO: 487 - DNA, 2618 bp, Homo sapien
atgaagcacctgaagcggtggtggtcggccggcggcggcctcctgcacctcaccctcctgctgagcttggcggggctccgcgtagacctagatctttacctgctgctgccgccgcccaccctgctgcaggacgagctgctgttcctgggcggcccggccagctccgcctacgcgctcagccccttctcggcctcgggagggtgggggcgcgcgggccacttgcaccccaagggccgggagctggaccctgccgcgccgcccgagggccagctgctccgggaggtgcgcgcgctcggggtccccttcgtccctcgcaccagcgtggatgcatggctggtgcacagcgtggctgccgggagcgcggacgaggcccacgggctgctcggcgccgccgccgcctcgtccaccggaggagccggcgccagcgtggacggcggcagccaggctgtgcaggggggcggcggggacccccgagcggctcggagtggccccttggacgccggggaagaggagaaggcacccgcggaaccgacggctcaggtgccggacgctggcggatgtgcgagcgaggagaatggggtactaagagaaaagcacgaagctgtggatcatagttcccagcatgaggaaaatgaagaaagggtgtcagcccagaaggagaactcacttcagcagaatgatgatgatgaaaacaaaatagcagagaaacctgactgggaggcagaaaagaccactgaatctagaaatgagagacatctgaatgggacagatacttctttctctctggaagacttattccagttgctttcatcacagcctgaaaattcactggagggcatctcattgggagatattcctcttccaggcagtatcagtgatggcatgaattcttcagcacattatcatgtaaacttcagccaggctataagtcaggatgtgaatcttcatgaggccatcttgctttgtcccaacaatacatttagaagagatccaacagcaaggacttcacagtcacaagaaccatttctgcagttaaattctcataccaccaatcctgagcaaacccttcctggaactaatttgacaggatttctttcaccggttgacaatcatatgaggaatctaacaagccaagacctactgtatgaccttgacataaatatatttgatgagataaacttaatgtcattggccacagaagacaactttgatccaatcgatgtttctcagctttttgatgaaccagattctgattctggcctttctttagattcaagtcacaataatacctctgtcatcaagtctaattcctctcactctgtgtgtgatgaaggtgctataggttattgcactgaccatgaatctagttcccatcatgacttagaaggtgctgtaggtggctactacccagaacccagtaagctttgtcacttggatcaaagtgattctgatttccatggagatcttacatttcaacacgtatttcataaccacacttaccacttacagccaactgcaccagaatctacttctgaaccttttccgtggcctgggaagtcacagaagataaggagtagataccttgaagacacagatagaaacttgagccgtgatgaacagcgtgctaaagctttgcatatccctttttctgtagatgaaattgtcggcatgcctgttgattctttcaatagcatgttaagtagatattatctgacagacctacaagtctcacttatccgtgacatcagacgaagagggaaaaataaagttgctgcgcagaactgtcgtaaacgcaaattggacataattttgaatttagaagatgatgtatgtaacttgcaagcaaagaaggaaactcttaagagagagcaagcacaatgtaacaaagctattaacataatgaaacagaaactgcatgacctttatcatgatatttttagtagattaagagatgaccaaggtaggccagtcaatcccaaccactatgctctccagtgtacccatgatggaagtatcttgatagtacccaaagaactggtggcctcaggccacaaaaaggaaacccaaaagggaaagagaaagtgagaagaaactgaagatggactctattatgtgaagtagtaatgttcagaaactgattatttggatcagaaaccattgaaactgcttcaagaattgtatctttaagtactgctacttgaataactcagttaacgctgttttgaagcttacatggacaaatgtttaggacttcaagatcacacttgtgggcaatctgggggagccacaacttttcatgaagtgcattgtatacaaaattcatagttatgtccaaagaataggttaacatgaaaacccagtaagactttccatcttggcagccatcctttttaagagtaagttggttacttcaaaaagagcaaacactggggatcaaattattttaagaggtatttcagttttaaatgcaaaatagccttattttcatttagtttgttagcactatagtgagcttttcaaacactattttaatctttatatttaacttataaattttgctttctatggaaataaattttgtatttgtattaaaaattaacttttcccttttatacaga

SEQ ID NO: 488 - protein, 694 aa, Homo sapien
MKHLKRWWSAGGGLLHLTLLLSLAGLRVDLDLYLLLPPPTLLQDELLFLGGPASSAYALSPFSASGGWGRAGHLHPKGRELDPAAPPEGQLLREVRALGVPFVPRTSVDAWLVHSVAAGSADEAHGLLGAAAASSTGGAGASVDGGSQAVQGGGGDPRAARSGPLDAGEEEKAPAEPTAQVPDAGGCASEENGVLREKHEAVDHSSQHEENEERVSAQKENSLQQNDDDENKIAEKPDWEAEKTTESRNERHLNGTDTSFSLEDLFQLLSSQPENSLEGISLGDIPLPGSISDGMNSSAHYHVNFSQAISQDVNLHEAILLCPNNTFRRDPTARTSQSQEPFLQLNSHTTNPEQTLPGTNLTGFLSPVDNHMRNLTSQDLLYDLDINIFDEINLMSLATEDNFDPIDVSQLFDEPDSDSGLSLDSSHNNTSVIKSNSSHSVCDEGAIGYCTDHESSSHHDLEGAVGGYYPEPSKLCHLDQSDSDFHGDLTFQHVFHNHTYHLQPTAPESTSEPFPWPGKSQKIRSRYLEDTDRNLSRDEQRAKALHIPFSVDEIVGMPVDSFNSMLSRYYLTDLQVSLIRDIRRRGKNKVAAQNCRKRKLDIILNLEDDVCNLQAKKETLKREQAQCNKAINIMKQKLHDLYHDIFSRLRDDQGRPVNPNHYALQCTHDGSILIVPKELVASGHKKETQKGKRK

SEQ ID NO: 489 - DNA, 6914 bp, Homo sapien
tcattgcagctgggacagcccggagtgtggttagcagctcggcaagcgctgcccaggtcctggggtggtggcagccagcgggagcaggaaaggaagcatgttcccaggctgcccacgcctctgggtcctggtggtcttgggcaccagctgggtaggctgggggagccaagggacagaagcggcacagctaaggcagttctacgtggctgctcagggcatcagttggagctaccgacctgagcccacaaactcaagtttgaatctttctgtaacttcctttaagaaaattgtctacagagagtatgaaccatattttaagaaagaaaaaccacaatctaccatttcaggacttcttgggcctactttatatgctgaagtcggagacatcataaaagttcactttaaaaataaggcagataagcccttgagcatccatcctcaaggaattaggtacagtaaattatcagaaggtgcttcttaccttgaccacacattccctgcagagaagatggacgacgctgtggctccaggccgagaatacacctatgaatggagtatcagtgaggacagtggacccacccatgatgaccctccatgcctcacacacatctattactcccatgaaaatctgatcgaggatttcaactctgggctgattgggcccctgcttatctgtaaaaaagggaccctaactgagggtgggacacagaagacgtttgacaagcaaatcgtgctactatttgctgtgtttgatgaaagcaagagctggagccagtcatcatccctaatgtacacagtcaatggatatgtgaatgggacaatgccagatataacagtttgtgcccatgaccacatcagctggcatctgctgggaatgagctcggggccagaattattctccattcatttcaacggccaggtcctggagcagaaccatcataaggtctcagccatcacccttgtcagtgctacatccactaccgcaaatatgactgtgggcccagagggaaagtggatcatatcttctctcaccccaaaacatttgcaagctgggatgcaggcttacattgacattaaaaactgcccaaagaaaaccaggaatcttaagaaaataactcgtgagcagaggcggcacatgaagaggtgggaatacttcattgctgcagaggaagtcatttgggactatgcacctgtaataccagcgaatatggacaaaaaatacaggtctcagcatttggataatttctcaaaccaaattggaaaacattataagaaagttatgtacacacagtacgaagatgagtccttcaccaaacatacagtgaatcccaatatgaaagaagatgggattttgggtcctattatcagagcccaggtcagagacacactcaaaatcgtgttcaaaaatatggccagccgcccctatagcatttaccctcatggagtgaccttctcgccttatgaagatgaagtcaactcttctttcacctcaggcaggaacaacaccatgatcagagcagttcaaccaggggaaacctatacttataagtggaacatcttagagtttgatgaacccacagaaaatgatgcccagtgcttaacaagaccatactacagtgacgtggacatcatgagagacatcgcctctgggctaataggactacttctaatctgtaagagcagatccctggacaggcgaggaatacagagggcagcagacatcgaacagcaggctgtgtttgctgtgtttgatgagaacaaaagctggtaccttgaggacaacatcaacaagttttgtgaaaatcctgatgaggtgaaacgtgatgaccccaagttttatgaatcaaacatcatgagcactatcaatggctatgtgcctgagagcataactactcttggattctgctttgatgacactgtccagtggcacttctgtagtgtggggacccagaatgaaattttgaccatccacttcactgggcactcattcatctatggaaagaggcatgaggacaccttgaccctcttccccatgcgtggagaatctgtgacggtcacaatggataatgttggaacttggatgttaacttccatgaattctagtccaagaagcaaaaagctgaggctgaaattcagggatgttaaatgtatcccagatgatgatgaagactcatatgagatttttgaacctccagaatctacagtcatggctacacggaaaatgcatgatcgtttagaacctgaagatgaagagagtgatgctgactatgattaccagaacagactggctgcagcattaggaattaggtcattccgaaactcatcattgaaccaggaagaagaagagttcaatcttactgccctagctctggagaatggcactgaattcgtttcttcgaacacagatataattgttggttcaaattattcttccccaagtaatattagtaagttcactgtcaataaccttgcagaacctcagaaagccccttctcaccaacaagccaccacagctggttccccactgagacacctcattggcaagaactcagttctcaattcttccacagcagagcattccagcccatattctgaagaccctatagaggatcctctacagccagatgtcacagggatacgtctactttcacttggtgctggagaattcagaagtcaagaacatgctaagcgtaagggacccaaggtagaaagagatcaagcagcaaagcacaggttctcctggatgaaattactagcacataaagttgggagacacctaagccaagacactggttctccttccggaatgaggccctgggaggaccttcctagccaagacactggttctccttccagaatgaggccctgggaggaccctcctagtgatctgttactcttaaaacaaagtaactcatctaagattttggttgggagatggcatttggcttctgagaaaggtagctatgaaataatccaagatactgatgaagacacagctgttaacaattggctgatcagcccccagaatgcctcacgtgcttggggagaaagcacccctcttgccaacaagcctggaaagcagagtggccacccaaagtttcctagagttagacataaatctctacaagtaagacaggatggaggaaagagtagactgaagaaaagccagtttctcattaagacacgaaaaaagaaaaaagagaagcacacacaccatgctcctttatctccgaggacctttcaccctctaagaagtgaagcctacaacacattttcagaaagaagacttaagcattcgttggtgcttcataaatccaatgaaacatctcttcccacagacctcaatcagacattgccctctatggattttggctggatagcctcacttcctgaccataatcagaattcctcaaatgacactggtcaggcaagctgtcctccaggtctttatcagacagtgcccccagaggaacactatcaaacattccccattcaagaccctgatcaaatgcactctacttcagaccccagtcacagatcctcttctccagagctcagtgaaatgcttgagtatgaccgaagtcacaagtccttccccacagatataagtcaaatgtccccttcctcagaacatgaagtctggcagacagtcatctctccagacctcagccaggtgaccctctctccagaactcagccagacaaacctctctccagacctcagccacacgactctctctccagaactcattcagagaaacctttccccagccctcggtcagatgcccatttctccagacctcagccatacaaccctttctccagacctcagccatacaaccctttctttagacctcagccagacaaacctctctccagaactcagtcagacaaacctttctccagccctcggtcagatgcccctttctccagacctcagccatacaaccatttctctagacttcagccagacaaacctctctccagaactcagccatatgactctctctccagaactcagtcagacaaacctttccccagccctcggtcagatgcccatttctccagacctcagccatacaaccctttctctagacttcagccagacaaacctctctccagaactcagtcaaacaaacctttccccagccctcggtcagatgcccctttctccagaccccagccatacaaccctttctctagacctcagccagacaaacctctctccagaactcagtcagacaaacctttccccagacctcagtgagatgcccctctttgcagatctcagtcaaattccccttaccccagacctcgaccagatgacactttctccagaccttggtgagacagatctttccccaaactttggtcagatgtccctttccccagacctcagccaggtgactctctctccagacatcagtgacaccacccttctcccggatctcagccagatatcacctcctccagaccttgatcagatattctacccttctgaatctagtcagtcattgcttcttcaagaatttaatgagtcttttccttatccagaccttggtcagatgccatctccttcatctcctactctcaatgatacttttctatcaaaggaatttaatccactggttatagtgggcctcagtaaagatggtacagattacattgagatcattccaaaggaagaggtccagagcagtgaagatgactatgctgaaattgattatgtgccctatgatgacccctacaaaactgatgttaggacaaacatcaactcctccagagatcctgacaacattgcagcatggtacctccgcagcaacaatggaaacagaagaaattattacattgctgctgaagaaatatcctgggattattcagaatttgtacaaagggaaacagatattgaagactctgatgatattccagaagataccacatataagaaagtagtttttcgaaagtacctcgacagcacttttaccaaacgtgatcctcgaggggagtatgaagagcatctcggaattcttggtcctattatcagagctgaagtggatgatgttatccaagttcgttttaaaaatttagcatccagaccgtattctctacatgcccatggactttcctatgaaaaatcatcagagggaaagacttatgaagatgactctcctgaatggtttaaggaagataatgctgttcagccaaatagcagttatacctacgtatggcatgccactgagcgatcagggccagaaagtcctggctctgcctgtcgggcttgggcctactactcagctgtgaacccagaaaaagatattcactcaggcttgataggtcccctcctaatctgccaaaaaggaatactacataaggacagcaacatgcctgtggacatgagagaatttgtcttactatttatgacctttgatgaaaagaagagctggtactatgaaaagaagtcccgaagttcttggagactcacatcctcagaaatgaaaaaatcccatgagtttcacgccattaatgggatgatctacagcttgcctggcctgaaaatgtatgagcaagagtgggtgaggttacacctgctgaacataggcggctcccaagacattcacgtggttcactttcacggccagaccttgctggaaaatggcaataaacagcaccagttaggggtctggccccttctgcctggttcatttaaaactcttgaaatgaaggcatcaaaacctggctggtggctcctaaacacagaggttggagaaaaccagagagcagggatgcaaacgccatttcttatcatggacagagactgtaggatgccaatgggactaagcactggtatcatatctgattcacagatcaaggcttcagagtttctgggttactgggagcccagattagcaagattaaacaatggtggatcttataatgcttggagtgtagaaaaacttgcagcagaatttgcctctaaaccttggatccaggtggacatgcaaaaggaagtcataatcacagggatccagacccaaggtgccaaacactacctgaagtcctgctataccacagagttctatgtagcttacagttccaaccagatcaactggcagatcttcaaagggaacagcacaaggaatgtgatgtattttaatggcaattcagatgcctctacaataaaagagaatcagtttgacccacctattgtggctagatatattaggatctctccaactcgagcctataacagacctacccttcgattggaactgcaaggttgtgaggtaaatggatgttccacacccctgggtatggaaaatggaaagatagaaaacaagcaaatcacagcttcttcgtttaagaaatcttggtggggagattactgggaacccttccgtgcccgtctgaatgcccagggacgtgtgaatgcctggcaagccaaggcaaacaacaataagcagtggctagaaattgatctactcaagatcaagaagataacggcaattataacacagggctgcaagtctctgtcctctgaaatgtatgtaaagagctataccatccactacagtgagcagggagtggaatggaaaccatacaggctgaaatcctccatggtggacaagatttttgaaggaaatactaataccaaaggacatgtgaagaactttttcaaccccccaatcatttccaggtttatccgtgtcattcctaaaacatggaatcaaagtattgcacttcgcctggaactctttggctgtgatatttactagaattgaacattcaaaaacccctggaagagactctttaagacctcaaaccatttagaatgggcaatgtattttacgctgtgttaaatgttaacagttttccactatttctctttcttttctattagtgaataaaattttatac

SEQ ID NO: 490 - protein, 2000 aa, Homo sapien
MFPGCPRLWVLVVLGTSWVGWGSQGTEAAQLRQFYVAAQGISWSYRPEPTNSSLNLSVTSFKKIVYREYEPYFKKEKPQSTISGLLGPTLYAEVGDIIKVHFKNKADKPLSIHPQGIRYSKLSEGASYLDHTFPAEKMDDAVAPGREYTYEWSISEDSGPTHDDPPCLTHIYYSHENLIEDFNSGLIGPLLICKKGTLTEGGTQKTFDKQIVLLFAVFDESKSWSQSSSLMYTVNGYVNGTMPDITVCAHDHISWHLLGMSSGPELFSIHFNGQVLEQNHHKVSAITLVSATSTTANMTVGPEGKWIISSLTPKHLQAGMQAYIDIKNCPKKTRNLKKITREQRRHMKRWEYFIAAEEVIWDYAPVIPANMDKKYRSQHLDNFSNQIGKHYKKVMYTQYEDESFTKHTVNPNMKEDGILGPIIRAQVRDTLKIVFKNMASRPYSIYPHGVTFSPYEDEVNSSFTSGRNNTMIRAVQPGETYTYKWNILEFDEPTENDAQCLTRPYYSDVDIMRDIASGLIGLLLICKSRSLDRRGIQRAADIEQQAVFAVFDENKSWYLEDNINKFCENPDEVKRDDPKFYESNIMSTINGYVPESITTLGFCFDDTVQWHFCSVGTQNEILTIHFTGHSFIYGKRHEDTLTLFPMRGESVTVTMDNVGTWMLTSMNSSPRSKKLRLKFRDVKCIPDDDEDSYEIFEPPESTVMATRKMHDRLEPEDEESDADYDYQNRLAAALGIRSFRNSSLNQEEEEFNLTALALENGTEFVSSNTDIIVGSNYSSPSNISKFTVNNLAEPQKAPSHQQATTAGSPLRHLIGKNSVLNSSTAEHSSPYSEDPIEDPLQPDVTGIRLLSLGAGEFRSQEHAKRKGPKVERDQAAKHRFSWMKLLAHKVGRHLSQDTGSPSGMRPWEDLPSQDTGSPSRMRPWEDPPSDLLLLKQSNSSKILVGRWHLASEKGSYEIIQDTDEDTAVNNWLISPQNASRAWGESTPLANKPGKQSGHPKFPRVRHKSLQVRQDGGKSRLKKSQFLIKTRKKKKEKHTHHAPLSPRTFHPLRSEAYNTFSERRLKHSLVLHKSNETSLPTDLNQTLPSMDFGWIASLPDHNQNSSNDTGQASCPPGLYQTVPPEEHYQTFPIQDPDQMHSTSDPSHRSSSPELSEMLEYDRSHKSFPTDISQMSPSSEHEVWQTVISPDLSQVTLSPELSQTNLSPDLSHTTLSPELIQRNLSPALGQMPISPDLSHTTLSPDLSHTTLSLDLSQTNLSPELSQTNLSPALGQMPLSPDLSHTTISLDFSQTNLSPELSHMTLSPELSQTNLSPALGQMPISPDLSHTTLSLDFSQTNLSPELSQTNLSPALGQMPLSPDPSHTTLSLDLSQTNLSPELSQTNLSPDLSEMPLFADLSQIPLTPDLDQMTLSPDLGETDLSPNFGQMSLSPDLSQVTLSPDISDTTLLPDLSQISPPPDLDQIFYPSESSQSLLLQEFNESFPYPDLGQMPSPSSPTLNDTFLSKEFNPLVIVGLSKDGTDYIEIIPKEEVQSSEDDYAEIDYVPYDDPYKTDVRTNINSSRDPDNIAAWYLRSNNGNRRNYYIAAEEISWDYSEFVQRETDIEDSDDIPEDTTYKKVVFRKYLDSTFTKRDPRGEYEEHLGILGPIIRAEVDDVIQVRFKNLASRPYSLHAHGLSYEKSSEGKTYEDDSPEWFKEDNAVQPNSSYTYVWHATERSGPESPGSACRAWAYYSAVNPEKDIHSGLIGPLLICQKGILHKDSNMPVDMREFVLLFMTFDEKKSWYYEKKSRSSWRLTSSEMKKSHEFHAINGMIYSLPGLKMYEQEWVRLHLLNIGGSQDIHVVHFHGQTLLENGNKQHQLGVWPLLPGSFKTLEMKASKPGWWLLNTEVGENQRAGMQTPFLIMDRDCRMPMGLSTGIISDSQIKASEFLGYWEPRLARLNNGGSYNAWSVEKLAAEFASKPWIQVDMQKEVIITGIQTQGAKHYLKSCYTTEFYVAYSSN

SEQ ID NO: 491 - DNA, 4508 bp, Homo sapien
cgggcagcgtggaccccggatgagttgcttttaggcttgctggcccgcggggctgtccaggcacgcgaggcccctcaggtacgccctctcttccctgcaggatccggccctcaaagacgagggtcacgcacgcgttacaaccccgaaacagtagcacaagatttaatttttaaaagagcgtgtttcttcggggcttgccgttcgttcgtttccagcctcaggaatttatggtcgcctttttgaatgagcaacaaaatgcttcaacaagttccagaaaacataaattttcctgctgaagaagagaaaatcttggagttttggactgaatttaattgttttcaggaatgcttaaagcaatcaaaacataaaccaaaatttaccttctatgatggtcctccttttgcaactggactgcctcactatggacatatacttgcgggtacaattaaagatatagttacaagatatgctcaccagagtgggtttcatgttgacagaagatttggatgggattgccatggcttacctgtggaatatgaaattgataagacactgggaatcagaggaccagaggatgtggccaaaatggggattacagagtataacaatcagtgccgagcaattgtgatgagatattctgctgagtggaagtctactgttagcagacttggccgatggattgactttgacaatgactataaaactctgtatccacaattcatggaatcagtctggtgggtcttcaaacaactctatgataaaggccttgtttatagaggtgtgaaagtcatgcccttctctacggcatgtaacactccactttccaacttcgagtcacaccagaattataaggatgttcaagatccttcagtatttgtaactttccctttggaagaagatgaaactgtatctttagttgcttggacaaccactccctggactctacctagtaaccttgctgtgtgtgttaatccagaaatgcaatatgtgaaaattaaagatgttgccagaggacgattactcattttaatggaagccagattgtcagccctctataaattggagagtgactatgagatccttgaaagatttcctggtgcctatcttaaaggcaagaagtacaggcccctgtttgactatttcctgaagtgtaaagagaatggcgctttcactgtgcttgttgacaactatgtgaaggaagaagaaggcacaggggttgtccaccaagctccttacttcggtgctgaggactatcgggtctgtatggactttaacattattcggaaagactcactccctgtttgccctgtggatgcttcaggctgcttcacaacggaggtgacagatttcgcaggacagtatgtgaaggatgctgacaaaagtatcatcaggactttgaaggaacaaggccgacttctggttgccaccaccttcactcacagctaccctttttgctggagatcagacactcctctaatttacaaagcagtgcccagctggtttgtgcgagtggagaacatggtggaccagctcctaaggaacaatgacctgtgctactgggtcccagagttggtacgagaaaaacgatttggaaattggctgaaagatgcacgtgactggacaatttccagaaacagatactggggcacccccatcccactgtgggtcagcgatgactttgaggaggtggtatgcattgggtcagtggcggaacttgaagaactgtcaggagcaaagatctcagatctccacagagagagtgttgaccacctgaccattccttcacgctgtgggaagggatccttgcaccgcatctctgaagtgtttgactgttggtttgagagtggcagcatgccctatgctcaggttcattacccgtttgaaaacaagagggagtttgaggatgcttttcctgcagatttcattgccgagggcatcgaccaaaccagaggatggttttataccctgctggtgctggccacggccctctttggacaaccgcctttcaagaacgtaattgtgaatgggcttgtcctggcaagtgatggccaaaaaatgagcaaacggaaaaagaattatccagatccagtttccatcatccagaagtatggtgctgatgccctcagattatatctgattaactcccctgtggtgagagcagaaaacctccgctttaaagaagagggtgtgcgggacgtccttaaggatgtactgctcccatggtacaatgcctatcgcttcttaatccagaacgttctgaggctccagaaggaggaagaaatagaatttctctacaatgagaacacggttagagaaagccccaacattacagaccggtggatcctgtccttcatgcagtctctcattggcttctttgagactgaaatggcagcttataggctttatactgtggtgcctcgcctggtcaagtttgtagatattctgaccaattggtatgttagaatgaaccgcagaagattaaagggtgaaaatgggatggaggattgtgtcatggccctagaaaccttgtttagtgttctgctttctctttgcagacttatagctccctacacaccttttctcactgaattgatgtaccagaatctaaaggtgctgattgaccctgtttctgttcaggacaaggacacactcagcattcactacctcatgctgccccgtgttcgagaagaattgattgacaagaaaacagagagtgcagtatctcagatgcagtctgtgattgaacttggaagagtgatcagagaccgaaaaactattcccataaagtatcctttgaaagaaattgtggttatccatcaagatccagaagctcttaaagatatcaagtctttggagaagtatatcattgaggaactcaatgttcgaaaagttacactgtctacagataaaaacaagtatggcattcggctaagggcagaaccagatcacatggtcctggggaagcgtctgaagggagcctttaaggcagtgatgacgtccatcaagcagttgagcagtgaggagctggagcagttccagaagactgggaccattgttgtggaaggccatgaattgcacgatgaagacatccgcctcatgtacacctttgatcaggccacaggtgggactgcgcaatttgaagcacactcagatgctcaggctttggtcctcttagatgtcactcctgaccagtcaatggtagatgaaggaatggctcgggaagtcatcaatcgcatacagaaacttcgcaaaaagtgcaatctggttccaactgatgaaatcacagtgtactataaagcaaagtctgaaggaacatatctgaatagtgttattgaaagccacacagagttcatatttaccaccataaaggctcccttgaaaccatatccagtttctccatcggataaagtccttattcaagaaaaaacacagttgaagggatctgaactggaaattacactcaccagaggatcttcccttcctggtcctgcttgtgcatatgtcaatcttaacatttgtgcaaatggcagtgaacaaggtggagtattgctcctggaaaatccaaaaggtgacaataggttggaccttttaaagctgaagagtgttgtcactagcatttttggtgtgaaaaatacagagctggctgtcttccatgatgaaacagaaatacaaaaccaaactgacttactgagtcttagtggaaaaacactttgtgtgactgcaggatcggctccctctctgatcaacagttctagtactcttctttgtcagtatatcaacctacagctcctgaatgcaaagccacaagagtgtttaatggggacagtgggcactctcctgcttgaaaacccacttgggcagaatggactcacccaccaaggtcttctgtatgaagcagccaaggtgtttggccttcggagcaggaagctaaagctgtttctgaatgagacccaaacgcaggaaattacagaagacatccccgtgaagactttgaatatgaagactgtgtatgtttctgtgttaccaacaacagcagacttctagcatgtacttatcaatgttgttcggtcagcccttccctaattacacctatcccctacacatacatgcacatagacacacacatgaacacactgaagatatttccttcaggtgtgtgtaaaatatgctgcttggattgaaattcaaatgggattgattagtcaagtaacttgagacctcacagtaatcttcacacttaaccttagacacctatgcagtcatgttgggagcaggttacaatgttacttcagcccacagtttatttctattcttgagttcttaagtacagaagatagaagtgatttaaatggcatagtatatatatcattttctggccttttaaaatttatttgagacctcttgatgaaatggacatattatatatttctgccacctggattttcctggataatttgatggaatattttaagtttcagtaaatcagaacaataaacaaactcagatat

SEQ ID NO: 492 - protein, 1262 aa, Homo sapien
MLQQVPENINFPAEEEKILEFWTEFNCFQECLKQSKHKPKFTFYDGPPFATGLPHYGHILAGTIKDIVTRYAHQSGFHVDRRFGWDCHGLPVEYEIDKTLGIRGPEDVAKMGITEYNNQCRAIVMRYSAEWKSTVSRLGRWIDFDNDYKTLYPQFMESVWWVFKQLYDKGLVYRGVKVMPFSTACNTPLSNFESHQNYKDVQDPSVFVTFPLEEDETVSLVAWTTTPWTLPSNLAVCVNPEMQYVKIKDVARGRLLILMEARLSALYKLESDYEILERFPGAYLKGKKYRPLFDYFLKCKENGAFTVLVDNYVKEEEGTGVVHQAPYFGAEDYRVCMDFNIIRKDSLPVCPVDASGCFTTEVTDFAGQYVKDADKSIIRTLKEQGRLLVATTFTHSYPFCWRSDTPLIYKAVPSWFVRVENMVDQLLRNNDLCYWVPELVREKRFGNWLKDARDWTISRNRYWGTPIPLWVSDDFEEVVCIGSVAELEELSGAKISDLHRESVDHLTIPSRCGKGSLHRISEVFDCWFESGSMPYAQVHYPFENKREFEDAFPADFIAEGIDQTRGWFYTLLVLATALFGQPPFKNVIVNGLVLASDGQKMSKRKKNYPDPVSIIQKYGADALRLYLINSPVVRAENLRFKEEGVRDVLKDVLLPWYNAYRFLIQNVLRLQKEEEIEFLYNENTVRESPNITDRWILSFMQSLIGFFETEMAAYRLYTVVPRLVKFVDILTNWYVRMNRRRLKGENGMEDCVMALETLFSVLLSLCRLIAPYTPFLTELMYQNLKVLIDPVSVQDKDTLSIHYLMLPRVREELIDKKTESAVSQMQSVIELGRVIRDRKTIPIKYPLKEIVVIHQDPEALKDIKSLEKYIIEELNVRKVTLSTDKNKYGIRLRAEPDHMVLGKRLKGAFKAVMTSIKQLSSEELEQFQKTGTIVVEGHELHDEDIRLMYTFDQATGGTAQFEAHSDAQALVLLDVTPDQSMVDEGMAREVINRIQKLRKKCNLVPTDEITVYYKAKSEGTYLNSVIESHTEFIFTTIKAPLKPYPVSPSDKVLIQEKTQLKGSELEITLTRGSSLPGPACAYVNLNICANGSEQGGVLLLENPKGDNRLDLLKLKSVVTSIFGVKNTELAVFHDETEIQNQTDLLSLSGKTLCVTAGSAPSLINSSSTLLCQYINLQLLNAKPQECLMGTVGTLLLENPLGQNGLTHQGLLYEAAKVFGLRSRKLKLFLNETQTQEITEDIPVKTLNMKTVYVSVLPTTADF

SEQ ID NO: 493 - DNA, 3030 bp, Homo sapien
ctgcgaggagtcacattaactttgctctagaagacaactttacaaggatctaaaaggaacaggattaaagatgactgaatactgggttccagaaatttaaaacaatcagcttagcaaatcatatattcttctgtggagctgagaattgatgtccgctcttccccgtgatttggaactttccaatcccagagaaaagttgacaaagggactgcccaggactgagtccatatggaagaagaacttcctcttttctctggagacagtggcaagccagtacaggctactctgtcatctttgaagatgttagatgtgggaaagtggccaattttttccctttgttctgaagaagaactacagttaattcgtcaggcttgtgtctttggcagtgctggcaatgaagttttatacactacagtaaatgatgagatttttgtgcttggcacaaactgctgtggctgtttggggttaggtgacgtccagagcaccattgaacctcggagactggattctttaaatggcaaaaaaatagcctgcctcagctatgggagtggtccacatattgtccttgcaacaacagaaggagaagtctttacctggggtcataatgcttatagccagctgggcaatgggacaactaatcatggtttagtgccctgtcatatctctactaatctgtcaaacaaacaagtcattgaagttgcctgtgggtcttaccattctttggtgctaacatctgatggagaggtatttgcctggggttataataactctgggcaggtaggatctggatcaacagttaatcagccaatccctcgaagagtcactggctgcctacaaaataaagtagttgtgaccatagcatgtgggcagatgtgctgcatggcagtagtagacacgggggaggtctatgtctggggttacaacggaaacgggcagcttggactcggcaacagtggcaaccagccaaccccttgcagagtggcagctttgcaaggcatccgtgtccagagggtcgcctgtggctacgcacacacattagtattaacagatgaaggccaagtgtatgcttggggcgccaattcttatgggcagttgggcactggcaataaaagcaaccagtcctatcctactcctgtcactgtggaaaaggacaggattatcgagattgcagcctgtcactccacacacacgtctgcggccaagacgcagggtgggcacgtgtacatgtggggccagtgccggggtcagtccgtgatcctcccgcacctcacccacttctcctgcactgacgacgtgtttgcctgctttgccacgcccgccgtcacgtggcgcctcctctccgtggaacctgatgaccacctcacagtggctgagtcactgaagagggaatttgacaacccggacactgcagacctgaagtttctagttgatggaaagtacatttatgcacataaagtccttctcaagattcgatgtgagcattttcgttcgtcattggaagataacgaggatgatattgtagaaatgagtgaattttcatatcctgtttaccgggccttcctggaatacctatacacagacagcatcagcctttctcctgaggaggcagtaggactgctagacttggctacattttatagagaaaatcgtttgaaaaagctctgccaacaaactatcaagcaaggcatctgcgaggagaatgccatcgctctgctctcggctgcggtgaagtatgatgcacaggatttagaagaattctgcttcaggttttgcataaaccatctgactgtagtaacacaaacatcaggttttgcagaaatggaccatgatctcctgaagaactttatcagcaaagcaagcagagttggagcctttaaaaattgatcccatctgcaggaaagtttttgagcctttccatttcccctgcaaaagccagagatgaatcacttctctttaattaatagtatgtatgatgagctatgtttggctgagtacttgtaactgtcagaagaaggatggtggtgagtggtctttgtctgcctaaacccagagtttatgtagaaagcattgaatgttctgatcagatgtgactaaggtcaaggaaaaaaaattgaaatatcttatttaccatttcctctttttgagtcacttaaattggacacctttggtaccctggtctcagtatatgctattctggcccaaatgttccattattcagctggctgataccacatagatagcttgacaaggagtgctgtctgtccttaccacattttcagcactcagcacagtgccttgtgtataataggcactcaatttattataaatcttcagtatgtcctgagaacagctttagtcatggaatactgggagaaggaataactttcacaaaataaacttaaaacagcctgtaattattgaggttcacattcttctggtatatcattctgagaaattgtggctaatttagaacattgtttagaattgacaaaaggccctggcaattaaattgtcaaggcccaagggctaattttaattttctttttacttggagtcattcattaatttctcacatgggattatggagtatgaagtattatctttgaatgaaattcctgggctgatctgccttacataatcacataaggtcctttgcttttctttgtgttaagagggacttgcctctgtaaatgaaaatgacaatgtgcttttcttgtagttgactttcatgtcactcactataaaataggtctcttaacctggcaccagtataactataaagcactagctgagaaggaactgatacttacatttcatggacagcattaacaagaatgagataaatttgtactttttagatcaaaacaaattacctaattgcaaaagagaaactgaaatggaacatagtctcagattcttctaatgtgtatctcacaatgtcatgtaatgtaaaggaaacccttttggaattagaattcttgttctgatgctgaactatttggtaataaagtgcttatttgcagataacag

SEQ ID NO: 494 - protein, 551 aa, Homo sapien
MEEELPLFSGDSGKPVQATLSSLKMLDVGKWPIFSLCSEEELQLIRQACVFGSAGNEVLYTTVNDEIFVLGTNCCGCLGLGDVQSTIEPRRLDSLNGKKIACLSYGSGPHIVLATTEGEVFTWGHNAYSQLGNGTTNHGLVPCHISTNLSNKQVIEVACGSYHSLVLTSDGEVFAWGYNNSGQVGSGSTVNQPIPRRVTGCLQNKVVVTIACGQMCCMAVVDTGEVYVWGYNGNGQLGLGNSGNQPTPCRVAALQGIRVQRVACGYAHTLVLTDEGQVYAWGANSYGQLGTGNKSNQSYPTPVTVEKDRIIEIAACHSTHTSAAKTQGGHVYMWGQCRGQSVILPHLTHFSCTDDVFACFATPAVTWRLLSVEPDDHLTVAESLKREFDNPDTADLKFLVDGKYIYAHKVLLKIRCEHFRSSLEDNEDDIVEMSEFSYPVYRAFLEYLYTDSISLSPEEAVGLLDLATFYRENRLKKLCQQTIKQGICEENAIALLSAAVKYDAQDLEEFCFRFCINHLTVVTQTSGFAEMDHDLLKNFISKASRVGAFKN

SEQ ID NO: 495 - DNA, 2031 bp, Homo sapien
ggcacgaggcaggccacccgccgctaagctgagaagggagagcgagcttaggaccgcctgcccggggcaaccccgaaccaagctttagccgccgaggccgcgtgtcccaaaggccagtcatccctcctctgtgttgccatgggaattcaaggcctggccaaactaattgctgatgtggcccccagtgccatccgggagaatgacatcaagagctactttggccgtaaggtggccattgatgcctctatgagcatttatcagttcctgattgctgttcgccagggtggggatgtgctgcagaatgaggagggtgagaccaccagccacctgatgggcatgttctaccgcaccattcgcatgatggagaacggcatcaagcccgtgtatgtctttgatggcaagccgccacagctcaagtcaggcgagctggccaaacgcagtgagcggcgggctgaggcagagaagcagctgcagcaggctcaggctgctggggccgagcaggaggtggaaaaattcactaagcggctggtgaaggtcactaagcagcacaatgatgagtgcaaacatctgctgagcctcatgggcatcccttatcttgatgcacccagtgaggcagaggccagctgtgctgccctggtgaaggctggcaaagtctatgctgcggctaccgaggacatggactgcctcaccttcggcagccctgtgctaatgcgacacctgactgccagtgaagccaaaaagctgccaatccaggaattccacctgagccggattctgcaggagctgggcctgaaccaggaacagtttgtggatctgtgcatcctgctaggcagtgactactgtgagagtatccggggtattgggcccaagcgggctgtggacctcatccagaagcacaagagcatcgaggagatcgtgcggcgacttgaccccaacaagtaccctgtgccagaaaattggctccacaaggaggctcaccagctcttcttggaacctgaggtgctggacccagagtctgtggagctgaagtggagcgagccaaatgaagaagagctgatcaagttcatgtgtggtgaaaagcagttctctgaggagcgaatccgcagtggggtcaagaggctgagtaagagccgccaaggcagcacccagggccgcctggatgatttcttcaaggtgaccggctcactctcttcagctaagcgcaaggagccagaacccaagggatccactaagaagaaggcaaagactggggcagcagggaagtttaaaaggggaaaataaatgtgtttccccattatacctccttcaccccagaatatttgccgtcttgtacccttaagagctacagctagagaaaccttcacggggtggagagaggattctaaggcttttctagcgtgacccttttcagtagtgctagtcccttttttacttgatcttaatggcaagaaggccacagaggtacttttccttttttagctcaggaaaatatgtcaggctcaaaccacttctcaggcagtttaatggacactaagtccattgttacatgaaagtgatagatagcaacaagttttggagaagagagagggagataaaagggggagacaaaagatgtacagaaatgatttcctggctggccaactggtggccagtgggaggtgatggtggacctagactgtgcttttctgtcttgttcagccttgacccaccttgagagagagccaccaggaaggcgcatcttagcagatgggaggaactgctgagagaagatgggcagaaagctggagcccctggagttggctgtgtctgtgtttgtgactgattactggctgtgtcttgggtgggcagaaactcgaacttgctatgtaatttgtgtctagttattcagaggagtaagatggtgatgttcacctggcaatcagctgagttgagactttggaataagacactggttttcatgcgctgtttttgttttaaagttatgaagaaaaaagtcaataaaattctaaaagtaaaaaaaaaaaaaaaaaa

SEQ ID NO: 496 - protein, 380 aa, Homo sapien
MGIQGLAKLIADVAPSAIRENDIKSYFGRKVAIDASMSIYQFLIAVRQGGDVLQNEEGETTSHLMGMFYRTIRMMENGIKPVYVFDGKPPQLKSGELAKRSERRAEAEKQLQQAQAAGAEQEVEKFTKRLVKVTKQHNDECKHLLSLMGIPYLDAPSEAEASCAALVKAGKVYAAATEDMDCLTFGSPVLMRHLTASEAKKLPIQEFHLSRILQELGLNQEQFVDLCILLGSDYCESIRGIGPKRAVDLIQKHKSIEEIVRRLDPNKYPVPENWLHKEAHQLFLEPEVLDPESVELKWSEPNEEELIKFMCGEKQFSEERIRSGVKRLSKSRQGSTQGRLDDFFKVTGSLSSAKRKEPEPKGSTKKKAKTGAAGKFKRGK

SEQ ID NO: 497 - DNA, 2719 bp, Homo sapien
agccctccccaacccgggcgttccccagcgaggcttccttcccatcctcctgaccaccggggcttttcgtgagctcgtctctgatctcgcgcaagagtgacacacaggtgttcaaagacgcttctggggagtgagggaagcggtttacgagtgacttggctggagcctcaggggcgggcactggcacggaacacaccctgaggccagccctggctgcccaggcggagctgcctcttctcccgcgggttggtggacccgctcagtacggagttggggaagctctttcacttcggaggattgctcaacaaccatgctgggcatctggaccctcctacctctggttcttacgtctgttgctagattatcgtccaaaagtgttaatgcccaagtgactgacatcaactccaagggattggaattgaggaagactgttactacagttgagactcagaacttggaaggcctgcatcatgatggccaattctgccataagccctgtcctccaggtgaaaggaaagctagggactgcacagtcaatggggatgaaccagactgcgtgccctgccaagaagggaaggagtacacagacaaagcccatttttcttccaaatgcagaagatgtagattgtgtgatgaaggacatggcttagaagtggaaataaactgcacccggacccagaataccaagtgcagatgtaaaccaaactttttttgtaactctactgtatgtgaacactgtgacccttgcaccaaatgtgaacatggaatcatcaaggaatgcacactcaccagcaacaccaagtgcaaagaggaaggatccagatctaacttggggtggctttgtcttcttcttttgccaattccactaattgtttgggtgaagagaaaggaagtacagaaaacatgcagaaagcacagaaaggaaaaccaaggttctcatgaatctccaaccttaaatcctgaaacagtggcaataaatttatctgatgttgacttgagtaaatatatcaccactattgctggagtcatgacactaagtcaagttaaaggctttgttcgaaagaatggtgtcaatgaagccaaaatagatgagatcaagaatgacaatgtccaagacacagcagaacagaaagttcaactgcttcgtaattggcatcaacttcatggaaagaaagaagcgtatgacacattgattaaagatctcaaaaaagccaatctttgtactcttgcagagaaaattcagactatcatcctcaaggacattactagtgactcagaaaattcaaacttcagaaatgaaatccaaagcttggtctagagtgaaaaacaacaaattcagttctgagtatatgcaattagtgtttgaaaagattcttaatagctggctgtaaatactgcttggttttttactgggtacattttatcatttattagcgctgaagagccaacatatttgtagatttttaatatctcatgattctgcctccaaggatgtttaaaatctagttgggaaaacaaacttcatcaagagtaaatgcagtggcatgctaagtacccaaataggagtgtatgcagaggatgaaagattaagattatgctctggcatctaacatatgattctgtagtatgaatgtaatcagtgtatgttagtacaaatgtctatccacaggctaaccccactctatgaatcaatagaagaagctatgaccttttgctgaaatatcagttactgaacaggcaggccactttgcctctaaattacctctgataattctagagattttaccatatttctaaactttgtttataactctgagaagatcatatttatgtaaagtatatgtatttgagtgcagaatttaaataaggctctacctcaaagacctttgcacagtttattggtgtcatattatacaatatttcaattgtgaattcacatagaaaacattaaattataatgtttgactattatatatgtgtatgcattttactggctcaaaactacctacttctttctcaggcatcaaaagcattttgagcaggagagtattactagagctttgccacctctccatttttgccttggtgctcatcttaatggcctaatgcacccccaaacatggaaatatcaccaaaaaatacttaatagtccaccaaaaggcaagactgcccttagaaattctagcctggtttggagatactaactgctctcagagaaagtagctttgtgacatgtcatgaacccatgtttgcaatcaaagatgataaaatagattcttatttttcccccacccccgaaaatgttcaataatgtcccatgtaaaacctgctacaaatggcagcttatacatagcaatggtaaaatcatcatctggatttaggaattgctcttgtcatacccccaagtttctaagatttaagattctccttactactatcctacgtttaaatatctttgaaagtttgtattaaatgtgaattttaagaaataatatttatatttctgtaaatgtaaactgtgaagatagttataaactgaagcagatacctggaaccacctaaagaacttccatttatggaggatttttttgccccttgtgtttggaattataaaatataggtaaaagtacgtaattaaataatgtttttggtaaaaaaaaaaaaaaaaaaaaaaaaaaaaaaaaaaaaaaaaaaaaaaaaaaaaaaaaaaaaaaaaaaa

SEQ ID NO: 498 - protein, 335 aa, Homo sapien
MLGIWTLLPLVLTSVARLSSKSVNAQVTDINSKGLELRKTVTTVETQNLEGLHHDGQFCHKPCPPGERKARDCTVNGDEPDCVPCQEGKEYTDKAHFSSKCRRCRLCDEGHGLEVEINCTRTQNTKCRCKPNFFCNSTVCEHCDPCTKCEHGIIKECTLTSNTKCKEEGSRSNLGWLCLLLLPIPLIVWVKRKEVQKTCRKHRKENQGSHESPTLNPETVAINLSDVDLSKYITTIAGVMTLSQVKGFVRKNGVNEAKIDEIKNDNVQDTAEQKVQLLRNWHQLHGKKEAYDTLIKDLKKANLCTLAEKIQTIILKDITSDSENSNFRNEIQSLV

SEQ ID NO: 499 - DNA, 2604 bp, Homo sapien
cgagcgtcgggtcccagagccgggcgcggctggggcccgaggctagcatctctcgggagccgcaaggcgagagctgcaaagtttaattagacacttcagaattttgatcacctaatgttgatttcagatgtaaaagtcaagagaagactctaaaaatagcaaagatgcttttgagccagaatgccttcatcgtcagatcacttaatttggttctcatggtgtatatcagcctcgtgtttggtatttcatatgattcgcctgattacacagatgaatcttgcactttcaagatatcattgcgaaatttccggtccatcttatcatgggaattaaaaaaccactccattgtaccaactcactatacattgctgtatacaatcatgagtaaaccagaagatttgaaggtggttaagaactgtgcaaataccacaagatcattttgtgacctcacagatgagtggagaagcacacacgaggcctatgtcaccgtcctagaaggattcagcgggaacacaacgttgttcagttgctcacacaatttctggctggccatagacatgtcttttgaaccaccagagtttgagattgttggttttaccaaccacattaatgtgatggtgaaatttccatctattgttgaggaagaattacagtttgatttatctctcgtcattgaagaacagtcagagggaattgttaagaagcataaacccgaaataaaaggaaacatgagtggaaatttcacctatatcattgacaagttaattccaaacacgaactactgtgtatctgtttatttagagcacagtgatgagcaagcagtaataaagtctcccttaaaatgcaccctccttccacctggccaggaatcagaattttcataactttttagcctggccatttcctaacctgccaccgttggaagccatggatatggtggaggtcatttacatcaacagaaagaagaaagtgtgggattataattatgatgatgaaagtgatagcgatactgaggcagcgcccaggacaagtggcggtggctataccatgcatggactgactgtcaggcctctgggtcaggcctctgccacctctacagaatcccagttgatagacccggagtccgaggaggagcctgacctgcctgaggttgatgtggagctccccacgatgccaaaggacagccctcagcagttggaactcttgagtgggccctgtgagaggagaaagagtccactccaggacccttttcccgaagaggactacagctccacggaggggtctgggggcagaattaccttcaatgtggacttaaactctgtgtttttgagagttcttgatgacgaggacagtgacgacttagaagcccctctgatgctatcgtctcatctggaagagatggttgacccagaggatcctgataatgtgcaatcaaaccatttgctggccagcggggaagggacacagccaacctttcccagcccctcttcagagggcctgtggtccgaagatgctccatctgatcaaagtgacacttctgagtcagatgttgaccttggggatggttatataatgagatgactccaaaactattgaatgaacttggacagacaagcacctacagggttctttgtctctgcatcctaacttgctgccttatcgtctgcaagtgttctccaagggaaggaggaggaaactgtggtgttcctttcttccaggtgacatcacctatgcacattcccagtatggggaccatagtatcattcagtgcattgtttacatattcaaagtggtgcactttgaaggaagcacatgtgcacctttcctttacactaatgcacttaggatgtttctgcatcatgtctaccagggagcagggttccccacagtttcagaggtggtccaggaccctatgatatttctcttctttcgttctttttttttttttttttgagacagagtctcgttctgtcgcccaagctggagcgcaatggtgtgatcttggctcactgcaacatccgcctcccaggttcaagtgattctcctgcctcagcctccctcgcaagtagctgggattacaggcgcctgccaccatgcctagcaaatttttgtatttttagtagagacaggattttaccatgttggccaggctggtctcaaactcctgacctcaagtgatctgccctcctcagcctcgtaaagtgctgggattacaggggtgagccgctgtgcctggctggccctgtgatatttctgtgaaataaattgggccagggtgggagcagggaaagaaaaggaaaatagtagcaagagctgcaaagcaggcagcaagggaggaggagagccaggtgagcagtggagagaaggggggccctgcacaaggaaacagggaagagccatcgaagtttcagtcggtgagccttgggcactcacccatgtcacatcctgtctcctgcaattggaattccaccttgtccagccctccccagttaaagtggggaagacagactttaggatcacgtgtgtgactaatacagaaaggaaacatggcgtcggggagagggataaaacctgaatgccatattttaagttaaaaaaaaaaaa

SEQ ID NO: 500 - protein, 239 aa, Homo sapien [sequence omitted]

SEQ ID NO: 501 - DNA, 1702 bp, Homo sapien
ggagtcgaccgctcgggcagcgcaccgccacgagagcccgggacgcgggaaagaccgaaaggaagaggaagaggcaccggtggccatggggctggaggcggcgcgcgagctggagtgcgcggcgctgggcacgctgctgcgggatccgcgggaggcggaacgcacgctgctgctggactgccgccccttcctggccttctgccggcgccacgtgcgcgccgcgcggccagtgccttggaacgcgctgctgcggcgccgcgcgcgcggccctcctgccgccgttctcgcctgcctgctgcccgaccgcgcgctgcggacgcgcctggtccgcggggagctggcgcgggccgtggtgctggacgagggcagtgcctcggtggcggagctccggcccgacagcccggctcatgtgctgctggccgcgctgctgcacgagacccgcgcggggcccactgccgtgtacttcctgcgaggaggcttcgacggcttccagggctgctgtcccgatctgtgctctgaggcccccgcccctgcgctgccgccaacaggggacaaaaccagccgctccgactccagggctcctgtctacgaccagggtggccctgtggagatcttgccctacctgttcctgggcagctgcagtcactcgtcagacctgcaggggctgcaggcctgtggcatcacagccgtcctcaacgtgtccgccagctgccccaaccactttgagggccttttccgctacaagagtatccctgtggaggacaaccagatggtggagatcagtgcctggttccaggaggccataggcttcattgactgggtgaagaacagcggaggccgggtgctggtgcactgccaggcgggtatctcgcgctctgccaccatctgtctggcatacctcatgcagagtcgccgtgtgcggctggacgaggcctttgacttcgttaagcagcgccggggggtcatctcccccaacttcagtttcatggggcagctgctgcagtttgagacccaggtgctgtgtcactgaggtggtgcccctctgcctgcctgccccactgtgctggcaggagctgactgtggactggtgggctcccctctgggccagcacagtcccctcacctccggcagggctgctacctcctcagagtttcagaagcccccacatgggggctctaggaatgccggcatgctggtctttccgacctggtgctcttctgctgggggactgaggctggccctcattcggggtcgggaaccaagggtgtgtctgctctttccctccccatcctctggcagaaatcagctagacgctataccgtggactctccctggtccaccaccatgttgaagcccttggcagcctgagagctccaaggaacaagctgtgacaaccaggagccctgtctgtgggttcgtctgcccagggcctggagcccaagccctgtgttcctggggaagctggggacttgggaagtgatgggtgtgtcatgttgcgtgtgtctgtctgtgagcctttcacacctgtgctggcgctggaaaattatttgtgctcagctgacatttaacacttcctcccccgcttcctcctagccctgtgggcaggggttggaaacttagcactttatatttatacagaacattcaggatttgtcaataaaatattgttatatttaaaaaaaaaaaaaaaaaaaaaaaaaaa

SEQ ID NO: 502 - protein, 314 aa, Homo sapien
MGLEAARELECAALGTLLRDPREAERTLLLDCRPFLAFCRRHVRAARPVPWNALLRRRARGPPAAVLACLLPDRALRTRLVRGELARAVVLDEGSASVAELRPDSPAHVLLAALLHETRAGPTAVYFLRGGFDGFQGCCPDLCSEAPAPALPPTGDKTSRSDSRAPVYDQGGPVEILPYLFLGSCSHSSDLQGLQACGITAVLNVSASCPNHFEGLFRYKSIPVEDNQMVEISAWFQEAIGFIDWVKNSGGRVLVHCQAGISRSATICLAYLMQSRRVRLDEAFDFVKQRRGVISPNFSFMGQLLQFETQVLCH

SEQ ID NO: 503 - DNA, 888 bp, Homo sapien
gcatggcggccaccaggtgcctgcgctggggcctgagccgagccggagtctggctgctcccaccgcccgcacggtgcccacgccgggcgctgcacaagcagaaagacggcactgagttcaagagcatctacagcctggacaagctctaccccgaatctcagggctcggacaccgcctggagggtcccgaatggtgcaaagcaagccgacagtgacatccctctagatcgcttgacaatatcttattgtcggagtagtggtcctggggggcagaatgtgaacaaagtgaattccaaggcagaagtcaggttccatttggcaactgccgagtggatcgcggagcccgtgcggcagaagatagccatcacgcataaaaacaagatcaacaggttaggagagttgatccttacctctgagagcagccgctatcagttccggaatctggcagattgcctgcagaaaattcgagacatgatcactgaggccagccagacaccgaaggagccaacaaaagaagatgttaaacttcatagaatcaggatagaaaacatgaatcgggaaaggctgagacaaaagagaattcattctgctgtaaagacaagcaggagggtcgacatggactgaaatcaccctctgcagctgggagggctcttctgggcgtccgggcagctgcagctgagaggactttcacaccataaggagatttctgtttttctttttggctgttaatgcttgtctataacattggagccatcacaagaatgttcatttggaatgaaggctgcaggcactggttgcagacgtctttataggcagtcaccatgttgtcaaaccttaataatgcacctcatgtattagtcacaataaaaatcagaactcaaaaaaaaaa

SEQ ID NO: 504 - protein, 206 aa, Homo sapien
MAATRCLRWGLSRAGVWLLPPPARCPRRALHKQKDGTEFKSIYSLDKLYPESQGSDTAWRVPNGAKQADSDIPLDRLTISYCRSSGPGGQNVNKVNSKAEVRFHLATAEWIAEPVRQKIAITHKNKINRLGELILTSESSRYQFRNLADCLQKIRDMITEASQTPKEPTKEDVKLHRIRIENMNRERLRQKRIHSAVKTSRRVDMD

SEQ ID NO: 505 - DNA, 1067 bp, Homo sapien
gcgtctgccaggagctacggccggaagatggcggcggccgcagagttgtcgctactggagaagtccctgggactgagtaaggggaataaatacagtgctcagggcgagcgacagattccagttcttcagacaaacaatggtccaagtctaacaggattgactactatagcagctcatctagtcaagcaagccaacaaagaatatttgctggggagtactgcagaagaaaaagcaatcgttcagcagtggttagaatacagggtcactcaagtagatgggcactccagtaaaaatgacatccacacactgttgaaggatcttaattcatatcttgaagataaagtctaccttacagggtataactttacattagcagatatactattgtactatggacttcatcgctttatagttgacctgacagttcaagaaaaggagaaatatcttaatgtgtctcgctggttttgtcacattcagcattatccaggcatcaggcaacatctgtctagtgttgtcttcatcaagaacagactatatactaattcccactagaagctgtccatgccatacagaagatctattaaaagtgttttaaatggaaaatgtactctagaccacaggactaatgtaaattaatatacagtcattcattatttgttgaagttgatagaatttttgaagtgtaaacttgtgtctgaatgttttatttgttctttagctgaagttttgcaatttttatgtcaaaattcaattgctattaaacaagttgagatccagttataaattaaccttgtttttagtagatgacatttatttcaataaaagttgcaaatcgggcttaatcttaaaattggtggtcatttcaatggttgacatatttggctatttattaacctctctttcatattctaaaattcattttccccttatggatatttatggtagtttgttaagaactgataaattgtgccaaggaagccaaaagggaagacagatggatttgttttaaaatgtttatgtgagctagtaaatgtgggaaaaaaaaaaaaaaaaaaaaaaaaaaaaaa

SEQ ID NO: 506 - protein, 174 aa, Homo sapien
MAAAAELSLLEKSLGLSKGNKYSAQGERQIPVLQTNNGPSLTGLTTIAAHLVKQANKEYLLGSTAEEKAIVQQWLEYRVTQVDGHSSKNDIHTLLKDLNSYLEDKVYLTGYNFTLADILLYYGLHRFIVDLTVQEKEKYLNVSRWFCHIQHYPGIRQHLSSVVFIKNRLYTNSH

SEQ ID NO: 507 - DNA, 3632 bp, Homo sapien
aaagagctggaggcgcgcaggccggctccgctccggccccggacgatgcggcgcgcccaggatgctgccgtgcctcgtagtgctgctggcggcgctcctcagcctccgtcttggctcagacgctcatgggacagagctgcccagccctccgtctgtgtggtttgaagcagaatttttccaccacatcctccactggacacccatcccaaatcagtctgaaagtacctgctatgaagtggcgctcctgaggtatggaatagagtcctggaactccatctccaactgtagccagaccctgtcctatgaccttaccgcagtgaccttggacctgtaccacagcaatggctaccgggccagagtgcgggctgtggacggcagccggcactccaactggaccgtcaccaacacccgcttctctgtggatgaagtgactctgacagttggcagtgtgaacctagagatccacaatggcttcatcctcgggaagattcagctacccaggcccaagatggcccccgcgaatgacacatatgaaagcatcttcagtcacttccgagagtatgagattgccattcgcaaggtgccgggaaacttcacgttcacacacaagaaagtaaaacatgaaaacttcagcctcctaacctctggagaagtgggagagttctgtgtccaggtgaaaccatctgtcgcttcccgaagtaacaaggggatgtggtctaaagaggagtgcatctccctcaccaggcagtatttcaccgtgaccaacgtcatcatcttctttgcctttgtcctgctgctctccggagccctcgcctactgcctggccctccagctgtatgtgcggcgccgaaagaagctacccagtgtcctgctcttcaagaagcccagccccttcatcttcatcagccagcgtccctccccagagacccaagacaccatccacccgcttgatgaggaggcctttttgaaggtgtccccagagctgaagaacttggacctgcacggcagcacagacagtggctttggcagcaccaagccatccctgcagactgaagagccccagttcctcctccctgaccctcacccccaggctgacagaacgctgggaaacggggagccccctgtgctgggggacagctgcagtagtggcagcagcaatagcacagacagcgggatctgcctgcaggagcccagcctgagccccagcacagggcccacctgggagcaacaggtggggagcaacagcaggggccaggatgacagtggcattgacttagttcaaaactctgagggccgggctggggacacacagggtggctcggccttgggccaccacagtcccccggagcctgaggtgcctggggaagaagacccagctgctgtggcattccagggttacctgaggcagaccagatgtgctgaagagaaggcaaccaagacaggctgcctggaggaagaatcgcccttgacagatggccttggccccaaattcgggagatgcctggttgatgaggcaggcttgcatccaccagccctggccaagggctatttgaaacaggatcctctagaaatgactctggcttcctcaggggccccaacgggacagtggaaccagcccactgaggaatggtcactcctggccttgagcagctgcagtgacctgggaatatctgactggagctttgcccatgaccttgcccctctaggctgtgtggcagccccaggtggtctcctgggcagctttaactcagacctggtcaccctgcccctcatctctagcctgcagtcaagtgagtgactcgggctgagaggctgcttttgattttagccatgcctgctcctctgcctggaccaggaggagggccctggggcagaagttaggcacgaggcagtctgggcacttttctgcaagtccactggggctggcccagccaggctgcagggctggtcagggtgtctggggcaggaggaggccaactcactgaactagtgcagggtatgtgggtggcactgacctgttctgttgactggggccctgcagactctggcagagctgagaagggcagggaccttctccctcctaggaactctttcctgtatcataaaggattatttgctcaggggaaccatggggctttctggagttgtggtgaggccaccaggctgaagtcagctcagacccagacctccctgcttaggccactcgagcatcagagcttccagcaggaggaagggctgtaggaatggaagcttcagggccttgctgctggggtcatttttaggggaaaaaggaggatatgatggtcacatggggaacctcccctcatcgggcctctggggcaggaagcttgtcactggaagatcttaaggtatatattttctggacactcaaacacatcataatggattcactgaggggagacaaagggagccgagaccctggatggggcttccagctcagaacccatccctctggtgggtacctctggcacccatctgcaaatatctccctctctccaacaaatggagtagcatccccctggggcacttgctgaggccaagccactcacatcctcactttgctgccccaccatcttgctgacaacttccagagaagccatggttttttgtattggtcataactcagccctttgggcggcctctgggcttgggcaccagctcatgccagccccagagggtcagggttggaggcctgtgcttgtgtttgctgctaatgtccagctacagacccagaggataagccactgggcactgggctggggtccctgccttgttggtgttcagctgtgtgattttggactagccacttgtcagagggcctcaatctcccatctgtgaaataaggactccacctttaggggaccctccatgtttgctgggtattagccaagctggtcctgggagaatgcagatactgtccgtggactaccaagctggcttgtttcttatgccagaggctaacagatccaatgggagtccatggtgtcatgccaagacagtatcagacacagccccagaagggggcattatgggccctgcctccccataggccatttggactctgccttcaaacaaaggcagttcagtccacaggcatggaagctgtgaggggacaggcctgtgcgtgccatccagagtcatctcagccctgcctttctctggagcattctgaaaacagatattctggcccagggaatccagccatgacccccacccctctgccaaagtactcttaggtgccagtctggtaactgaactccctctggaggcaggcttgagggaggattcctcagggttcccttgaaagctttatttatttattttgttcatttatttattggagaggcagcattgcacagtgaaagaattctggatatctcaggagccccgaaattctagctctgactttgctgtttccagtggtatgaccttggagaagtcacttatcctcttggagcctcagtttcctcatctgcagaataatgactgacttgtctaattcatagggatgtgaggttctgctgaggaaatgggtatgaatgtgccttgaacacaaagctctgtcaataagtgatacatgttttttattccaataaattgtcaagaccaca

SEQ ID NO: 508 - protein, 578 aa, Homo sapien
MLPCLVVLLAALLSLRLGSDAHGTELPSPPSVWFEAEFFHHILHWTPIPNQSESTCYEVALLRYGIESWNSISNCSQTLSYDLTAVTLDLYHSNGYRARVRAVDGSRHSNWTVTNTRFSVDEVTLTVGSVNLEIHNGFILGKIQLPRPKMAPANDTYESIFSHFREYEIAIRKVPGNFTFTHKKVKHENFSLLTSGEVGEFCVQVKPSVASRSNKGMWSKEECISLTRQYFTVTNVIIFFAFVLLLSGALAYCLALQLYVRRRKKLPSVLLFKKPSPFIFISQRPSPETQDTIHPLDEEAFLKVSPELKNLDLHGSTDSGFGSTKPSLQTEEPQFLLPDPHPQADRTLGNGEPPVLGDSCSSGSSNSTDSGICLQEPSLSPSTGPTWEQQVGSNSRGQDDSGIDLVQNSEGRAGDTQGGSALGHHSPPEPEVPGEEDPAAVAFQGYLRQTRCAEEKATKTGCLEEESPLTDGLGPKFGRCLVDEAGLHPPALAKGYLKQDPLEMTLASSGAPTGQWNQPTEEWSLLALSSCSDLGISDWSFAHDLAPLGCVAAPGGLLGSFNSDLVTLPLISSLQSSE

SEQ ID NO: 509 - DNA, 1824 bp, Homo sapien
cagctctctgtcagaatggccaccatggtaccatccgtgttgtggcccagggcctgctggactctgctggtctgctgtctgctgaccccaggtgtccaggggcaggagttccttttgcgggtggagccccagaaccctgtgctctctgctggagggtccctgtttgtgaactgcagtactgattgtcccagctctgagaaaatcgccttggagacgtccctatcaaaggagctggtggccagtggcatgggctgggcagccttcaatctcagcaacgtgactggcaacagtcggatcctctgctcagtgtactgcaatggctcccagataacaggctcctctaacatcaccgtgtacgggctcccggagcgtgtggagctggcacccctgcctccttggcagccggtgggccagaacttcaccctgcgctgccaagtggagggtgggtcgccccggaccagcctcacggtggtgctgcttcgctgggaggaggagctgagccggcagcccgcagtggaggagccagcggaggtcactgccactgtgctggccagcagagacgaccacggagcccctttctcatgccgcacagaactggacatgcagccccaggggctgggactgttcgtgaacacctcagccccccgccagctccgaacctttgtcctgcccgtgacccccccgcgcctcgtggccccccggttcttggaggtggaaacgtcgtggccggtggactgcaccctagacgggctttttccagcctcagaggcccaggtctacctggcgctgggggaccagatgctgaatgcgacagtcatgaaccacggggacacgctaacggccacagccacagccacggcgcgcgcggatcaggagggtgcccgggagatcgtctgcaacgtgaccctagggggcgagagacgggaggcccgggagaacttgacggtctttagcttcctaggacccattgtgaacctcagcgagcccaccgcccatgaggggtccacagtgaccgtgagttgcatggctggggctcgagtccaggtcacgctggacggagttccggccgcggccccggggcagccagctcaacttcagctaaatgctaccgagagtgacgacggacgcagcttcttctgcagtgccactctcgaggtggacggcgagttcttgcacaggaacagtagcgtccagctgcgagtcctgtatggtcccaaaattgaccgagccacatgcccccagcacttgaaatggaaagataaaacgagacacgtcctgcagtgccaagccaggggcaacccgtaccccgagctgcggtgtttgaaggaaggctccagccgggaggtgccggtggggatcccgttcttcgtcaacgtaacacataatggtacttatcagtgccaagcgtccagctcacgaggcaaatacaccctggtcgtggtgatggacattgaggctgggagctcccactttgtccccgtcttcgtggcggtgttactgaccctgggcgtggtgactatcgtactggccttaatgtacgtcttcagggagcaccaacggagcggcagttaccatgttagggaggagagcacctatctgcccctcacgtctatgcagccgacagaagcaatgggggaagaaccgtccagagctgagtgacgctgggatccgggatcaaagttggcgggggcttggctgtgccctcagattccgcaccaataaagccttcaaactccctaaaaaaaaaaaaaaaaaaaaaaaaaaaaaaaaaaaaaaaaaaaaaaaaaaaaaaaaaaaaaaaaaaaaaaaaaaaaaaaaaaaaaa

SEQ ID NO: 510 - protein, 547 aa, Homo sapien
MATMVPSVLWPRACWTLLVCCLLTPGVQGQEFLLRVEPQNPVLSAGGSLFVNCSTDCPSSEKIALETSLSKELVASGMGWAAFNLSNVTGNSRILCSVYCNGSQITGSSNITVYGLPERVELAPLPPWQPVGQNFTLRCQVEGGSPRTSLTVVLLRWEEELSRQPAVEEPAEVTATVLASRDDHGAPFSCRTELDMQPQGLGLFVNTSAPRQLRTFVLPVTPPRLVAPRFLEVETSWPVDCTLDGLFPASEAQVYLALGDQMLNATVMNHGDTLTATATATARADQEGAREIVCNVTLGGERREARENLTVFSFLGPIVNLSEPTAHEGSTVTVSCMAGARVQVTLDGVPAAAPGQPAQLQLNATESDDGRSFFCSATLEVDGEFLHRNSSVQLRVLYGPKIDRATCPQHLKWKDKTRHVLQCQARGNPYPELRCLKEGSSREVPVGIPFFVNVTHNGTYQCQASSSRGKYTLVVVMDIEAGSSHFVPVFVAVLLTLGVVTIVLALMYVFREHQRSGSYHVREESTYLPLTSMQPTEAMGEEPSRAE

SEQ ID NO: 511 - DNA, 916 bp, Homo sapien
acttctcgctcgacacagccagagctggaggtgggtgcccggcacggaggggcctgcggaccaatggctctgccctgcaccttagggctcgggatgctgctggccctgccaggggccttgggctcgggtggcagcgcggaggacagcgtgggctccagctctgtcaccgttgtcctgctgctgctgctgctcctactgctggccactggcctagcactggcctggcgccgcctcagccgtgactcagggggctactaccacccggcccgcctaggtgccgcgctgtggggccgcacgcggcgcctgctctgggccagccccccaggtcgctggctgcaggcccgagctgagctggggtccacagacaatgaccttgagcgacaggaggatgagcaggacacagactatgaccacgtcgcggatggtggcctgcaggctgaccctggggaaggcgagcagcaatgtggagaggcgtccagcccagagcaggtccccgtgcgggctgaggaagccagagacagtgacacggagggcgacctggtcctcggctccccaggaccagcgagcgcagggggcagtgctgaggccctgctgagtgacctgcacgcctttgctggcagcgcagcctgggatgacagcgccagggcagctgggggccagggcctccatgtcaccgcactgtagaggccggtcttggtgtcccatccctgtcacagccgctcactccccgtgcctctgcttcccaagatgccatggctggactggacccccagcccacatgaccatgcctcagactgtcacccctaccagttcccaagtccatgtgtaccccgctcaccacgggaacggccccccccaaccacaggcatcaggcaaccatttgaaataaaactccttcagcctgtgaaaaaaaaaa

SEQ ID NO: 512 - protein, 206 aa, Homo sapien
MALPCTLGLGMLLALPGALGSGGSAEDSVGSSSVTVVLLLLLLLLLATGLALAWRRLSRDSGGYYHPARLGAALWGRTRRLLWASPPGRWLQARAELGSTDNDLERQEDEQDTDYDHVADGGLQADPGEGEQQCGEASSPEQVPVRAEEARDSDTEGDLVLGSPGPASAGGSAEALLSDLHAFAGSAAWDDSARAAGGQGLHVTAL

SEQ ID NO: 513 - DNA, 822 bp, Homo sapien
ggagggggcatggcggatactgtgttgtttgagtttcttcacacggagatggtggctgagctgtgggctcacgaccccgaccccggcccgggggtgagcgccgggctccgtggggaggaagcgggggccaccaagggacagaagatgagcctgtcggtcctggagggtatggggttccgtgtgggccaggctctaggcgagaggctgccccgggagacgctggccttcagggaggagctggatgtcctcaagttcttgtgcaaagacctgtgggtggcggtgttccagaagcagatggacagcctgcgcaccaatcaccaggggacctacgtcctgcaagacaacagcttccccctcctcctcccgatggcctctggcctgcagtatctggaggaagcacccaagttcctggccttcacctgcggcctcctgcgcggcgccctctataccctgggcattgagagcgtggtcaccgcctccgtggcagccctgcccgtctgtaagttccaggtggtgattccgaaatcctaagcctgcctcgcacctgctgagccgcactgctgcccctggcctcaccggcctcaggagacggtggggccgctgcatttcggggtggtcttgggaatcccaggccctaggggtcacatttgctcaggaagtgggtatcaaattgaggtgggggtgtcagaggaggcaaaggggtcccagctgcggtcaggactgtggtgggattcccgcctcggcagcgtcactgcccagtagctgctcaataaaggctgtgtgtgtggaatctgaaaaaaaaaaaaaaaaaaaaaaaaaaaa

SEQ ID NO: 514 - protein, 173 aa, Homo sapien
MADTVLFEFLHTEMVAELWAHDPDPGPGVSAGLRGEEAGATKGQKMSLSVLEGMGFRVGQALGERLPRETLAFREELDVLKFLCKDLWVAVFQKQMDSLRTNHQGTYVLQDNSFPLLLPMASGLQYLEEAPKFLAFTCGLLRGALYTLGIESVVTASVAALPVCKFQVVIPKS

SEQ ID NO: 515 - DNA, 3096 bp, Homo sapien
cgggcgcccagagggcaaatgaggggcggcggggtggcgggtcggggggagacgcggaatttcccagcgcgggggctctggcttaccctgcaaccgggcagtctctttctgtttacggagagaaaggggaaatggaaaagtcggggaggcggtggctggcgtccgctgcgccgcccctgggcaggctcagacgccgtgagtcaggggcagagcagggcggtctgagcgtgcgggcgacgcgggtctcactcgtccgctccgctctggactgcgcgccacgctctggggtccggcgccctggttcctgcttctgccgctgccgccgccggatcccagtggcccggcgtgctcggctcccacaggcctgcagccagcatcgcaccgaaccttcggggggccgcggctggagcgctcggccggcgtgggagcgccaaggccgcagatgcaatcttcttaccgcgaagaagccaggggaataggtagccacatcttgtttgcagataagaaaggaagctaacgcagtatctgcaaagccaggagtctgactcagtacttttctcactcatgcatacaaagcagctaaaaatgacacagcttatttaccatgcccctgacactgcactgagcactttatgagcttgaactctgttaatcctcacgaccacctcatgagactctccagaaagagcaacagtaatggagtacatgagcactggaagtgacaataaagaagagattgatttattaattaaacatttaaatgtgtctgatgtaatagacattatggaaaatctttatgcaagtgaagagccagcagtttatgaacccagtctaatgaccatgtgtcaagacagtaatcaaaacgatgagcgttctaagtctctgctgcttagtggccaagaggtaccatggttgtcatcagtcagatatggaactgtggaggatttgcttgcttttgcaaaccatatatccaacactgcaaagcatttttatggacaacgaccacaggaatctggaattttattaaacatggtcatcactccccaaaatggacgttaccaaatagattccgatgttctcctgatcccctggaagctgacttacaggaatattggttctgattttattcctcggggcgcctttggaaaggtatacttggcacaagatataaagacgaagaaaagaatggcgtgtaaactgatcccagtagatcaatttaagccatctgatgtggaaatccaggcttgcttccggcacgagaacatcgcagagctgtatggcgcagtcctgtggggtgaaactgtccatctctttatggaagcaggcgagggagggtctgttctggagaaactggagagctgtggaccaatgagagaatttgaaattatttgggtgacaaagcatgttctcaagggacttgattttctacactcaaagaaagtgatccatcatgatattaaacctagcaacattgttttcatgtccacaaaagctgttttggtggattttggcctaagtgttcaaatgaccgaagatgtctattttcctaaggacctccgaggaacagagatttacatgagcccagaggtcatcctgtgcaggggccattcaaccaaagcagacatctacagcctgggggccacgctcatccacatgcagacgggcaccccaccctgggtgaagcgctaccctcgctcagcctatccctcctacctgtacataatccacaagcaagcacctccactggaagacattgcagatgactgcagtccagggatgagagagctgatagaagcttccctggagagaaaccccaatcaccgcccaagagccgcagacctactaaaacatgaggccctgaacccgcccagagaggatcagccacgctgtcagagtctggactctgccctcttggagcgcaagaggctgctgagtaggaaggagctggaacttcctgagaacattgctgattcttcgtgcacaggaagcaccgaggaatctgagatgctcaagaggcaacgctctctctacatcgacctcggcgctctggctggctacttcaatcttgttcggggaccaccaacgcttgaatatggctgaaggatgccatgtttgctctaaattaagacagcattgatctcctggaggctggttctgctgcctctacacaggggccctgtacagtgaatggtgccattttcgaaggagcagtgtgacctcctgtgacccatgaatgtgcctccaagcggccctgtgtgtttgacatgtgaagctatttgatatgcaccaggtctcaaggttctcatttctcaggtgacgtgattctaaggcaggaatttgagagttcacagaaggatcgtgtctgctgactgtttcattcactgtgcactttgctcaaaattttaaaaataccaatcacaaggataatagagtagcctaaaattactattcttggttcttatttaagtatggaatattcattttactcagaatagctgttttgtgtatattggtgtatattatataactctttgagcctttattggtaaattctggtatacattgaattcattataatttgggtgactagaacaacttgaagattgtagcaataagctggactagtgtcctaaaaatggctaactgatgaattagaagccatctgacagcaggccactagtgacagtttcttttgtgttcctatggaaacattttatactgtacatgctatgctgaagacattcaaaacgtgatgttttgaatgtggataaaactgtgtaaaccacataatttttgtacatcccaaaggatgagaatgtgacctttaagaaaaatgaaaacttttgtaaattattgatgattttgtaattcttatgactaaattttcttttaagcatttgtatattaaaatagcatactgtgtatgttttatatcaaatgccttcatgaatctttcatacatatatatatttgtaacattgtaaagtatgtgagtagtcttatgtaaagtatgtttttacattatgcaaataaaacccaatacttttgtccaatgtggttggtcaaatcaactgaataaattcagtattttgcctt

SEQ ID NO: 516 - protein, 467 aa, Homo sapien [sequence omitted]

SEQ ID NO: 517 - DNA, 1994 bp, Homo sapien
aaacttcccgcacgcgttacaggagccaggtcggtataagcgccagcggcctcgccgcccgtcaagctgtccacatccctggcctcagcccgccacatcaccctgacctgcttacgcccagattttcttcaatcacatctgaataaatcacttgaagaaagcttatagcttcattgcaccatgtgtggcatttgggcgctgtttggcagtgatgattgcctttctgttcagtgtctgagtgctatgaagattgcacacagaggtccagatgcattccgttttgagaatgtcaatggatacaccaactgctgctttggatttcaccggttggcggtagttgacccgctgtttggaatgcagccaattcgagtgaagaaatatccgtatttgtggctctgttacaatggtgaaatctacaaccataagaagatgcaacagcattttgaatttgaataccagaccaaagtggatggtgagataatccttcatctttatgacaaaggaggaattgagcaaacaatttgtatgttggatggtgtgtttgcatttgttttactggatactgccaataagaaagtgttcctgggtagagatacatatggagtcagacctttgtttaaagcaatgacagaagatggatttttggctgtatgttcagaagctaaaggtcttgttacattgaagcactccgcgactccctttttaaaagtggagccttttcttcctggacactatgaagttttggatttaaagccaaatggcaaagttgcatccgtggaaatggttaaatatcatcactgtcgggatgaacccctgcacgccctctatgacaatgtggagaaactctttccaggttttgagatagaaactgtgaagaacaacctcaggatcctttttaataatgctgtaaagaaacgtttgatgacagacagaaggattggctgccttttatcagggggcttggactccagcttggttgctgccactctgttgaagcagctgaaagaagcccaagtacagtatcctctccagacatttgcaattggcatggaagacagccccgatttactggctgctagaaaggtggcagatcatattggaagtgaacattatgaagtcctttttaactctgaggaaggcattcaggctctggatgaagtcatattttccttggaaacttatgacattacaacagttcgtgcttcagtaggtatgtatttaatttccaagtatattcggaagaacacagatagcgtggtgatcttctctggagaaggatcagatgaacttacgcagggttacatatattttcacaaggctccttctcctgaaaaagccgaggaggagagtgagaggcttctgagggaactctatttgtttgatgttctccgcgcagatcgaactactgctgcccatggtcttgaactgagagtcccatttctagatcatcgattttcttcctattacttgtctctgccaccagaaatgagaattccaaagaatgggatagaaaaacatctcctgagagagacgtttgaggattccaatctgatacccaaagagattctctggcgaccaaaagaagccttcagtgatggaataacttcagttaagaattcctggtttaagattttacaggaatacgttgaacatcaggttgatgatgcaatgatggcaaatgcagcccagaaatttcccttcaatactcctaaaaccaaagaaggatattactaccgtcaagtctttgaacgccattacccaggccgggctgactggctgagccattactggatgcccaagtggatcaatgccactgacccttctgcccgcacgctgacccactacaagtcagctgtcaaagcttaggtggtctttatgctgtaatgtgaaagcaaatatttcttcgtgttggatggggactgtgggtagataggggaacaatgagagtcaactcaggctaacttgggtgtgaaaaaaataaaagtcctaaatct

SEQ ID NO: 518 - protein, 561 aa, Homo sapien
MCGIWALFGSDDCLSVQCLSAMKIAHRGPDAFRFENVNGYTNCCFGFHRLAVVDPLFGMQPIRVKKYPYLWLCYNGEIYNHKKMQQHFEFEYQTKVDGEIILHLYDKGGIEQTICMLDGVFAFVLLDTANKKVFLGRDTYGVRPLFKAMTEDGFLAVCSEAKGLVTLKHSATPFLKVEPFLPGHYEVLDLKPNGKVASVEMVKYHHCRDEPLHALYDNVEKLFPGFEIETVKNNLRILFNNAVKKRLMTDRRIGCLLSGGLDSSLVAATLLKQLKEAQVQYPLQTFAIGMEDSPDLLAARKVADHIGSEHYEVLFNSEEGIQALDEVIFSLETYDITTVRASVGMYLISKYIRKNTDSVVIFSGEGSDELTQGYIYFHKAPSPEKAEEESERLLRELYLFDVLRADRTTAAHGLELRVPFLDHRFSSYYLSLPPEMRIPKNGIEKHLLRETFEDSNLIPKEILWRPKEAFSDGITSVKNSWFKILQEYVEHQVDDAMMANAAQKFPFNTPKTKEGYYYRQVFERHYPGRADWLSHYWMPKWINATDPSARTLTHYKSAVKA

SEQ ID NO: 519 - DNA, 438 bp, Homo sapien
ggcacgagggcccgtgccgccccagccgctgccgcctgcaccggacccggagccgccatgcccaagtgtcccaagtgcaacaaggaggtgtacttcgccgagagggtgacctctctgggcaaggactggcatcggccctgcctgaagtgcgagaaatgtgggaagacgctgacctctgggggccacgctgagcacgaaggcaaaccctactgcaaccacccctgctacgcagccatgtttgggcctaaaggctttgggcggggcggagccgagagccacactttcaagtaaaccaggtggtggagaccccatccttggctgcttgcagggccactgtccaggcaaatgccaggccttgtccccagatgcccagggctcccttgttgcccctaatgctctcagtaaacctgaacacttggaaaaaaaaaaaaaaaaaaa

SEQ ID NO: 520 - protein, 77 aa, Homo sapien
MPKCPKCNKEVYFAERVTSLGKDWHRPCLKCEKCGKTLTSGGHAEHEGKPYCNHPCYAAMFGPKGFGRGGAESHTFK

SEQ ID NO: 521 - DNA, 776 bp, Homo sapien
aaggacacgggcagcagacagtggtcagtcctttcttggctctgctgacactcgagcccacattccgtcacctgctcagaatcatgcaggtctccactgctgcccttgctgtcctcctctgcaccatggctctctgcaaccagttctctgcatcacttgctgctgacacgccgaccgcctgctgcttcagctacacctcccggcagattccacagaatttcatagctgactactttgagacgagcagccagtgctccaagcccggtgtcatcttcctaaccaagcgaagccggcaggtctgtgctgaccccagtgaggagtgggtccagaaatatgtcagcgacctagagctgagtgcctgaggggtccagaagcttcgaggcccagcgacctcggtgggccagtggggaggagcaggagcctgagccttgggaaacatgcgtgtgacctccacagctacctcttctatggactggttgttgccaaacagccacactgtgggactcttcttaacttaaattttaatttatttatactatttagtttttgtaatttattttcgatttcacagtgtgtttgtgattgtttgctctgagagttcccctgtcccctcccccttccctcacaccgcgtctggtgacaaccgagtggctgtcatcagcctgtgtaggcagtcatggcaccaaagccaccagactgacaaatgtgtatcggatgcttttgttcagggctgtgatcggcctggggaaataataaagcacgctcttttaaaaggt

SEQ ID NO: 522 - protein, 92 aa, Homo sapien
MQVSTAALAVLLCTMALCNQFSASLAADTPTACCFSYTSRQIPQNFIADYFETSSQCSKPGVIFLTKRSRQVCADPSEEWVQKYVSDLELSA

SEQ ID NO: 523 - DNA, 538 bp, Homo sapien
gctacactagagcagagtacgagtctgaggcggagggagtaatggcaggacaagcgtttagaaagtttcttccactctttgaccgagtattggttgaaaggagtgctgctgaaactgtaaccaaaggaggcattatgcttccagaaaaatctcaaggaaaagtattgcaagcaacagtagtcgctgttggatcgggttctaaaggaaagggtggagagattcaaccagttagcgtgaaagttggagataaagttcttctcccagaatatggaggcaccaaagtagttctagatgacaaggattatttcctatttagagatggtgacattcttggaaagtacgtagactgaaataagtcactattgaaatggcatcaacatgatgctgcccattccactgaagttctgaaatctttcgtcatgtaaataatttccatatttctcttttataataaactaatgataactaatgacatccagtgtctccaaaattgtttccttgtactgatataaacacttccaaataaaaatatgtaaat

SEQ ID NO: 524 - protein, 102 aa, Homo sapien
MAGQAFRKFLPLFDRVLVERSAAETVTKGGIMLPEKSQGKVLQATVVAVGSGSKGKGGEIQPVSVKVGDKVLLPEYGGTKVVLDDKDYFLFRDGDILGKYVD

SEQ ID NO: 525 - DNA, 3963 bp, Homo sapien
cctgcgtgtccctctgcgctccgactggtgcgacttctccctgcgctagcgaggcagggttttggcctcgcctctcgcgagatcgcctcctgttgctgccgccgccgctcctggccactgactggcggcgcctgcgcagccgccatgttcggttgctatgctgcggcctaggagagggggtgtgcttgagggaggaggaagagatagaggaggaggagggggaggaagaggaggtggagaaggaggggggtgactgagctcctcttgcactctcacacacaaacgctgcccaggattacccgccagctcacgccgcgcagtgcgcttttccgctcctcgcgccccaccaccaacattgttctctcaggactcctgggtcccaggggtcggaattgggcctgagcgggagaggaaagagacttggctttggccgcggggtcggaggattggggccaggccccctcccccacgcacttttgggggtgtggattatctcatccctgcagggaggtaggagaggtcgccggctgcccgcctccctgccacctccccagcggcgccggcccgcggctgcccagcagcatgaggtggtgctggcggctccgggtcgtggcgcgaccgctgcggcggcggctgctcggggggcgctgaggtagccccccggagcggcacggaggacgcgcttctcctctgcgcgccggggcctcgaggctttttttctccagccgagaggacgcggctgtgatatacgaagactttgtgtggacagtaatgacctcacgtttccgattgcctgctggcagaacctacaatgtacgagcatcagagttggcccgagacagacagcatactgaagtggtttgcaacatccttcttctggataacactgtacaagctttcaaagtcaataaacatgatcaggggcaagtcttgttggatgtcgtcttcaagcatctagatttgactgagcaggactattttggtttacagttggctgatgattccacagataacccaaggtggctggatccaaacaaaccaataaggaagcagctaaagagaggatctccttacagtttgaactttagagtcaaattttttgtaagtgaccccaacaagttacaagaagaatatacaaggtaccagtattttttgcaaattaaacaagacattcttactggaagattaccctgtccttctaatactgctgcccttttagcttcatttgctgttcagtctgaacttggagactacgatcagtcagagaacttgtcaggctacctctcagattattctttcattcctaatcaacctcaagattttgaaaaagaaattgcaaaattacatcagcaacacataggcttatctcctgcagaagcagaatttaattacctaaacacagcacgtaccttagaactctatggagttgaattccactatgcaagggatcagagtaacaatgaaattatgattggagtgatgtcaggaggaattctgatttataagaacagggtacgaatgaatacctttccatggttgaagattgtaaaaatttcttttaagtgcaaacagttttttattcaacttagaaaagaattgcatgaatctagagaaacattattgggatttaatatggtgaattacagagcatgtaaaaatttgtggaaagcatgtgtagaacatcacacattcttccgtttggacagaccacttccacctcaaaagaatttttttgcacattattttacattaggttcaaaattccggtactgtgggagaactgaagtccaatcagttcagtatggcaaagaaaaggcaaataaagacagggtatttgcaagatccccaagtaagcccttggcacggaaattaatggattgggaagtagtaagcagaaattcaatatctgatgacaggttagaaacacaaagtcttccatcacgatctccaccgggaactcctaatcatcgaaattctacattcacgcaggaaggaacccggttacgaccatcttcagttggtcatttggtagaccatatggttcatacttccccaagcgaagtgtttgtaaatcagagatctccgtcatcaacacaagctaatagcattgttctggaatcatcaccatcacaagagacccctggagatgggaagcctccagctttaccacccaaacagtcaaagaaaaacagttggaaccaaattcattattcacattcgcaacaagatctagaaagtcatattaatgaaacatttgatattccatcttctcctgaaaaacccactcctaatggtggtattccacatgataatcttgtcctaatcagaatgaaacctgatgaaaatgggaggtttggattcaatgtaaagggaggatatgatcagaagatgcctgtgattgtgtctcgagtagcaccaggaacacctgctgacctctgtgtccctagactgaatgaaggggaccaagttgtactgatcaatggtcgggacattgcagaacacactcatgatcaggttgtgctgtttattaaagctagttgtgagagacattctggggaactcatgcttctagttcgacctaatgctgtatatgatgtagtggaagaaaagctagaaaatgagccagatttccagtatattcctgagaaagccccactagatagtgtgcatcaggatgaccattccctgcgggagtcaatgatccagctagctgaggggcttatcactggaacagtcctgacacagtttgatcaactgtatcggaaaaaacctggaatgacaatgtcctgtgccaaattacctcagaatatttccaaaaatagatacagagatatttcgccttatgatgccacacgggtcattttaaaaggtaatgaagactacatcaatgcgaactatataaatatggaaattccttcttccagcattataaatcagtacattgcttgtcaagggccattaccacacacttgtacagatttttggcagatgacttgggaacaaggctcctctatggttgtaatgttgaccacacaagttgaacgtggcagagttaaatgtcaccaatattggccagaacccacaggcagttcatcttatggatgctaccaagttacctgccactctgaagaaggaaacactgcctatatcttcaggaagatgaccctatttaaccaagagaaaaatgaaagtcgtccactcactcagatccagtacatagcctggcctgaccatggagtccctgatgattcgagtgactttctagattttgtttgtcatgtacgaaacaagagggctggcaaggaagaacccgttgttgtccattgcagtgctggaatcggaagaactggggttcttattactatggaaacagccatgtgtctcattgaatgcaatcagccagtttatccactagatattgtaagaacaatgagagatcagcgagccatgatgatccaaacacctagtcaatacagatttgtatgtgaagctattttgaaagtttatgaagaaggctttgttaaacccttaacaacatcaacaaataaataagaaagcaaaaagatctgggatatgtgttggaaaactgctttcccttatgttcactgtgccataatgctgctcgcaggaaatggcattttacaaaaaaaaaatgaagaactcaaaaaaactttgaaaacttcagcactgttgcactttatgttttaaaaaatgtcactctttcaaaatctataactcatgtatttgaagactgtttcatgctttgctccgaacaaatagtaaataactgagtatgttcagggtaatttatgaaattttgtggtggtgccatgcaatccccttttggtagaattgccacaaacaaggctcaaaattctcatcatctctgttatacacctgtatcatgaaagcaaaaagaagtaaacatcaggagtcagctctgaaaaaaaaaaaaaaaaaaaa

SEQ ID NO: 526 - protein, 926 aa, Homo sapien
MTSRFRLPAGRTYNVRASELARDRQHTEVVCNILLLDNTVQAFKVNKHDQGQVLLDVVFKHLDLTEQDYFGLQLADDSTDNPRWLDPNKPIRKQLKRGSPYSLNFRVKFFVSDPNKLQEEYTRYQYFLQIKQDILTGRLPCPSNTAALLASFAVQSELGDYDQSENLSGYLSDYSFIPNQPQDFEKEIAKLHQQHIGLSPAEAEFNYLNTARTLELYGVEFHYARDQSNNEIMIGVMSGGILIYKNRVRMNTFPWLKIVKISFKCKQFFIQLRKELHESRETLLGFNMVNYRACKNLWKACVEHHTFFRLDRPLPPQKNFFAHYFTLGSKFRYCGRTEVQSVQYGKEKANKDRVFARSPSKPLARKLMDWEVVSRNSISDDRLETQSLPSRSPPGTPNHRNSTFTQEGTRLRPSSVGHLVDHMVHTSPSEVFVNQRSPSSTQANSIVLESSPSQETPGDGKPPALPPKQSKKNSWNQIHYSHSQQDLESHINETFDIPSSPEKPTPNGGIPHDNLVLIRMKPDENGRFGFNVKGGYDQKMPVIVSRVAPGTPADLCVPRLNEGDQVVLINGRDIAEHTHDQVVLFIKASCERHSGELMLLVRPNAVYDVVEEKLENEPDFQYIPEKAPLDSVHQDDHSLRESMIQLAEGLITGTVLTQFDQLYRKKPGMTMSCAKLPQNISKNRYRDISPYDATRVILKGNEDYINANYINMEIPSSSIINQYIACQGPLPHTCTDFWQMTWEQGSSMVVMLTTQVERGRVKCHQYWPEPTGSSSYGCYQVTCHSEEGNTAYIFRKMTLFNQEKNESRPLTQIQYIAWPDHGVPDDSSDFLDFVCHVRNKRAGKEEPVVVHCSAGIGRTGVLITMETAMCLIECNQPVYPLDIVRTMRDQRAMMIQTPSQYRFVCEAILKVYEEGFVKPLTTSTNK

SEQ ID NO: 527 - DNA, 1216 bp, Homo sapien
ttcggcacttgggagaagatgtttgaaaaaactgactctgctaatgagcctggactcagagctcaagtctgaactctacctccagacagaatgaagttcatctcgacatctctgcttctcatgctgctggtcagcagcctctctccagtccaaggtgttctggaggtctattacacaagcttgaggtgtagatgtgtccaagagagctcagtctttatccctagacgcttcattgatcgaattcaaatcttgccccgtgggaatggttgtccaagaaaagaaatcatagtctggaagaagaacaagtcaattgtgtgtgtggaccctcaagctgaatggatacaaagaatgatggaagtattgagaaaaagaagttcttcaactctaccagttccagtgtttaagagaaagattccctgatgctgatatttccactaagaacacctgcattcttcccttatccctgctctggattttagttttgtgcttagttaaatcttttccagggagaaagaacttccccatacaaataaggcatgaggactatgtgaaaaataaccttgcaggagctgatggggcaaactcaagcttcttcactcacagcaccctatatacacttggagtttgcattcttattcatcagggaggaaagtttctttgaaaatagttattcagttataagtaatacaggattattttgattatatacttgttgtttaatgtttaaaatttcttagaaaacaatggaatgagaatttaagcctcaaatttgaacatgtggcttgaattaagaagaaaattatggcatatattaaaagcaggcttctatgaaagactcaaaaagctgcctgggaggcagatggaacttgagcctgtcaagaggcaaaggaatccatgtagtagatatcctctgcttaaaaactcactacggaggagaattaagtcctacttttaaagaatttctttataaaatttactgtctaagattaatagcattcgaagatccccagacttcatagaatactcagggaaagcatttaaagggtgatgtacacatgtatcctttcacacatttgccttgacaaacttctttcactcacatctttttcactgactttttttgtgggggcggggccggggggactctggtatctaattctttaatgattcctataaatctaatgacattcaataaagttgagcaaacattttactt

SEQ ID NO: 528 - protein, 109 aa, Homo sapien
MKFISTSLLLMLLVSSLSPVQGVLEVYYTSLRCRCVQESSVFIPRRFIDRIQILPRGNGCPRKEIIVWKKNKSIVCVDPQAEWIQRMMEVLRKRSSSTLPVPVFKRKIP

SEQ ID NO: 529 - DNA, 2984 bp, Homo sapien
taactgagcgaggagcaattgattaatagctcggcgaggggactcactgactgttataataacactacaccagcaactcctggcttcccagcagccggaacacagacaggagagagtcagtggcaaatagacatttttcttatttcttaaaaaacagcaacttgtttgctacttttatttctgttgatttttttttcttggtgtgtgtggtggttgtttttaagtgtggagggcaaaaggagataccatcccaggctcagtccaacccctctccaaaacggcttttctgacactccaggtagcgagggagttgggtctccaggttgtgcgaggagcaaatgatgaccgccaaggccgtagacaaaatcccagtaactctcagtggttttgtgcaccagctgtctgacaacatctacccggtggaggacctcgccgccacgtcggtgaccatctttcccaatgccgaactgggaggcccctttgaccagatgaacggagtggccggagatggcatgatcaacattgacatgactggagagaagaggtcgttggatctcccatatcccagcagctttgctcccgtctctgcacctagaaaccagaccttcacttacatgggcaagttctccattgaccctcagtaccctggtgccagctgctacccagaaggcataatcaatattgtgagtgcaggcatcttgcaaggggtcacttccccagcttcaaccacagcctcatccagcgtcacctctgcctcccccaacccactggccacaggacccctgggtgtgtgcaccatgtcccagacccagcctgacctggaccacctgtactctccgccaccgcctcctcctccttattctggctgtgcaggagacctctaccaggacccttctgcgttcctgtcagcagccaccacctccacctcttcctctctggcctacccaccacctccttcctatccatcccccaagccagccacggacccaggtctcttcccaatgatcccagactatcctggattctttccatctcagtgccagagagacctacatggtacagctggcccagaccgtaagccctttccctgcccactggacaccctgcgggtgccccctccactcactccactctctacaatccgtaactttaccctggggggccccagtgctggggtgaccggaccaggggccagtggaggcagcgagggaccccggctgcctggtagcagctcagcagcagcagcagccgccgccgccgccgcctataacccacaccacctgccactgcggcccattctgaggcctcgcaagtaccccaacagacccagcaagacgccggtgcacgagaggccctacccgtgcccagcagaaggctgcgaccggcggttctcccgctctgacgagctgacacggcacatccgaatccacactgggcataagcccttccagtgtcggatctgcatgcgcaacttcagccgcagtgaccacctcaccacccatatccgcacccacaccggtgagaagcccttcgcctgtgactactgtggccgaaagtttgcccggagtgatgagaggaagcgccacaccaagatccacctgagacagaaagagcggaaaagcagtgccccctctgcatcggtgccagccccctctacagcctcctgctctgggggcgtgcagcctgggggtaccctgtgcagcagtaacagcagcagtcttggcggagggccgctcgccccttgctcctctcggacccggacaccttgagatgagactcaggctgatacaccagctcccaaaggtcccggaggccctttgtccactggagctgcacaacaaacactaccaccctttcctgtccctctctccctttgttgggcaaagggctttggtggagctagcactgccccctttccacctagaagcaggttcttcctaaaacttagcccattctagtctctcttaggtgagttgactatcaacccaaggcaaaggggaggctcagaaggaggtggtgtggggatcccctggccaagagggctgaggtctgaccctgctttaaagggttgtttgactaggttttgctaccccacttccccttattttgacccatcacaggtttttgaccctggatgtcagagttgatctaagacgttttctacaataggttgggagatgctgatcccttcaagtggggacagcaaaaagacaagcaaaactgatgtgcactttatggcttgggactgatttgggggacattgtacagtgagtgaagtatagcctttatgccacactctgtggccctaaaatggtgaatcagagcatatctagttgtctcaacccttgaagcaatatgtattatatactcagagaacagaagtgcaatgtgatgggaggaacgtagcaatatctgctccttttcgagttgtttgagaaatgtaggctattttttcagtgtatatccactcagattttgtgtatttttgatgtacccacactgttctctaaattctgaatctttgggaaaaaatgtaaagcatttatgatctcagaggttaacttatttaagggggatgtacatattctctgaaactaggatgcatgcaattgtgttggaagtgtccttggtcgccttgtgtgatgtagacaaatgttacaaggctgcatgtaaatgggttgccttattatggagaaaaaaatcactccctgagtttagtatggctgtatatttatgcctattaatatttggaattttttttagaaagtatatttttgtatgctttgttttgtgacttaaaagtgttacctttgtagtcaaatttcagataagaatgtacataatgttaccggagctgatttgtttggtcattagctcttaatagttgtgaaaaaataaatctattctaacgcaaaaccactaactgaagttcagatataatggatggtttgtgactatagtgtaaataaatacttttcaacaat

SEQ ID NO: 530 - protein, 476 aa, Homo sapien
MMTAKAVDKIPVTLSGFVHQLSDNIYPVEDLAATSVTIFPNAELGGPFDQMNGVAGDGMINIDMTGEKRSLDLPYPSSFAPVSAPRNQTFTYMGKFSIDPQYPGASCYPEGIINIVSAGILQGVTSPASTTASSSVTSASPNPLATGPLGVCTMSQTQPDLDHLYSPPPPPPPYSGCAGDLYQDPSAFLSAATTSTSSSLAYPPPPSYPSPKPATDPGLFPMIPDYPGFFPSQCQRDLHGTAGPDRKPFPCPLDTLRVPPPLTPLSTIRNFTLGGPSAGVTGPGASGGSEGPRLPGSSSAAAAAAAAAAYNPHHLPLRPILRPRKYPNRPSKTPVHERPYPCPAEGCDRRFSRSDELTRHIRIHTGHKPFQCRICMRNFSRSDHLTTHIRTHTGEKPFACDYCGRKFARSDERKRHTKIHLRQKERKSSAPSASVPAPSTASCSGGVQPGGTLCSSNSSSLGGGPLAPCSSRTRTP

SEQ ID NO: 531 - DNA, 2910 bp, Homo sapien
gcccaggtgactgactaatccgccgccttcaggagacagaattggccaaggcctgaaggccccggagtgcaccagcggcatgtacaaagagaccgtctactccgccttcaatctgctcatgcattacccacccccctcgggagcagggcagcacccccagccgcagcccccgctgcacaaggccaatcagcccccccacggtgtcccccaactctctctctacgaacatttcaacagcccacatcccacccctgcacctgcggacatcagccagaagcaagttcacaggcctctgcagacccctgacctctctggcttctactccctgacctcaggcagcatggggcagctcccccacactgtgagctggttcacccacccatccttgatgctaggttctggtgtacctggtcacccagcagccatcccccacccggccattgtgcccccctcagggaagcaggagctgcagcccttcgaccgcaacctgaagacacaagcagagtccaaggcagagaaggaggccaagaagccaaccatcaagaagcccctcaatgccttcatgctgtacatgaaggagatgagagccaaggtcattgcagagtgcacacttaaggagagcgctgccatcaaccagatcctgggccgcaggtggcacgcgctgtcgcgagaagagcaggccaagtactatgagctggcccgcaaggagaggcagctgcacatgcagctatacccaggctggtcagcgcgggacaactacgggaagaagaagaggcggtcgagggaaaagcaccaagaatccaccacagaccctggctcgcctaagaaatgccgtgctcgctttggcctcaaccagcagacggattggtgtggtccgtgcagataactctcttcactattcctaggaggaaaaagaaatgcattcggtacttacccggagaaggccgctgccccagccccgttccttccgatgacagtgctctaggctgccccgggtccccagctccccaggactcaccctcataccatctgctgccccgcttccccacagaactgcttactagccctgcggagcggcacctacatccccaggtctctccactgctctcagcctcccaaccccagggcccccacaggccccccgcagcaccctgcagagcacacaggtacagcaacaggaatctcagagacaggtggcctagcaggcacaggacacctggccgcctccaggagcctaccccctgaaaatgacagagacccagatctcatggaaactggcaggggtcctgttaacgtcatctcagggtccagaccctgaagatttcagaggctgcagaacttctgcctgaacctggggtcatcgattcaaactgctccaagtggtgggaatcagatctgtcttgatgtgtcatctaattaagggaatcccttgtacctatgactccgtcgatctattctttgtaccatctgtcttgccagccagaagcctctgcctccctagcttttctgctataggtcagagatgggctgaactgagcctagctaccttctctacccatctcccccatcccccactgccacaccctccccattcagacacttcatggaccaagaatgagctggtttgtcaaacaacatgtgagcatggtcacaagcacaaagctcaagatgacagctcttctaaggaaatggagaagctctgtttataaaaacaaaaacaaaaccagctgctactcataagttggaccagaggaagccccttactatgatctcaggagcttgcaagaagcaggaaggggaatggaataggttaagtttaggcctatcaacctaagcaacagaaataatctgacactaccttatcaggcaaattggggaggggagggtgtatctagctctagttcaaattatttggaagtgttccctgagaaacccaccagcctaagaagctctggccccaggcttgtcactagcagctgcagtcaacagttcaaagaagtcatggcccaaatccagtgtgcacccctccccattcacagagcctttttcacaattccatttccagttcatctatggcagtccagccagcttctgggcagcttgagagggcaaacccaaaacctcatgacagccagagcctgtctttcagcattcagtcgcctgggaagctccagtttccccatggggctgcgggacagaggaccattacaactagatcaaggagcccagaaaacctccagtagtggacaacaggttttcaccatagcctacgttaacccatttttgagccaagcttcaaccctcagccttgaaaaacaagtctttaatttaatttttgttttttgcctaaatccaaagaaaaagggctgccgggccaggcgcggtcgtcacgcctgtaatcccagcactttggcaggccgaggcaggtggatcacctgacgtcagtagtttgagaccagcctggccaacatggtgaaaccctgtatctactaaaaatacaaaaattagccggacgtggtggtgcgcgcatgtaatcccagctactcgggaggctgaggcggaagaatcacttgaacccgggaggcggaggttccagtgagccgagatggcgctattgcactccagtctgggtaacagggagactgcatctcaaaaaaaaaaaaaaaaaaaaagggctgtccatgtattcacacacccctcaaaaaaagcctttagttcctactttagccactggtttctcagaatccaaagatcacatattctagtgtaacactgcaagaagtcttgagaaaaagattattgtagtgttcaaaatatttttgtattgttaatgcatcatcatagaaaaacttttaaacatgagaataaagatactttttactgggtttgtttttcaaagcctgaaaaaaa

SEQ ID NO: 532 - protein, 268 aa, Homo sapien
MYKETVYSAFNLLMHYPPPSGAGQHPQPQPPLHKANQPPHGVPQLSLYEHFNSPHPTPAPADISQKQVHRPLQTPDLSGFYSLTSGSMGQLPHTVSWFTHPSLMLGSGVPGHPAAIPHPAIVPPSGKQELQPFDRNLKTQAESKAEKEAKKPTIKKPLNAFMLYMKEMRAKVIAECTLKESAAINQILGRRWHALSREEQAKYYELARKERQLHMQLYPGWSARDNYGKKKRRSREKHQESTTDPGSPKKCRARFGLNQQTDWCGPCR

SEQ ID NO: 533 - DNA, 3868 bp, Homo sapien
atgaacctctgaaaactgccggcatctgaggtttcctccaaggccctctgaagtgcagcccataatgaaggtcttggcggcaggagttgtgcccctgctgttggttctgcactggaaacatggggcggggagccccctccccatcacccctgtcaacgccacctgtgccatacgccacccatgtcacaacaacctcatgaaccagatcaggagccaactggcacagctcaatggcagtgccaatgccctctttattctctattacacagcccagggggagccgttccccaacaacctggacaagctatgtggccccaacgtgacggacttcccgcccttccacgccaacggcacggagaaggccaagctggtggagctgtaccgcatagtcgtgtaccttggcacctccctgggcaacatcacccgggaccagaagatcctcaaccccagtgccctcagcctccacagcaagctcaacgccaccgccgacatcctgcgaggcctccttagcaacgtgctgtgccgcctgtgcagcaagtaccacgtgggccatgtggacgtgacctacggccctgacacctcgggtaaggatgtcttccagaagaagaagctgggctgtcaactcctggggaagtataagcagatcatcgccgtgttggcccaggccttctagcaggaggtcttgaagtgtgctgtgaaccgagggatctcaggagttgggtccagatgtgggggcctgtccaagggtggctggggcccagggcatcgctaaacccaaatgggggctgctggcagaccccgagggtgcctggccagtccactccactctgggctgggctgtgatgaagctgagcagagtggaaacttccatagggagggagctagaagaaggtgccccttcctctgggagattgtggactggggagcgtgggctggacttctgcctctacttgtccctttggccccttgctcactttgtgcagtgaacaaactacacaagtcatctacaagagccctgaccacagggtgagacagcagggcccaggggagtggaccagcccccagcaaattatcaccatctgtgcctttgctgccccttaggttgggacttaggtgggccagaggggctaggatcccaaaggactccttgtcccctagaagtttgatgagtggaagatagagaggggcctctgggatggaaggctgtcttcttttgaggatgatcagagaacttgggcataggaacaatctggcagaagtttccagaaggaggtcacttggcattcaggctcttggggaggcagagaagccaccttcaggcctgggaaggaagacactgggaggaggagaggcctggaaagctttggtaggttcttcgttctcttccccgtgatcttccctgcagcctgggatggccagggtctgatggctggacctgcagcaggggtttgtggaggtgggtagggcaggggcaggttgctaagtcaggtgcagaggttctgagggacccaggctcttcctctgggtaaaggtctgtaagaaggggctggggtagctcagagtagcagctcacatctgaggccctgggaggtcttgtgaggtcacacagaggtacttgagggggactggaggccgtctctggtccccagggcaagggaacagcagaacttagggtcagggtctcagggaaccctgagctccaagcgtgctgtgcgtctgacctggcatgatttctatttattatgatatcctatttatattaacttattggtgctttcagtggccaagttaattcccctttccctggtccctactcaacaaaatatgatgatggctcccgacacaagcgccagggccagggcttagcagggcctggtctggaagtcgacaatgttacaagtggaataagcttacgggtgaagctcagagaagggtcggatctgagagaatggggaggcctgagtgggagtggggggccttgctccacccccatcccctactgtgacttgctttagcgtgtcagggtccaggctgcaggggctgggccaatttgtggagaggccgggtgcctttctgtcttgcttccagggggctggttcacactgttcttgggcgccccagcattgtgttgtgaggcgcactgttcctggcagatattgtgccccctggagcagtgggcaagacagtccttgtggcccaccctgtccttgtttctgtgtccccatgctgcctctgaaatagcgccctggaacaaccctgcccctgcacccagcatgctccgacacagcagggaagctcctcctgtggcccggacacccatagacggtgcggggggcctggctgggccagaccccaggaaggtggggtagactggggggatcagctgcccattgctcccaagaggaggagagggaggctgcagacgcctgggactcagaccaggaagctgtgggccctcctgctccacccccatcccactcccacccatgtctgggctcccaggcagggaacccgatctcttcctttgtgctggggccaggcgagtggagaaacgccctccagtctgagagcaggggagggaaggaggcagcagagttggggcagctgctcagagcagtgttctggcttcttctcaaaccctgagcgggctgccggcctccaagttcctccgacaagatgatggtactaattatggtacttttcactcactttgcacctttccctgtcgctctctaagcactttacctggatggcgcgtgggcagtgtgcaggcaggtcctgaggcctggggttggggtggagggtgcggcccggagttgtccatctgtccatcccaacagcaagacgaggatgtggctgttgagatgtgggccacactcacccttgtccaggatgcagggactgccttctccttcctgcttcatccggcttagcttggggctggctgcattcccccaggatgggcttcgagaaagacaaacttgtctggaaaccagagttgctgattccacccggggggcccggctgactcgcccatcacctcatctccctgtggacttgggagctctgtgccaggcccaccttgcggccctggctctgagtcgctctcccacccagcctggacttggccccatgggacccatcctcagtgctccctccagatcccgtccggcagcttggcgtccaccctgcacagcatcactgaatcacagagcctttgcgtgaaacagctctgccaggccgggagctgggtttctcttccctttttatctgctggtgtggaccacacctgggcctggccggaggaagagagagtttaccaagagagatgtctccgggcccttatttattatttaaacatttttttaaaaagcactgctagtttacttgtctctcctccccatcgtccccatcgtcctccttgtccctgacttggggcacttccaccctgacccagccagtccagctctgccttgccggctctccagagtagacatagtgtgtggggttggagctctggcacccggggaggtagcatttccctgcagatggtacagatgttcctgccttagagtcatctctagttccccacctcaatcccggcatccagccttcagtcccgcccacgtgctagctccgtgggcccaccgtgcggccttagaggtttccctccttcctttccactgaaaagcacatggccttgggtgacaaattcctctttgatgaatgtaccctgtggggatgtttcatactgacagattatttttatttattcaatgtcatatttaaaatatttattttttataccaaatgaatcacttttttttttaagaaaaaaaagagaaatgaataaagaatctactcttcg

SEQ ID NO: 534 - protein, 202 aa, Homo sapien
MKVLAAGVVPLLLVLHWKHGAGSPLPITPVNATCAIRHPCHNNLMNQIRSQLAQLNGSANALFILYYTAQGEPFPNNLDKLCGPNVTDFPPFHANGTEKAKLVELYRIVVYLGTSLGNITRDQKILNPSALSLHSKLNATADILRGLLSNVLCRLCSKYHVGHVDVTYGPDTSGKDVFQKKKLGCQLLGKYKQIIAVLAQAF

SEQ ID NO: 535 - DNA, 2400 bp, Homo sapien
taggatggaaaggcagatgtaaagtccctcatggcgaaatataacacggggggcaacccgacagaggatgtctcagtcaatagccgacccttcagagtcacagggccaaactcatcttcaggaatacaagcaagaaagaacttattcaacaaccaaggaaatgccagccctcctgcaggacccagcaatgtacctaagtttgggtccccaaagccacctgtggcagtcaaaccttcttctgaggaaaagcctgacaaggaacccaagcccccgtttctaaagcccactggagcaggccaaagattcggaacaccagccagcttgaccaccagagaccccgaggcgaaagtgggatttctgaaacctgtaggccccaagcccatcaacttgcccaaagaagattccaaacctacatttccctggcctcctggaaacaagccatctcttcacagtgtaaaccaagaccatgacttaaagccactaggcccgaaatctgggcctactcctccaacctcagaaaatgaacagaagcaagcgtttcccaaattgactggggttaaagggaaatttatgtcagcatcacaagatcttgaacccaagcccctcttccccaaacccgcctttggccagaagccgcccctaagtaccgagaactcccatgaagacgaaagccccatgaagaatgtgtcttcatcaaaagggtccccagctcccctgggagtcaggtccaaaagcggccctttaaaaccagcaagggaagactcagaaaataaagaccatgcaggggagatttcaagtttgccctttcctggagtggttttgaaacctgctgcgagcaggggaggcctaggtctctccaaaaatggtgaagaaaaaaaggaagataggaagatagatgctgctaagaacaccttccagagcaaaataaatcaggaagagttggcctcagggactcctcctgccaggttccctaaggccccttctaagctgacagtgggggggccatggggccaaagtcaggaaaaggaaaagggagacaagaattcagccaccccgaaacagaagccattgcctcccttgtttaccttgggtccacctccaccaaaacccaacagaccaccaaatgttgacctgacgaaattccacaaaacctcttctggaaacagtactagcaaaggccagacgtcttactcaacaacttccctgccaccacctccaccatcccatccggccagccaaccaccattgccagcatctcacccatcacaaccaccagtcccaagcctacctcccagaaacattaaacctccgtttgacctaaaaagccctgtcaatgaagacaatcaagatggtgtcacgcactctgatggtgctggaaatctagatgaggaacaagacagtgaaggagaaacatatgaagacatagaagcatccaaagaaagagagaagaaaagggaaaaggaagaaaagaagaggttagagctggagaaaaaggaacagaaagagaaagaaaagaaagaacaagaaataaagaagaaatttaaactaacaggccctattcaagtcatccatcttgcaaaagcttgttgtgatgtcaaaggaggaaagaatgaactgagcttcaagcaaggagagcaaattgaaatcatccgcatcacagacaacccagaaggaaaatggttgggcagaacagcaaggggttcatatggctatattaaaacaactgctgtagagattgactatgattctttgaaactgaaaaaagactctcttggtgccccttcaagacctattgaagatgaccaagaagtatatgatgatgttgcagagcaggatgatattagcagccacagtcagagtggaagtggagggatattccctccaccaccagatgatgacatttatgatgggattgaagaggaagatgctgatgatggtttccctgctcctcctaaacaattggacatgggagatgaagtttacgatgatgtggatacctctgatttccctgtttcatcagcagagatgagtcaaggaactaattttggaaaagctaagacagaagaaaaggaccttaagaagctaaaaaagcaggaaaaagaagaaaaagacttcaggaaaaaatttaaatatgatggtgaaattagagtcctatattcaactaaagttacaacttccataacttctaaaaagtggggaaccagagatctacaggtaaaacctggtgaatctctagaagttatacaaaccacagatgacacaaaagttctctgcagaaatgaagaagggaaatatggttatgtccttcggagttacctagcggacaatgatggagagatctatgatgatattgctgatggctgcatctatgacaatgactagcactcaactttggtcatt

SEQ ID NO: 536 - protein, 783 aa, Homo sapien
MAKYNTGGNPTEDVSVNSRPFRVTGPNSSSGIQARKNLFNNQGNASPPAGPSNVPKFGSPKPPVAVKPSSEEKPDKEPKPPFLKPTGAGQRFGTPASLTTRDPEAKVGFLKPVGPKPINLPKEDSKPTFPWPPGNKPSLHSVNQDHDLKPLGPKSGPTPPTSENEQKQAFPKLTGVKGKFMSASQDLEPKPLFPKPAFGQKPPLSTENSHEDESPMKNVSSSKGSPAPLGVRSKSGPLKPAREDSENKDHAGEISSLPFPGVVLKPAASRGGLGLSKNGEEKKEDRKIDAAKNTFQSKINQEELASGTPPARFPKAPSKLTVGGPWGQSQEKEKGDKNSATPKQKPLPPLFTLGPPPPKPNRPPNVDLTKFHKTSSGNSTSKGQTSYSTTSLPPPPPSHPASQPPLPASHPSQPPVPSLPPRNIKPPFDLKSPVNEDNQDGVTHSDGAGNLDEEQDSEGETYEDIEASKEREKKREKEEKKRLELEKKEQKEKEKKEQEIKKKFKLTGPIQVIHLAKACCDVKGGKNELSFKQGEQIEIIRITDNPEGKWLGRTARGSYGYIKTTAVEIDYDSLKLKKDSLGAPSRPIEDDQEVYDDVAEQDDISSHSQSGSGGIFPPPPDDDIYDGIEEEDADDGFPAPPKQLDMGDEVYDDVDTSDFPVSSAEMSQGTNFGKAKTEEKDLKKLKKQEKEEKDFRKKFKYDGEIRVLYSTKVTTSITSKKWGTRDLQVKPGESLEVIQTTDDTKVLCRNEEGKYGYVLRSYLADNDGEIYDDIADGCIYDND

SEQ ID NO: 537 - DNA, 4262 bp, Homo sapien
cgaagaggatccggagcagctgctgccagcccgcgggcactgaagtcctcccggctgccgctcgagtagccacgggcgcgatcgggaccagaagtctcctcctccatgatcactttggaagccgggggggaagactttgccctgccctgagagctggtctgcgtttcccaggcgcggcggcggcggagcagcagctgcagcagccgagtccaaataggagcggccacagccaggggcgtgtgcgccccgcgcggagcgagctcgggttcccctcggaatgtccccggggcgcccggcgcgctgaccccgaagccgcctccgccttcggcgcctgctgcctccctcggccaggcttgttgttcgggactgtgagcttcctggctcctgggcagtggggaagcccccgggggcgagtgacctcagctggccacgacccagccctcccccgtgcgtatctcgcttaagatggcagcggagtcaggggaactaatcggggcttgtgagttcatgaaagatcggttatattttgctactttaaggaatagaccaaaaagcacagtaaatacccactatttctccatcgatgaggagctggtctatgaaaatttctatgcagattttggaccgctgaacttggcaatggtgtacagatattgctgcaaactaaacaagaaactaaaatcatacagtttgtcaagaaagaaaatagtgcactacacctgttttgaccaacggaaaagagcaaatgcagcatttttgataggtgcctatgcagtaatctatttaaagaagacaccagaagaagcctacagagcactcctgtctggctcaaaccccccctatcttccattcagggatgcttcctttggaaattgcacttacaatctcaccattctcgactgtttgcagggaatcagaaagggattacaacatggattttttgactttgagacatttgatgtggatgaatatgaacattatgagcgagttgaaaatggtgacttcaactggattgttccaggaaaatttttagcatttagtggaccacatcctaaaagcaaaattgagaatggttatcctcttcacgcccctgaagcctactttccttatttcaaaaagcataatgtgactgcagttgtgaggctaaacaaaaagatttatgaggcaaagcgcttcacagacgctggcttcgagcactatgacctcttcttcatagatggcagcacacccagtgacaacatcgtgcgaaggttcctgaacatctgtgagaacaccgaaggggccatcgccgttcactgcaaagctggtcttggaagaacagggacattgatagcctgttatgtaatgaaacactacaggtttacacatgctgaaataattgcttggattagaatatgccggccaggctctattataggaccccagcagcacttcctggaagaaaaacaagcatcgttgtgggtccaaggagacattttccgatccaaactgaaaaatcgaccatccagtgaaggaagtattaataaaattctttctggcctagatgatatgtctattggtggaaatctttcaaaaacacaaaacatggaacgatttggagaggataacttagaagatgatgatgtggaaatgaaaaatggtataacccagggagacaaactacgtgccttaaaaagtcagagacagccacgtacctcaccatcctgtgcatttaggtcagatgatacaaaaggacatccaagagcagtgtcccagcctttcagattaagttcatccctgcaaggatctgcagttactttgaagacatcaaaaatggcactgtccccttcagcaacggccaagaggatcaacagaacttctttgtcttcgggtgccactgtaagaagcttttccataaactcccggctagccagttctctagggaacttgaatgctgcaacagatgatccagagaacaaaaagacctcctcatcctctaaggcaggcttcacagccagcccgtttaccaacctcttgaatggcagctcccagccaactaccagaaattaccctgagctcaacaataatcagtacaacagaagcagcaacagcaacgggggcaacctgaacagccccccaggcccccacagcgccaagacagaggagcacaccaccatcctccgaccctcctacaccgggctttcttcttcttcagcgagattcctgagccgttctatcccttcccttcagtctgaatatgttcattactaaggccttgccactccagtgaaagctgttcttctcttagacacaatttcttcatctggacgagcagtggagagggaaagcaacttcttgctggaagaatatctctgccttcttaccttaaattaaaaagagcactaagataacaccttcaagagacttgaaaacagaaaactggttaatgactactataaatgcactgaaactatgttatggagatttccatacttttaaagacagttttaatgttgaatttggtattttgaagggttatttttaatgtattttggtaatacatttattattatatttacatgtacagtgttacattatatatgtattgtgaactttaaaagactattttgataaatttataaatatataaaattatgtaaaaactacactatattttgatttagattttcctgctgtttgctaccaaaaatttgtattttaaatctgtttagttttagtatggttttgtctctaatgaataaataattccttcttattaagaagaagtaagggagaaagtttttagaaagtgatttttatgctcgcactataaatatggcaggtcagttcattcttttgggaagtcagtttagttacactgagtttatccaagtttatctctaccaagagtataatggcatgggatggcttatttaggacaattccctttcctattgtttttgttgctgagccaatttgagttagttttgcatcctggggggctttaaaatacagcatgcagtgaaagatcagaattcactgaatatttcttctgagagcatggtttcatggtttttctctatgaaatgactcaatattccaaatgtttttttttccttcctcctttcaaaagagttcttaacccaattaggatatcctgctttgggtatgaggttgttgttgcctgtaatcacacatggtttgacatcagttttaaatcaatggagagaaaaaactgaaaaagatgctgctaagtagttctctgtattaaaggagatatttttaaaacagggtacaaccccctgctgcacacgctagcatatctggaacctactatgaaaatgaaaggacccttataggtactcacagccctttcatgtaagtatgatctgatatttaggtcttcagaagcctgtaggtttcatttctatgaggaatcgaggagcgttacatcctgatatccttccaggctgcttaagaatggactgcttcgacactgaaagtgctagttaaatggattcatatgaagtgctttactcccaaccattgagttatttataatgtatttattaggggagggtaccttgagtctattatatatgcttcatcaaaacatcttgttcatgttttatgtttttaaaaaaggcatttgaatgaatgtttgactcaggtttgttaaattaacttcagtaactgcagtaccaaaaattacactcaactgatgaaaaaaacgaattgtatgatttaggaatcaaaaactaaaataagtggaattatgtatcttttctaaagttaaaaaagtaaaatattttattatgagttattataaaaattggttaattgtataggaagatgacagtatttttttcaagttatcataaaaagtaattcagatgacatttgagaagtaggggaaagggaatcatgttgacagttttagttctgtgaacactaatttgtgtgaagctattaaaatgattgtaaagttgactactgtaaatttcccataattatgtgtgtatatgtgtcatatgtatgtacatgtatatgtctaaaaattactttacacatgtgcctacatagacacaccaagaagtggatgtatataatatagaaagtatatagcaaagtaattttactctgataataaaaattgtttgacatgtattttgttatgaatagtttatcttccaaaagatattttgctctattttaaagtgtagaagaatacactgctaataaataataaaagttttattcaatttaaaaaaaaaaaaaaaaaa

SEQ ID NO: 538 - protein, 383 aa, Homo sapien
MAAESGELIGACEFMKDRLYFATLRNRPKSTVNTHYFSIDEELVYENFYADFGPLNLAMVYRYCCKLNKKLKSYSLSRKKIVHYTCFDQRKRANAAFLIGAYAVIYLKKTPEEAYRALLSGSNPPYLPFRDASFGNCTYNLTILDCLQGIRKGLQHGFFDFETFDVDEYEHYERVENGDFNWIVPGKFLAFSGPHPKSKIENGYPLHAPEAYFPYFKKHNVTAVVRLNKKIYEAKRFTDAGFEHYDLFFIDGSTPSDNIVRRFLNICENTEGAIAVHCKAGLGRTGTLIACYVMKHYRFTHAEIIAWIRICRPGSIIGPQQHFLEEKQASLWVQGDIFRSKLKNRPSSEGSINKILSGLDDMSIGGNLSKTQNMERFGEVSFP

SEQ ID NO: 539 - DNA, 799 bp, Homo sapien
cactcccaaagaactgggtactcaacactgagcagatctgttctttgagctaaaaaccatgtgctgtaccaagagtttgctcctggctgctttgatgtcagtgctgctactccacctctgcggcgaatcagaagcagcaagcaactttgactgctgtcttggatacacagaccgtattcttcatcctaaatttattgtgggcttcacacggcagctggccaatgaaggctgtgacatcaatgctatcatctttcacacaaagaaaaagttgtctgtgtgcgcaaatccaaaacagacttgggtgaaatatattgtgcgtctcctcagtaaaaaagtcaagaacatgtaaaaactgtggcttttctggaatggaattggacatagcccaagaacagaaagaaccttgctggggttggaggtttcacttgcacatcatggagggtttagtgcttatctaatttgtgcctcactggacttgtccaattaatgaagttgattcatattgcatcatagtttgctttgtttaagcatcacattaaagttaaactgtattttatgttatttatagctgtaggttttctgtgtttagctatttaatactaattttccataagctattttggtttagtgcaaagtataaaattatatttgggggggaataagattatatggactttcttgcaagcaacaagctattttttaaaaaaactatttaacattcttttgtttatattgttttgtctcctaaattgttgtaattgcattataaaataagaaaaacattaataagacaaatatt

SEQ ID NO: 540 - protein, 96 aa, Homo sapien
MCCTKSLLLAALMSVLLLHLCGESEAASNFDCCLGYTDRILHPKFIVGFTRQLANEGCDINAIIFHTKKKLSVCANPKQTWVKYIVRLLSKKVKNM

SEQ ID NO: 541 - DNA, 3178 bp, Homo sapien
ggcaccgattcggggcctgcccggacttcgccgcacgctgcagaacctcgcccagcgcccaccatgccccggcagctcagcgcggcggccgcgctcttcgcgtccctggccgtaattttgcacgatggcagtcaaatgagagcaaaagcatttccagaaaccagagattattctcaacctactgcagcagcaacagtacaggacataaaaaaacctgtccagcaaccagctaagcaagcacctcaccaaactttagcagcaagattcatggatggtcatatcacctttcaaacagcggccacagtaaaaattccaacaactaccccagcaactacaaaaaacactgcaaccaccagcccaattacctacaccctggtcacaacccaggccacacccaacaactcacacacagctcctccagttactgaagttacagtcggccctagcttagccccttattcactgccacccaccatcaccccaccagctcatacagctggaaccagttcatcaaccgtcagccacacaactgggaacaccactcaacccagtaaccagaccacccttccagcaactttatcgatagcactgcacaaaagcacaaccggtcagaagcctgatcaacccacccatgccccaggaacaacggcagctgcccacaataccacccgcacagctgcacctgcctccacggttcctgggcccacccttgcacctcagccatcgtcagtcaagactggaatttatcaggttctaaacggaagcagactctgtataaaagcagagatggggatacagctgattgttcaagacaaggagtcggttttttcacctcggagatacttcaacatcgaccccaacgcaacgcaagcctctgggaactgtggcacccgaaaatccaaccttctgttgaattttcagggcggatttgtgaatctcacatttaccaaggatgaagaatcatattatatcagtgaagtgggagcctatttgaccgtctcagatccagagacagtttaccaaggaatcaaacatgcggtggtgatgttccagacagcagtcgggcattccttcaagtgcgtgagtgaacagagcctccagttgtcagcccacctgcaggtgaaaacaaccgatgtccaacttcaagcctttgattttgaagatgaccactttggaaatgtggatgagtgctcgtctgactacacaattgtgcttcctgtgattggggccatcgtggttggtctctgccttatgggtatgggtgtctataaaatccgcctaaggtgtcaatcatctggataccagagaatctaattgttgcccggggggaatgaaaataatggaatttagagaactctttcatcccttccaggatggatgttgggaaattccctcagagtgtgggtccttcaaacaatgtaaaccaccatcttctattcaaatgaagtgagtcatgtgtgatttaagttcaggcagcacatcaatttctaaatactttttgtttattttatgaaagatatagtgagctgtttattttctagtttcctttagaatattttagccactcaaagtcaacatttgagatatgttgaattaacataatatatgtaaagtagaataagccttcaaattataaaccaagggtcaattgtaactaatactactgtgtgtgcattgaagattttattttacccttgatcttaacaaagcctttgctttgttatcaaatggactttcagtgcttttactatctgtgttttatggtttcatgtaacatacatattcctggtgtagcacttaactccttttccactttaaatttgtttttgttttttgagacggagtttcactcttgtcacccaggctggagtacagtggcacgatctcggcttatggcaacctccgcctcccgggttcaagtgattctcctgcttcagcttcccgagtagctgggattacaggcacacactaccacgcctggctaatttttgtatttttattatagacgggtttcaccatgttggccagactggtcttgaactcttgacctcaggtgatccacccacctcagcctcccaaagtgctgggattacaggcatgagccattgcgcccggccttaaatgttttttttaatcatcaaaaagaacaacatatctcaggttgtctaagtgtttttatgtaaaaccaacaaaaagaacaaatcagcttatattttttatcttgatgactcctgctccagaattgctagactaagaattaggtggctacagatggtagaactaaacaataagcaagagacaataataatggcccttaattattaacaaagtgccagagtctaggctaagcactttatctatatctcatttcattctcacaacttataagtgaatgagtaaactgagacttaagggaactgaatcacttaaatgtcacctggctaactgatggcagagccagagcttgaattcatgttggtctgacatcaaggtctttggtcttctccctacaccaagttacctacaagaacaatgacaccacactctgcctgaaggctcacacctcataccagcatacgctcaccttacagggaaatgggtttatccaggatcatgagacattagggtagatgaaaggagagctttgcagataacaaaatagcctatccttaataaatcctccactctctggaaggagactgaggggctttgtaaaacattagtcagttgctcatttttatgggattgcttagctgggctgtaaagatgaaggcatcaaataaactcaaagtatttttaaatttttttgataatagagaaacttcgctaaccaactgttctttcttgagtgtatagccccatcttgtggtaacttgctgcttctgcacttcatatccatatttcctattgttcactttattctgtagagcagcctgccaagaattttatttctgctgttttttttgctgctaaagaaaggaactaagtcaggatgttaacagaaaagtccacataaccctagaattcttagtcaaggaataattcaagtcagcctagagaccatgttgactttcctcatgtgtttccttatgactcagtaagttggcaaggtcctgactttagtcttaataaaacattgaattgtagtaaaggtttttgcaataaaaacttactttgg

SEQ ID NO: 542 - protein, 416 aa, Homo sapien
MPRQLSAAAALFASLAVILHDGSQMRAKAFPETRDYSQPTAAATVQDIKKPVQQPAKQAPHQTLAARFMDGHITFQTAATVKIPTTTPATTKNTATTSPITYTLVTTQATPNNSHTAPPVTEVTVGPSLAPYSLPPTITPPAHTAGTSSSTVSHTTGNTTQPSNQTTLPATLSIALHKSTTGQKPDQPTHAPGTTAAAHNTTRTAAPASTVPGPTLAPQPSSVKTGIYQVLNGSRLCIKAEMGIQLIVQDKESVFSPRRYFNIDPNATQASGNCGTRKSNLLLNFQGGFVNLTFTKDEESYYISEVGAYLTVSDPETVYQGIKHAVVMFQTAVGHSFKCVSEQSLQLSAHLQVKTTDVQLQAFDFEDDHFGNVDECSSDYTIVLPVIGAIVVGLCLMGMGVYKIRLRCQSSGYQRI

SEQ ID NO: 543 - DNA, 1415 bp, Homo sapien
agcatcgcgcgcaaggcctgccggttgctcggggtcgtatgacgcacttttccagctcgagccctcacgaggccgtgggtacgaccggaagccgcagactgaatctcgctctgttgcccagcccatctcggcccactgaaacctccacctcccgggttcaagcgattctcctgcctcagcctcccgagtagctgagattacaggcgcccgccaccacgcccagcatgctgatcccattttcaatgaagaattgcttccagttactttgtaactgccaggtcccagcagctggctttaaaaaaacagtaaaaaatgggctcattttacagtcaatttccaatgatgtctatcaaaatctggctgtggaagactggatccatgaccatatgaatctagaaggcaaaccaattctattcttttggcagaattctccctctgttgtaattggtaggcatcaaaatccttggcaggaatgtaacctgaatctaatgagagaagaaggtataaaactggctcggagaagaagtggaggaggaacagtctaccatgatatgggtaatatcaatttgactttctttacaaccaaaaaaaagtatgatagaatggaaaatctgaaattaattgtgagagctctgaatgctgtccaaccccagctggatgtgcaggctaccaaaagatttgaccttttacttgatggacagtttaaaatctcaggaacagcttctaagatcggccggactactgcctatcaccattgcactttattatgtagtactgatgggacgttcttgtcttctttgctaaagagcccttaccaagggatcaggagcaatgccactgctagcataccttccttagtgaaaaatcttttggaaaaggatcccactctgacctgtgaagtactaatgaatgctgttgctacagagtatgctgcttatcatcaaattgataatcacattcacctaataaacccaacggatgagacactgtttcctggaataaatagcaaagccaaagaactgcaaacttgggagtggatatatggcaaaactccaaagtttagtataaatacttcctttcatgtgttatatgaacagtcacacttggaaattaaagtattcatagacataaagaatggaagaattgaaatttgtaatattgaagcacctgatcattggttgccattggaaatacgtgacaaattaaattcaagtcttattggcagtaagttttgcccaactgaaactaccatgctaacaaatatattacttagaacatgtccacaagaccacaaactaaacagtaaatggaatattctctgtgaaaaaattaagggaataatgtgattccaagtaaatgtcttaatacagtttcaattagaaaataaaatgtctcatacttgcacattgtatgtc

SEQ ID NO: 544 - protein, 373 aa, Homo sapien
MLIPFSMKNCFQLLCNCQVPAAGFKKTVKNGLILQSISNDVYQNLAVEDWIHDHMNLEGKPILFFWQNSPSVVIGRHQNPWQECNLNLMREEGIKLARRRSGGGTVYHDMGNINLTFFTTKKKYDRMENLKLIVRALNAVQPQLDVQATKRFDLLLDGQFKISGTASKIGRTTAYHHCTLLCSTDGTFLSSLLKSPYQGIRSNATASIPSLVKNLLEKDPTLTCEVLMNAVATEYAAYHQIDNHIHLINPTDETLFPGINSKAKELQTWEWIYGKTPKFSINTSFHVLYEQSHLEIKVFIDIKNGRIEICNIEAPDHWLPLEIRDKLNSSLIGSKFCPTETTMLTNILLRTCPQDHKLNSKWNILCEKIKGIM

SEQ ID NO: 545 - DNA, 5428 bp, Homo sapien
gcggggagccggcggttatctgggcggcggagcgctcacaatgtggcaggagacagaaaagataagatgctcccaagtcccttgcagctctcttcagaagaaaaatcactagtgctctgctcttgccataataccaaacctttttgactcatgctttggtgctgcaacactggaagaattgcacacagtttccaggaatatctttttttcatttgagtgattctttgtggatgagaaaagatttgagtcttaataattaccttgttttaaagctatttctttatagtctgaactgtttaataaattgggccacttaccaatgagccacacagccagttcttgtcaggagctggttgaaaactgtgctgtgcatgtagcaggaatggcacaagaagatagccgtcgtggtcaagtgccatcttccttttatcatggtgccaaccaagaacttgacctgtccaccaaagtgtacaaaagggaatcaggaagtccttattctgtgttagtggacaccaagatgagcaaaccgcatctccatgaaacagaagaacagccatatttcagggagacaagagcagtgtctgacgtgcatgctgttaaggaagaccgggagaattctgatgacacagaggaggaagaggaagaagtctcttacaaaagggagcagatcatagtggaggtaaaccttaataatcaaacattaaatgtatctaaaggggaaaagggtgtctcttctcagtccaaagagactcctgttcttaagacaagcagtgaggaggaagaggaagagagtgaggaagaggccacagatgacagcaatgactatggagagaatgaaaagcagaagaaaaaggagaagatagtagagaaagtcagcgttacacaaaggagaaccaggagagctgcctctgttgccgcagctaccacttcccctactcccagaactacaagaggtcgtaggaagagtgtagagccacctaagcgtaagaagcgggccacaaaggagcccaaagcaccagtccagaaagctaagtgtgaagagaaagagactctgacctgtgagaagtgccccagggtatttaacactcgctggtacctggagaagcacatgaacgttactcataggcgcatgcagatttgtgataaatgtggcaagaagtttgtcctggaaagtgagctgtcccttcaccagcaaacagactgtgaaaaaaacattcagtgtgtttcctgtaacaaatcgttcaagaaactctggtcccttcatgaacatatcaagatcgtccatggatatgcagaaaagaaattttcctgtgaaatttgtgagaagaaattctataccatggctcatgtgcggaaacacatggttgcacacacaaaagacatgccatttacatgcgaaacctgtggaaaatcattcaaacgcagtatgtcactcaaggtgcactccttgcagcattctggagagaagccctttagatgcgagaactgtgacgaaaggtttcagtacaagtaccagctacgctcccacatgagcattcatattgggcacaaacagttcatgtgccagtggtgtggcaaggatttcaacatgaagcagtacttcgacgaacacatgaaaacacacactggagagaaaccctttatctgtgaaatctgtggcaaaagcttcaccagccgccccaacatgaagagacaccgcagaactcacacaggcgagaagccctatccatgtgatgtgtgtggccagcggttccgcttctcgaacatgcttaaggcccacaaggagaagtgctttcgggtgaccagccccgtgaatgtgccacctgctgtccagatcccacttacaacttccccagccaccccagttccttctgtggtgaacacagccacaaccccaacccctccaatcaatatgaatcctgtaagcactcttccccctcggcccatcccccaccccttctcacacctgcacatccacccacaccctcaccacccacaccaccttcccatccctccagtccctcacctcccgccacctccagctctctttaagagtgagcctttaaatcatagaggccagagtgaggacaactttctgcggcacctggcagagaagaacagttcagcacagcatcattaacatccgtctccttagtgtgttctccaggagacacgtccccatgtgtgagcgtgcacagagggagtcggtgagcatttccttagttctcagactctcctccgcctctaccaagagcttcgccagtgtcactgaatcaacagatccaagggaatgaacaagaagactaccttgagctcacagagggactgtcatctaaaccaggggaaccactgaactaaagcccaatttgcttgcattttctgatgacttttataagtttcaaatactcagacttgtggaattttataatttcatatcagctgatgaggtatgcttgcttttatatcccagacttctcctcaaagaggggataggcctggtttcctttgtactaatcgggaaggctgtgagattaatccagagcattaattgtatcactgtgtatggtaaggaattcttttcagcttttggtgccagctacagagttgagctggccatgtttcacagtatatcaagcattatagagaaagacagaaattttcttctttgtgtagctctcctaacgcactctttattttactacagaaattattttagagtttttgtatagacttctttggtagtctgtttctaaaatgaaatgtatttcaataagcagtgtaattttttcagtgtagctgaacctatgttgtaaaatagaaaaaaatttttataatcatcaaaatgtgattcttaaagatgcatataacttctataattcaaagctattcttacatccgtacaactcaaaaggtgcttcagagactagatgtatctgagagggtctccagaccaggttactgcaaaaatgaggttttgctttcaggatttggcgtaaatacttggtagttttgacatctctgcttaacactcaagagaggctccctaatgtgctcctgtcctccatgttctgcttggcttcgttagtgcattacatgaaatgatttgcaggggatggggccttttccagggaagtcacctaaagcttgcatgttttgaaaatttgaataaggctgtttgctgacaggaggaggaagtagtggagatcatttcatctcagtcacgtctgtttctcacttcccttaggaattgtgttgatgtttaacttttatgggatgacaaattgaaatcgctcattttgaggttgctttatttttctagaattgttataagaagctaaaatagtaaacttaaaatcacaaacatgacattgctgatagtggctgagaaattcagatgagaagacaaattggttatgaattttgaaatatctattatatgtaaaatgtggatatgttcacaaccttgagctattttaacacagtttaaatatagtgagggaaaactcctaagttttactgccctgtcctctgcaaattatgtaataccagcattcttaggcgataaagagagcagcacctctagtacctttaggcagattactttttcaagtttggggaacttcaaaagaccataatcaaccaggagcttattataggaaaggctgaacagaagggctagtgtattgattacacttaacagatcatatttatccagactcagtatagcttaaaattttgtatttctttatctgagagaactgagttcccaggctaaatcacttacctcccaccccctctccaattttttttttaagagacaaggtcttgctatgttgcccaggctagagtgcagtggctattcacaggtgcagttatagcacactacagcctccaactcttgggttcaagcaaccctgcctcagctaaccaagtagctgggactacaggtgcatgctaccatgcccagtccattttttaatcttgaaatttcttcatttttctttcttcggtttcttaaaatctttgcctgaatcagaacgctggcttttatttatttttttatttttaatattaaatgtgcagatatgcttcgagcacttttctaactaatgagctctgtggtaagaaaaaatgaactctttcaattgagattaagtccatatttttcaaacatcacgttctctattggctttttggtttagtgtttctaaattttctccttctgattttgcctgtcttatataatgagcataggaaaattttggaatgaggcagaaaagtatatcaagacatacttcctggttttggatgtaagttttaaagaatggtatttttaatatttgtacacattctttgagcacccaggtacccaagccaataaggaaagttaattccttgcatatgactgttatatctttagtggttgtctccctctccctccacagtctccttggcattccatgacaagtttgtcaacctacacttttatatagacatgtcattatttcatggtcaagcctgtagtattaaaatgatttttttaaaagatgtaaactgtgcttagttaattggttatattttgttctgtttttttttttttttttttttttttttgaggcagagtcttgttctgttgcctgggctggagtgcagtggcgtgatcttggctcactgcaacccccgccccccgggttcaagtgattctcctgcctcagcctcccgagtagctggaattacaggcatgcgccagcacgcccggctaagttttgtatttttggcagagatggggtttcaccatattggccaggctggtctcaaactcctgaccttgtgatccgcccacctcagcctccgaaagtgctgggattacaggcgtgagccaccacgtccaactgccttattttgttctgaataaatttacagtattgggcagcaattctggattctagacttgagaccacagaatcaaccatttcatgaggttgtactgtaattatacactggaatattcaggtagtcatctttgatttttcattcaagtaaatatagccataagaaaatatctgctatacaggaaaaccagtattaagcaaataccaccatccttaacagaaacaaaaatatatatatatattatttttaaaaattagcattgtcatacagtacaattcttagtgaagtgtattgtggaacaatttagaaacttcctttttttcccctagattaaggatactttccttgacttgagacttgtggtcttcaggaaaactactcagaatataatgactcctcatcagtatcatattgtatataaataatgaaatgcattaagaatattcacaacattgaacccaggaggcggagcttgcagtgagccgagattgcgccactgcgctccagcctgggcaacagagcgagactccatctc

SEQ ID NO: 546 - protein, 606 aa, Homo sapien
MSHTASSCQELVENCAVHVAGMAQEDSRRGQVPSSFYHGANQELDLSTKVYKRESGSPYSVLVDTKMSKPHLHETEEQPYFRETRAVSDVHAVKEDRENSDDTEEEEEEVSYKREQIIVEVNLNNQTLNVSKGEKGVSSQSKETPVLKTSSEEEEEESEEEATDDSNDYGENEKQKKKEKIVEKVSVTQRRTRRAASVAAATTSPTPRTTRGRRKSVEPPKRKKRATKEPKAPVQKAKCEEKETLTCEKCPRVFNTRWYLEKHMNVTHRRMQICDKCGKKFVLESELSLHQQTDCEKNIQCVSCNKSFKKLWSLHEHIKIVHGYAEKKFSCEICEKKFYTMAHVRKHMVAHTKDMPFTCETCGKSFKRSMSLKVHSLQHSGEKPFRCENCDERFQYKYQLRSHMSIHIGHKQFMCQWCGKDFNMKQYFDEHMKTHTGEKPFICEICGKSFTSRPNMKRHRRTHTGEKPYPCDVCGQRFRFSNMLKAHKEKCFRVTSPVNVPPAVQIPLTTSPATPVPSVVNTATTPTPPINMNPVSTLPPRPIPHPFSHLHIHPHPHHPHHLPIPPVPHLPPPPALFKSEPLNHRGQSEDNFLRHLAEKNSSAQHH

SEQ ID NO: 547 - DNA, 1387 bp, Homo sapien
caagagatgatatttatacattgcagatcaatcctgattctgcagttaatccggaacatttatcctatttccactttgttggacgaataatgggaatggctgtgtttcatggacattatattgatggtggtttcacattgcctttttataagcaattgcttgggaagtcaattaccttggatgacatggagttagtagatccggatcttcacaacagtttagtgtggatacttgagaatgatattacaggtgttttggaccataccttctgtgttgaacataatgcatatggtgaaattattcagcatgaacttaaaccaaatggcaaaagtatccctgttaatgaagaaaataaaaaagaatatgtcaggctctatgtgaactggagatttttacgaggcattgaggctcaattcttggctctgcagaaaggatttaatgaagtaattccacaacatctgctgaagacatttgatgagaaggagttagagctcattatttgtggacttggaaagatagatgttaatgactggaaggtaaacacccggttaaaacactgtacaccagacagcaacattgtcaaatggttctggaaagctgtggagttttttgatgaagagcgacgagcaagattgcttcagtttgtgacaggatcctctcgagtgcctctgcagggcttcaaagcattgcaaggtgctgcaggcccgagactctttaccatacaccagattgatgcctgcactaacaacctgccgaaagcccacacttgcttcaatcgaatagacattccaccctatgaaagctatgaaaagctatatgaaaagctgctaacagccattgaagaaacatgtggatttgctgtggaatgacaagcttcaaggatttacccaggactctatttatacaaccctgactgacagcctcctttcagcagagtttcaaagaatatgctgaaatacaggaaaacactcccccccccccccttttttttttttttttttacattttaggacactgtgaggggaaaggacaattttgaaattccttttcaaggaaaaaaaaggtctttatgctttgccatgaggccacattcagctgctatttaaacttaatatcttgaacctaaagaatgctgacttttcctacatttccagagttaggcagtattctacacttaaagactactactatttttataaaaggtaatctattcaaatttcttcacagatttcaagtctctcaaacatcaagacaacttcagcagtcggtacaagtcacatttcattttgattgaatacatgatcttgaacagctcctgtacttgctctttgtaaaaaaaaataaaattattttgaattattcaaaaaaaaaaaaaaaaaaaaaaaaa

SEQ ID NO: 548 - DNA, 2155 bp, Homo sapien
aaaggaccgaggcgtgcagcggacagcagatggatcccgcggccagcagctgcatgaggagcctccagcccccagcccctgtctggggctgccttcgaaacccccactcggaaggcaatggggcctcagggctaccccactacccgcccaccccgttctccttccaccagaaaccagacttcctggcgacagcgacggcagcgtaccctgacttctcagcctcctgcctggcagccaccccacacagcctgccccaggaggagcacatcttcactgagcagcaccccgctttcccacagtcccccaactggcacttccctgtctcagacgcccggcgcaggcccaactcaggcccggcagggggttccaaggaaatggggaccagcagcctgggcctggtggacaccacaggaggcccaggcgatgactacggggtgcttgggagcactgccaatgagacagagaagaaatcatccaggcggagaaaggagagttcaggtcaaagtgtggttccagaaccgaaggatgaagtggaagcgtgtgaagggaggtcagcccatctcccccaatgggcaggaccctgaggatggggactccacagcctctccaagttcagagtgagattctgcatggaggaaaaatgactaaggactgagccccctacccaactacccccaccccaatcccaccttcaccctcttccttccccagccagggcagcctctccacatctttccctgactcttggatatgaaactgcccagcattcctgggagtcttaggattttctaggaagttctgtccagcctcttagcagcctcttccctagggcctttgctcccacactctcatggaatcagacagagatcctaccgggccggatgaatctggaaacagcttcagagatactgcttctcagcgtctcttggctgccacccatgcctcctcctaccgctgttctcctaggtcagccaggcctcctcctggtctggacaccacctggcctggtgggagaggagctttggaaccagctggcgactcggaaagtaaatgcttcaaaaggaaggaaatgacagagacacacgcccttgcccaccttcctctgtaggctgcacatctgaggctttggggccccttagttgtcccgaaaccccaagaaaaatcagaatgaggagagtcaaggacagcaactcagctgctgcaagccagaaacacatccctgtctccaaatttgttggctaagtggagacacttctgagaactgactagagaagacagaaaaatagcccgatgtaggtttcggtgtccccatataggcccgtccacacaggcttgactgggtggacaagaatgaacccatgacagcacctgctgcttcaaaatcaaaatcaatttagggatacagcaggggctgttgggctgtgctccagagaaaaggagcagctactccttttaaatccacgatttctggattgaaaacctgtccagatgctgagttgttgggctgaacaactaggagctgaaaacaacgtagaggctggaaagtgtcccctgcattctggaggggaggggagataataaggagggctgctgggtgagggcctggagatgtggaaccctggagtggaaggttctccagtgacagtgtcctgtgactgcaaaaggggacaagaaaatccctcttcctccatgggatggatttaagctcttgctgtgtgttctacaaatgctgttattgtgggaggaaatgctaggtttttgtgtgtggactgcccagacctcagccaggtcttctggagatgacatttgaggactgatggccaaagagcatgggggactgaagccctggctgcctcagcgctctgtctcccaacaccagctggtgttgcagagggaggtcaacgtgagtttggatctcttgtacgcagatgtaatcattcacatgtaaaaataaccccacctccccaccccaaaaagggcaagagctgtggaaaatgattgccaaatgagatggctggttagagcatgattttttctaaagcatacttcatatattttcttaagattacatcaagctaattgtgcgagctcaattcactttgtaagaaaactctcggagaaataaaatcaataaaaagccaaaaaaaaaaataag

SEQ ID NO: 549 - protein, 184 aa, Homo sapien
MDPAASSCMRSLQPPAPVWGCLRNPHSEGNGASGLPHYPPTPFSFHQKPDFLATATAAYPDFSASCLAATPHSLPQEEHIFTEQHPAFPQSPNWHFPVSDARRRPNSGPAGGSKEMGTSSLGLVDTTGGPGDDYGVLGSTANETEKKSSRRRKESSGQSVVPEPKDEVEACEGRSAHLPQWAGP

SEQ ID NO: 550 - DNA, 2373 bp, Homo sapien
ggcacgaggagcgtttcgtttggacttctcgacttgagtgcccgcctccttcgccgccgcctctgcagtcctcagcgcagttatgcccagttcttcccgctgtggggacacgaccacggaggaatccttgcttcagggactcgggaccctgctggaccccttcctcgggtttaggggatgtggggaccaggagaaagtcaggatccctaagagtcttccctgcctggatggatgagtggcttcttctccacctagattctttccacaggagccagcatacttcctgaacatggagagtgttgttcgccgctgcccattcttatcccgagtcccccaggcctttctgcagaaagcaggcaaatctctgttgttctatgcccaaaactgccccaagatgatggaagttggggccaagccagcccctcgggcattgtccactgcagcagtacactaccaacagatcaaagaaacccctccggccagtgagaaagacaaaactgctaaggccaaggtccaacagactcctgatggatcccagcagagtccagatggcacacagcttccgtctggacaccccttgcctgccacaagccagggcactgcaagcaaatgccctttcctggcagcacagatgaatcagagaggcagcagtgtcttctgcaaagccagtcttgagcttcaggaggatgtgcaggaaatgaatgccgtgaggaaagaggttgctgaaacctcagcaggccccagtgtggttagtgtgaaaaccgatggaggggatcccagtggactgctgaagaacttccaggacattatgcaaaagcaaagaccagaaagagtgtctcatcttcttcaagataacttgccaaaatctgtttccacttttcagtatgatcgtttctttgagaaaaaaattgatgagaaaaagaatgaccacacctatcgagtttttaaaactgtgaaccggcgagcacacatcttccccatggcagatgactattcagactccctcatcaccaaaaagcaagtgtcagtctggtgcagtaatgactacctaggaatgagtcgccacccacgggtgtgtggggcagttatggacactttgaaacaacatggtgctggggcaggtggtactagaaatatttctggaactagtaaattccatgtggacttagagcgggagctggcagacctccatgggaaagatgccgcactcttgttttcctcgtgctttgtggccaatgactcaaccctcttcaccctggctaagatgatgccaggctgtgagatttactctgattctgggaaccatgcctccatgatccaagggattcgaaacagccgagtgccaaagtacatcttccgccacaatgatgtcagccacctcagagaactgctgcaaagatctgacccctcagtccccaagattgtggcatttgaaactgtccattcaatggatggggcggtgtgcccactggaagagctgtgtgatgtggcccatgagtttggagcaatcaccttcgtggatgaggtccacgcagtggggctttatggggctcgaggcggagggattggggatcgggatggagtcatgccaaaaatggacatcatttctggaacacttggcaaagcctttggttgtgttggagggtacatcgccagcacgagttctctgattgacaccgtacggtcctatgctgctggcttcatcttcaccacctctctgccacccatgctgctggctggagccctggagtctgtgcggatcctgaagagcgctgagggacgggtgcttcgccgccagcaccagcgcaacgtcaaactcatgagacagatgctaatggatgccggcctccctgttgtccactgccccagccacatcatccctgtgcgggttgcagatgctgctaaaaacacagaagtctgtgatgaactaatgagcagacataacatctacgtgcaagcaatcaattaccctacggtgccccggggagaagagctcctacggattgcccccacccctcaccacacaccccagatgatgaactacttccttgagaatctgctagtcacatggaagcaagtggggctggaactgaagcctcattcctcagctgagtgcaacttctgcaggaggccactgcattttgaagtgatgagtgaaagagagaagtcctatttctcaggcttgagcaagttggtatctgctcaggcctgagcatgacctcaattatttcacttaaccccaggccattatcatatccagatggtcttcagagttgtctttatatgtgaattaagttatattaaattttaatctatagtaaaaacatagtcctggaaataaaaaaaaaaaaaaaaaaaaaaaaaaaaaaaaaa

SEQ ID NO: 551 - protein, 640 aa, Homo sapien
MESVVRRCPFLSRVPQAFLQKAGKSLLFYAQNCPKMMEVGAKPAPRALSTAAVHYQQIKETPPASEKDKTAKAKVQQTPDGSQQSPDGTQLPSGHPLPATSQGTASKCPFLAAQMNQRGSSVFCKASLELQEDVQEMNAVRKEVAETSAGPSVVSVKTDGGDPSGLLKNFQDIMQKQRPERVSHLLQDNLPKSVSTFQYDRFFEKKIDEKKNDHTYRVFKTVNRRAHIFPMADDYSDSLITKKQVSVWCSNDYLGMSRHPRVCGAVMDTLKQHGAGAGGTRNISGTSKFHVDLERELADLHGKDAALLFSSCFVANDSTLFTLAKMMPGCEIYSDSGNHASMIQGIRNSRVPKYIFRHNDVSHLRELLQRSDPSVPKIVAFETVHSMDGAVCPLEELCDVAHEFGAITFVDEVHAVGLYGARGGGIGDRDGVMPKMDIISGTLGKAFGCVGGYIASTSSLIDTVRSYAAGFIFTTSLPPMLLAGALESVRILKSAEGRVLRRQHQRNVKLMRQMLMDAGLPVVHCPSHIIPVRVADAAKNTEVCDELMSRHNIYVQAINYPTVPRGEELLRIAPTPHHTPQMMNYFLENLLVTWKQVGLELKPHSSAECNFCRRPLHFEVMSEREKSYFSGLSKLVSAQA

SEQ ID NO: 552 - DNA, 885 bp, Homo sapien
agcctacgcacgaaagtgactagggaggaaggatattataaagtgatgcaaacagaaattccaccagcctccatgtatcatcatgtgtcataactcagtcaagctcagtgagcattctcagcacattgcctcaacagcttcaaggtgagccagctcaagactttgctctccaccaggcagaagatgacagactgtgaatttggatatatttacaggctggctcaggactatctgcagtgcgtcctacagataccacaacctggatcaggtccaagcaaaacgtccagagtgctacaaaatgttgcgttctcagtccaaaaagaagtggaaaagaatctgaagtcatgcttggacaatgttaatgttgtgtccgtagacactgccagaacactattcaaccaagtgatggaaaaggagtttgaagacggcatcattaactggggaagaattgtaaccatatttgcatttgaaggtattctcatcaagaaacttctacgacagcaaattgccccggatgtggatacctataaggagatttcatattttgttgcggagttcataatgaataacacaggagaatggataaggcaaaacggaggctgggaaaatggctttgtaaagaagtttgaacctaaatctggctggatgacttttctagaagttacaggaaagatctgtgaaatgctatctctcctgaagcaatactgttgaccagaaaggacactccatattgtgaaaccggcctaatttttctgactgatatggaaacgattgccaacacatacttctacttttaaataaacaactttgatgatgtaacttgaccttccagagttatggaaattttgtccccatgtaatgaataaattgtatgtatttttctct

SEQ ID NO: 553 - protein, 175 aa, Homo sapien
MTDCEFGYIYRLAQDYLQCVLQIPQPGSGPSKTSRVLQNVAFSVQKEVEKNLKSCLDNVNVVSVDTARTLFNQVMEKEFEDGIINWGRIVTIFAFEGILIKKLLRQQIAPDVDTYKEISYFVAEFIMNNTGEWIRQNGGWENGFVKKFEPKSGWMTFLEVTGKICEMLSLLKQYC

SEQ ID NO: 554 - DNA, 1003 bp, Homo sapien
gaattccctgaggcgggagaccggtggtctgcaccgtcctggagggagatatgagtggctggactctcagccagccactgggatgtgttcgggctttggaccttgaggccggagagagctcccgagaggaggcggcgcacgttcgttcttctgaggggacggtagatttgggggtttttcctctaggattctcgcgccgtttcctctgaagaaacagaaccagagagggaaggtgacctgaaagtcactgaataatttttttagagctgaacaagaatccaagcctgcaactgcaactgcagagacgagagatctttctgctgtctatactcttggaaagcacatcctaagatctttgcagattatctgtggaaggagaatgcctaaagtcaaacgaagccggaaagcaccccaggatggctgggagttgattgagccaacactggatcaattagatcaaaagatgagagaagctgaaacagaaccgcatgagggaaagaggaaagtggaatctctgtggcccatcttcaggatccaccaccagaaaacccgctacatcttcgacctcttttacaagcggaaagcctacagcagagaactcttagatatatgttataaagaaggcttagcagacaaaaacctgttggcaaaatggaaaaagcaaggtataggaaacttgtgctgcctgcggtgcattcagacacgggacaccaacttcgggacgaactgcatctgccgcgtgcccaaaagcaagctggaagtgggccgcatcatcgagtgcacacactgtggctgccgtggctgctctggctgacggtggctgctgctccaccctggactctggacttcgcaggttccttgcctgtcacgccacccccttcctgggagcagcgagcagtgccccaggcccgagttggagcacggtctctatggggaagcgttcgctgtctatcagctgtgatttgtaaaaataaaatctttaaatctctcgaaaaaaaaaaaa

SEQ ID NO: 555 - protein, 144 aa, Homo sapien
MPKVKRSRKAPQDGWELIEPTLDQLDQKMREAETEPHEGKRKVESLWPIFRIHHQKTRYIFDLFYKRKAYSRELLDICYKEGLADKNLLAKWKKQGIGNLCCLRCIQTRDTNFGTNCICRVPKSKLEVGRIIECTHCGCRGCSG

SEQ ID NO: 556 - DNA, 2718 bp, Homo sapien
ccgccatggggtccctgttccggagcgagaccatgtgcctggcgcagctcttcctgcagtcgggcacggcctacgagtgcctcagcgccctgggcgagaaaggcctggtccagttccgagacctcaaccagaacgtaagttctttccaaagaaaatttgttggtgaggtgaagaggtgtgaagagctagagcgaatattggtgtatttggtacaggaaattaatagagctgatattccccttcctgaaggagaggccagccctcctgcgccacccctgaaacaggttctagaaatgcaggagcagttgcagaagctcgaggttgaactgagagaagtcactaagaacaaggagaaactgaggaaaaacttgctggaactgatagagtacactcacatgctgagagtgacaaagacctttgtgaaacgcaacgttgagtttgaacccacttatgaagaattcccttccttagagagcgattctttgttggattacagctgtatgcagaggctgggagcaaaactgggatttgtgtctggcctaattaaccaaggaaaagtggaagcatttgaaaaaatgttgtggagagtctgcaaagggtacaccatcgtgtcctatgcagaactggatgaatcccttgaagaccctgaaacaggggaagtcataaaatggtatgtctttttaatatccttttggggagagcagattggccacaaggttaagaagatatgtgattgctaccactgccacgtgtacccctatccaaacacagccgaggagcggagggagatccaggaggggctgaacacccgcatccaggatctctacactgtactgcacaaaaccgaggactatttgaggcaagtgctatgtaaagccgccgagtctgtctacagccgtgtgatccaggtgaagaaaatgaaggccatctatcacatgctgaacatgtgcagctttgacgtgaccaacaagtgcctcattgctgaagtctggtgtcccgaggcggatctgcaggacctgcgccgggcactggaggagggctcgagagagagtggtgctacaatcccctcattcatgaatataatccccacaaaagaaacaccccccactcggatccgcaccaacaaattcaccgagggatttcagaacatcgtggatgcttatggagtcggaagctacagagaagtcaatccagctctctttaccatcatcaccttcccgtttttatttgctgtgatgtttggagacttcggacatggctttgtgatgtttttatttgccctcttgtgggtgttaaatgaaaatcatcccagactaaatcagtcacaagagatcatgaggatgttttttaatggccggtacatcctcctgctgatggggctgttctcagtgtacactggcctcatctacaacgactgcttttcaaagtcagtcaacctgttcggctctgggtggaacgtgtcggccatgtacagctccagccacccacccgcagagcataagaagatggtgctttggaacgacagcgtcgttagacacaacagcattttgcagctggatccaagcattcctggagtgttccgaggcccttatccccttggcattgatcctatttggaacttggccacaaatcgcctcacttttctaaactctttcaaaatgaaaatgtccgtgattttaggaatcattcatatgacttttggagtcattctgggaatatttaaccacttgcacttcaggaagaagttcaacatttacctggtttccatcccggaacttctcttcatgctctgtatctttggataccttatatttatgattttctacaagtggctggttttttcagcagaaacctccagagttgctcccagcattctgattgaatttattaacatgtttttattcccagccagtaaaacaagtggcctttacacagggcaggagtatgtccagagagtgctgctggttgtcacagcattgtctgtccctgtcctcttcttgggaaagccactgtttttgttgtggcttcacaatgggcgtagttgcttcggggtgaaccggagtggctacacacttataaggaaagatagtgaggaagaagtttcattgctgggaagccaagatatagaagagggaaatcaccaggtggaagatggatgtagagaaatggcgtgtgaagagtttaattttggagaaatattaatgacccaagtaatccattccatcgagtactgtctgggatgcatctccaacaccgcctcctacctgaggctctgggcgcttagcctggctcacgcacagttgtctgatgtcctgtgggccatgctgatgcgcgtgggcctccgcgttgacaccacctatggcgtcttgctactgctcccggttatcgcgctctttgcagttttgaccattttcatccttctgatcatggaagggctttctgcgtttcttcacgccatacgcctccactgggtagaatttcagaacaaattctacgttggtgcaggcaccaaatttgttcctttctcattcagtctactttcatcaaagttcaataacgacgacagtgtggcatgatcatattgctgtaaccaacaagctttcagatttatggagaatgaccatgttatagactttcacttatgtcagatttatgataggaaaaattccatcttcattactgccttatgacatagccaaataattctgtaagatatac

SEQ ID NO: 557 - protein, 856 aa, Homo sapien
MGSLFRSETMCLAQLFLQSGTAYECLSALGEKGLVQFRDLNQNVSSFQRKFVGEVKRCEELERILVYLVQEINRADIPLPEGEASPPAPPLKQVLEMQEQLQKLEVELREVTKNKEKLRKNLLELIEYTHMLRVTKTFVKRNVEFEPTYEEFPSLESDSLLDYSCMQRLGAKLGFVSGLINQGKVEAFEKMLWRVCKGYTIVSYAELDESLEDPETGEVIKWYVFLISFWGEQIGHKVKKICDCYHCHVYPYPNTAEERREIQEGLNTRIQDLYTVLHKTEDYLRQVLCKAAESVYSRVIQVKKMKAIYHMLNMCSFDVTNKCLIAEVWCPEADLQDLRRALEEGSRESGATIPSFMNIIPTKETPPTRIRTNKFTEGFQNIVDAYGVGSYREVNPALFTIITFPFLFAVMFGDFGHGFVMFLFALLWVLNENHPRLNQSQEIMRMFFNGRYILLLMGLFSVYTGLIYNDCFSKSVNLFGSGWNVSAMYSSSHPPAEHKKMVLWNDSVVRHNSILQLDPSIPGVFRGPYPLGIDPIWNLATNRLTFLNSFKMKMSVILGIIHMTFGVILGIFNHLHFRKKFNIYLVSIPELLFMLCIFGYLIFMIFYKWLVFSAETSRVAPSILIEFINMFLFPASKTSGLYTGQEYVQRVLLVVTALSVPVLFLGKPLFLLWLHNGRSCFGVNRSGYTLIRKDSEEEVSLLGSQDIEEGNHQVEDGCREMACEEFNFGEILMTQVIHSIEYCLGCISNTASYLRLWALSLAHAQLSDVLWAMLMRVGLRVDTTYGVLLLLPVIALFAVLTIFILLIMEGLSAFLHAIRLHWVEFQNKFYVGAGTKFVPFSFSLLSSKFNNDDSVA

SEQ ID NO: 558 - DNA, 1658 bp, Homo sapien
ctctctctctatctctctcagaatgacaattctaggtacaacttttggcatggttttttctttacttcaagtcgtttctggagaaagtggctatgctcaaaatggagacttggaagatgcagaactggatgactactcattctcatgctatagccagttggaagtgaatggatcgcagcattcactgacctgtgcttttgaggacccagatgtcaacaccaccaatctggaatttgaaatatgtggggccctcgtggaggtaaagtgcctgaatttcaggaaactacaagagatatatttcatcgagacaaagaaattcttactgattggaaagagcaatatatgtgtgaaggttggagaaaagagtctaacctgcaaaaaaatagacctaaccactatagttaaacctgaggctccttttgacctgagtgtcatctatcgggaaggagccaatgactttgtggtgacatttaatacatcacacttgcaaaagaagtatgtaaaagttttaatgcatgatgtagcttaccgccaggaaaaggatgaaaacaaatggacgcatgtgaatttatccagcacaaagctgacactcctgcagagaaagctccaaccggcagcaatgtatgagattaaagttcgatccatccctgatcactattttaaaggcttctggagtgaatggagtccaagttattacttcagaactccagagatcaataatagctcaggggagatggatcctatcttactaaccatcagcattttgagttttttctctgtcgctctgttggtcatcttggcctgtgtgttatggaaaaaaaggattaagcctatcgtatggcccagtctccccgatcataagaagactctggaacatctttgtaagaaaccaagaaaaaatttaaatgtgagtttcaatcctgaaagtttcctggactgccagattcatagggtggatgacattcaagctagagatgaagtggaaggttttctgcaagatacgtttcctcagcaactagaagaatctgagaagcagaggcttggaggggatgtgcagagccccaactgcccatctgaggatgtagtcgtcactccagaaagctttggaagagattcatccctcacatgcctggctgggaatgtcagtgcatgtgacgcccctattctctcctcttccaggtccctagactgcagggagagtggcaagaatgggcctcatgtgtaccaggacctcctgcttagccttgggactacaaacagcacgctgccccctccattttctctccaatctggaatcctgacattgaacccagttgctcagggtcagcccattcttacttccctgggatcaaatcaagaagaagcatatgtcaccatgtccagcttctaccaaaaccagtgaagtgtaagaaacccagactgaacttaccgtgagcgacaaagatgatttaaaagggaagtctagagttcctagtctccctcacagcacagagaagacaaaattagcaaaaccccactacacagtctgcaagattctgaaacattgctttgaccactcttcctgagttcagtggcactcaacatgagtcaagagcatcctgcttctaccatgtggatttggtcacaaggtttaaggtgacccaatgattcagctattt

SEQ ID NO: 559 - protein, 459 aa, Homo sapien [sequence omitted]

SEQ ID NO: 560 - DNA, 3100 bp, Homo sapien
actcgtctctggtaaagtctgagcaggacagggtggctgactggcagatccagaggttcccttggcagtccacgccaggccttcaccatggatcagttccctgaatcagtgacagaaaactttgagtacgatgatttggctgaggcctgttatattggggacatcgtggtctttgggactgtgttcctgtccatattctactccgtcatctttgccattggcctggtgggaaatttgttggtagtgtttgccctcaccaacagcaagaagcccaagagtgtcaccgacatttacctcctgaacctggccttgtctgatctgctgtttgtagccactttgcccttctggactcactatttgataaatgaaaagggcctccacaatgccatgtgcaaattcactaccgccttcttcttcatcggcttttttggaagcatattcttcatcaccgtcatcagcattgataggtacctggccatcgtcctggccgccaactccatgaacaaccggaccgtgcagcatggcgtcaccatcagcctaggcgtctgggcagcagccattttggtggcagcaccccagttcatgttcacaaagcagaaagaaaatgaatgccttggtgactaccccgaggtcctccaggaaatctggcccgtgctccgcaatgtggaaacaaattttcttggcttcctactccccctgctcattatgagttattgctacttcagaatcatccagacgctgttttcctgcaagaaccacaagaaagccaaagccattaaactgatccttctggtggtcatcgtgtttttcctcttctggacaccctacaacgttatgattttcctggagacgcttaagctctatgacttctttcccagttgtgacatgaggaaggatctgaggctggccctcagtgtgactgagacggttgcatttagccattgttgcctgaatcctctcatctatgcatttgctggggagaagttcagaagatacctttaccacctgtatgggaaatgcctggctgtcctgtgtgggcgctcagtccacgttgatttctcctcatctgaatcacaaaggagcaggcatggaagtgttctgagcagcaattttacttaccacacgagtgatggagatgcattgctccttctctgaagggaatcccaaagccttgtgtctacagagaacctggagttcctgaacctgatgctgactagtgaggaaagatttttgttgttatttcttacaggcacaaaatgatggacccaatgcacacaaaacaaccctagagtgttgttgagaattgtgctcaaaatttgaagaatgaacaaattgaactctttgaatgacaaagagtagacatttctcttactgcaaatgtcatcagaactttttggtttgcagatgacaaaaattcaactcagactagtttagttaaatgagggtggtgaatattgttcatattgtggcacaagcaaaagggtgtctgagccctcaaagtgaggggaaaccagggcctgagccaagctagaattccctctctctgactctcaaatcttttagtcattatagatcccccagactttacatgacacagctttatcaccagagagggactgacacccatgtttctctggccccaagggaaaattcccagggaagtgctctgataggccaagtttgtatcaggtgcccatccctggaaggtgctgttatccatggggaagggatatataagatggaagcttccagtccaatctcatggagaagcagaaatacatatttccaagaagttggatgggtgggtactattctgattacacaaaacaaatgccacacatcacccttaccatgtgcctgatccagcctctcccctgattacaccagcctcgtcttcattaagccctcttccatcatgtccccaaacctgcaagggctccccactgcctactgcatcgagtcaaaactcaaatgcttggcttctcatacgtccaccatggggtcctaccaatagattccccattgcctcctccttcccaaaggactccacccatcctatcagcctgtctcttccatatgacctcatgcatctccacctgctcccaggccagtaagggaaatagaaaaaccctgcccccaaataagaagggatggattccaaccccaactccagtagcttgggacaaatcaagcttcagtttcctggtctgtagaagagggataaggtacctttcacatagagatcatcctttccagcatgaggaactagccaccaactcttgcaggtctcaacccttttgtctgcctcttagacttctgctttccacacctgcactgctgtgctgtgcccaagttgtggtgctgacaaagcttggaagagcctgcaggtgccttggccgcgtgcatagcccagacacagaagaggctggttcttacgatggcacccagtgagcactcccaagtctacagagtgatagccttccgtaacccaactctcctggactgccttgaatatcccctcccagtcaccttgtgcaagcccctgcccatctgggaaaataccccatcattcatgctactgccaacctggggagccagggctatgggagcagcttttttttcccccctagaaacgtttggaacaatgtaaaactttaaagctcgaaaacaattgtaataatgctaaagaaaaagtcatccaatctaaccacatcaatattgtcattcctgtattcacccgtccagaccttgttcacactctcacatgtttagagttgcaatcgtaatgtacagatggttttataatctgatttgttttcctcttaacgttagaccacaaatagtgctcgctttctatgtagtttggtaattatcattttagaagactctaccagactgtgtattcattgaagtcagatgtggtaactgttaaattgctgtgtatctgatagctctttggcagtctatatgtttgtataatgaatgagagaataagtcatgttccttcaagatcatgtaccccaatttacttgccattactcaattgataaacatttaacttgtttccaatgtttagcaaatacatattttatagaacttc

SEQ ID NO: 561 - protein, 355 aa, Homo sapien
MDQFPESVTENFEYDDLAEACYIGDIVVFGTVFLSIFYSVIFAIGLVGNLLVVFALTNSKKPKSVTDIYLLNLALSDLLFVATLPFWTHYLINEKGLHNAMCKFTTAFFFIGFFGSIFFITVISIDRYLAIVLAANSMNNRTVQHGVTISLGVWAAAILVAAPQFMFTKQKENECLGDYPEVLQEIWPVLRNVETNFLGFLLPLLIMSYCYFRIIQTLFSCKNHKKAKAIKLILLVVIVFFLFWTPYNVMIFLETLKLYDFFPSCDMRKDLRLALSVTETVAFSHCCLNPLIYAFAGEKFRRYLYHLYGKCLAVLCGRSVHVDFSSSESQRSRHGSVLSSNFTYHTSDGDALLLL

SEQ ID NO: 562 - DNA, 2793 bp, Homo sapien
ctacccctttgtgagcagtctaggactttgtacacctgttaagtagggagaaggcaggggaggtggctggtttaaggggaacttgagggaagtagggaagactcctcttgggacctttggagtaggtgacacatgagcccagccccagctcacctgccaatccagctgaggagctcacctgccaatccagctgaggctgggcagaggtgggtgagaagagggaaaattgcagggacctccagttgggccaggccagaagctgctgtagctttaaccagacagctcagacctgtctggaggctgccagtgacaggttaggtttagggcagagaagaagcaagaccatggtggggaagatgtggcctgtgttgtggacactctgtgcagtcagggtgaccgtcgatgccatctctgtggaaactccgcaggacgttcttcgggcttcgcagggaaagagtgtcaccctgccctgcacctaccacacttccacctccagtcgagagggacttattcaatgggataagctcctcctcactcatacggaaagggtggtcatctggccgttttcaaacaaaaactacatccatggtgagctttataagaatcgcgtcagcatatccaacaatgctgagcagtccgatgcctccatcaccattgatcagctgaccatggctgacaacggcacctacgagtgttctgtctcgctgatgtcagacctggagggcaacaccaagtcacgtgtccgcctgttggtcctcgtgccaccctccaaaccagaatgcggcatcgagggagagaccataattgggaacaacatccagctgacctgccaatcaaaggagggctcaccaacccctcagtacagctggaagaggtacaacatcctgaatcaggagcagcccctggcccagccagcctcaggtcagcctgtctccctgaagaatatctccacagacacatcgggttactacatctgtacctccagcaatgaggaggggacgcagttctgcaacatcacggtggccgtcagatctccctccatgaacgtggccctgtatgtgggcatcgcggtgggcgtggttgcagccctcattatcattggcatcatcatctactgctgctgctgccgagggaaggacgacaacactgaagacaaggaggatgcaaggccgaaccgggaagcctatgaggagccaccagagcagctaagagaactttccagagagagggaggaggaggatgactacaggcaagaagagcagaggagcactgggcgtgaatccccggaccacctcgaccagtgacaggccagcagcagagggcggcggaggaagggttaggggttcattctcccgcttcctggcctcccttctcctttctaagccctgttctcctgtccctccatcccagacattgatggggacatttcttccccagtgtcagctgtggggaacatggctggcctggtaagggggtccctgtgctgatcctgctgacctcactgtcctgtgaagtaacccctcctggctgtgacacctggtgcgggcctggccctcactcaagaccaggctgcagcctccacttccctcgtagttggcaggagctcctggaagcacagcgctgagcatggggcgctcccactcagaactctccagggaggcgatgccagccttggggggtgggggctgtcctgctcacctgtgtgcccagcacctggaggggcaccaggtggagggtttgcactccacacatctttcttgaatgaatgaaagaataagtgagtatgcttgggccctgcattggcctggcctccagctcccactccctttccaacctcacttcccgtagctgccagtatgttccaaaccctcctgggaaggccacctcccactcctgctgcacaggccctggggagcttttgcccacacactttccatctctgcctgtcaatatcgtacctgtccctccaggcccatctcaaatcacaaggatttctctaaccctatcctaattgtccacatacgtggaaacaatcctgttactctgtcccacgtccaatcatgggccacaaggcacagtcttctgagcgagtgctctcactgtattagagcgccagctccttggggcagggcctgggcctcatggcttttgctttccctgaagccctagtagctggcgcccatcctagtgggcacttaagcttaattggggaaactgctttgattggttgtgccttcccttctctggtctccttgagatgatcgtagacacagggatgattcccacccaaacccacgtattcattcagtgagttaaacacgaattgatttaaagtgaacacacacaagggagcttgcttgcagatggtctgagttcttgtgtcctggtaattcctctccaggccagaataattggcatgtctcctcaacccacatggggttcctggttgttcctgcatcccgatacctcagccctggccctgcccagcccatttgggctctggttttctggtggggctgtcctgctgccctcccacagcctccttctgtttgtcgagcatttcttctactcttgagagctcaggcagcgttagggctgcttaggtctcatggaccagtggctggtctcacccaactgcagtttactattgctatcttttctggatgatcagaaaaataattccataaatctattgtctacttgcgattttttaaaaaatgtatatttttatatatattgttaaatcctttgcttcattccaaatgctttcagtaataataaaattgtgggtgg

SEQ ID NO: 563 - protein, 319 aa, Homo sapien
MVGKMWPVLWTLCAVRVTVDAISVETPQDVLRASQGKSVTLPCTYHTSTSSREGLIQWDKLLLTHTERVVIWPFSNKNYIHGELYKNRVSISNNAEQSDASITIDQLTMADNGTYECSVSLMSDLEGNTKSRVRLLVLVPPSKPECGIEGETIIGNNIQLTCQSKEGSPTPQYSWKRYNILNQEQPLAQPASGQPVSLKNISTDTSGYYICTSSNEEGTQFCNITVAVRSPSMNVALYVGIAVGVVAALIIIGIIIYCCCCRGKDDNTEDKEDARPNREAYEEPPEQLRELSREREEEDDYRQEEQRSTGRESPDHLDQ

SEQ ID NO: 564 - DNA, 4565 bp, Homo sapien
gaattccgggcagcatcatcaaggcacatagattctctctttgaacaatgcagctgctgcaggggatggggaagggatggcactggcaattcaagactgcctttcctacttcttcagtgcctctttcaccaatatgaagttaaaaccaggatccttcaaaccaaaaatgtggtggaagaaagaaaaccgtgtctttcagcagcatgccatcggaaaagaaaattagcagtgcaaatgactgcatcagcttcatgcaagctggctgtgagttgaagaaagtccggccaaattctcgcatttacaaccgttttttcactctggacacagaccttcaagctcttcgctgggaaccttcaaagaaagacctcgagaaagccaagcttgatatttctgccataaaagagatcagactggggaaaaacacggaaacatttacaaacaatggccttgctgaccagatctgtgaggactgtgccttttccatactccacggggaaaactatgagtctctggacctagttgccaattcagcagatgtggcaaacatctgggtgtctgggttacggtacctggtttctcgaagtaagcagcctcttgattttatggagggcaaccagaacacaccacggttcatgtggttgaaaacagtgtttgaagcagcagatgttgatgggaatgggattatgttggaagacacctctgtagagttaataaaacaactcaaccctactctgaaggaagccaagatcaggttaaagtttaaagaaatccagaagagcaaggaaaaactaaccacccgcgtgaccgaagaggaattttgtgaagctttttgtgaactttgcaccaggccagaagtgtatttcttacttgtacagatatctaaaaacaaagaatatttggatgccaatgatctcatgctctttttagaagctgagcaaggagtcacccatatcaccgaggatatatgcttagacatcataaggagatacgaactttctgaagagggacgtcaaaaagggtttcttgcaattgatggctttacccagtatttattgtcatcagaatgtgacatttttgatcctgagcaaaagaaggttgcccaagatatgacccagccattatctcactactatatcaatgcctctcataacacctatctaatagaagaccagttcagggggccagctgacatcaatgggtacattagagctttgaaaatgggctgtcgaagcgttgaactcgatgtaagtgatggttcagataatgaaccaatcctttgtaatcgaaataacatgacaacccatgtttcctttcgaagtgtcatagaggtaataaataaatttgcctttgttgcttctgaatacccactcattctttgcttgggaaatcactgctccttgccgcagcagaaggtaatggctcaacagatgaaaaaggtctttggcaataaactctatactgaagcacctttgccctcagaatcctacctcccatcaccagaaaaattaaaaagaatgatcattgtgaaaggaaagaagttgccttctgatccagatgtgttagaaggagaagtaacagatgaagatgaagaagctcaaatgtctcgaaggatgtcggtagattacaatggtgagcagaagcaaatccgactctgtagggagctctctgatttggtgtctatttgtaaatctgttcaatacagggattttgaactatctatgaaaagccaaaactattgggaaatgtgttcatttagtgaaacagaggccagccgcattgcaaatgagtacccagaggattttgttaattataataagaagttcttatcaagaatctatccaagtgccatgaggatcgattccagtaacttgaatccacaggacttttggaattgtggctgtcagattgtagcaatgaattttcagactccgggtccaatgatggaccttcacacgggctggtttcttcaaaacgggggatgtggttatgttctaaggccgtctataatgcgagatgaagtttcttacttcagcgcaaatacaaagggcattctacctggggtgtctcctctagctcttcatatcaagatcatcagtggtcagaatttcccaaagcccaagggagcttgtgccaaaggggatgtcatagatccctatgtttgtatagagatacacggaattccagcggattgttcggaacaaagaactaaaactgtacagcaaaacagtgataatcctatttttgatgaaacttttgagttccaagtaaacctacctgagctggccatgatccgttttgttgttctggatgatgactacattggggatgagtttatagggcaatatacgataccatttgaatgtttgcagcctggatatcggcatgttcccctgcgttcttttgtgggtgacatcatggagcacgtaaccctttttgtccacatagcaataactaatcgaagtggaggaggaaaggcacagaagcgcagtctttcagtgagaatggggaagaaagttcgggaatataccatgctcaggaatatcggtcttaaaaccattgatgacatctttaaaatagcggttcatccattacgagaagccatagatatgagagaaaatatgcagaatgcaatcgtgtctattaaggaactatgtggactccctccaattgccagtctgaagcagtgcctgttaactctgtcatctcggctcatcaccagtgacaatactccttcagtctcacttgtgatgaaagacagctttccttacctggagcctctgggtgcaattccagatgtgcagaaaaagatgctgactgcttatgatctgatgattcaagagagccggtttctcatagaaatggcggacacagtccaggaaaagattgtacagtgtcagaaagcagggatggagttccatgaagaacttcataatttgggggcaaaagaaggcttgaagggaagaaaactcaacaaagcaactgagagctttgcttggaacattacagtattgaagggccaaggagatctgttgaagaatgccaagaatgaagctatagaaaacatgaagcagatccagctggcatgcctgtcctgtggactgagtaaagcccccagcagcagtgctgaggccaagagcaagcgcagcctggaagccatagaggagaaggaaagtagtgaggagaatgggaagctgtgactctgggcattatcgacacgttcacccatcttatcaaggactctggtttctcattcttgttttctttctttaaatgttttataagttcacaaaatggtgccctatatggggtattggacatagatattttcacaatgtcagtatttcagtgtagttaatttatctaaattaaagcctttagtatcagtgttttaaattctgagacatgtgtcaacacccctgtgtggatgcctgtggaagagtgtgtgtgtgtgtgtgtgtgtgtgtgtgtgtgtgtgtggcagagagagagaaagagagagagagaaattctgttaaaatctattctgtgttgcattattcatttagtgagttattccttgatcattttgggacaattgttttaatctgaaattctaaagagcacttactgtaacctgttgctgtgtttaatttgacttctctgcctttgacatttaatttagtgatcttagcatagcttattattgaaggaagccaaatttatcaaagcatacatgttttggtagattaaatatagattagaaaaattcctaagaatcagagtagaaataaaagtgaatgaaagattaaacagatgatgagaatttctaaaaagattagcaaggtcatttcttcagtcagaaaactttaaaaaatatttattaaataaaatcaatttttaggaagttttctgtagtcatttactaaacatatgatttcactagaaaagctgatcataagtgaatttatacctacctgtgtggctactctgaaacacactgaaagctctgttgcaattaggatttgatgtgacataatattgttgtataatttcgagatttgtaggaaggtctcattcttccaagctgagagtctagcactcattttctataacagatatggcagcttagaggtgttggctttgtttggatgtaattttaggggtactaaaatttaaaatttaaagataattgttcaacaatatcatatcatcacattgagctgatataaattctgtgggtccgataatatctttgtgataatttaagagctaaccagttaccacacatctatgatataaccctaacacacacagaaagcatacatgcaaaaagaaatgactaattagggtacatttataattgcatctaggtaatttttaccctaatgtcttcataaagtacttgagtgtaatgtttgttacctccaacagaactaaatgttctatggttatgaaagaatatatttatttaaagcattgcttttattttgaaaagcttcttaattaatttgattaacaaatatgctaatttggggaaacctagagaagataattgttgaaattttgcaaatataaacatctcctat

SEQ ID NO: 565 - protein, 997 aa, Homo sapien
MPSEKKISSANDCISFMQAGCELKKVRPNSRIYNRFFTLDTDLQALRWEPSKKDLEKAKLDISAIKEIRLGKNTETFTNNGLADQICEDCAFSILHGENYESLDLVANSADVANIWVSGLRYLVSRSKQPLDFMEGNQNTPRFMWLKTVFEAADVDGNGIMLEDTSVELIKQLNPTLKEAKIRLKFKEIQKSKEKLTTRVTEEEFCEAFCELCTRPEVYFLLVQISKNKEYLDANDLMLFLEAEQGVTHITEDICLDIIRRYELSEEGRQKGFLAIDGFTQYLLSSECDIFDPEQKKVAQDMTQPLSHYYINASHNTYLIEDQFRGPADINGYIRALKMGCRSVELDVSDGSDNEPILCNRNNMTTHVSFRSVIEVINKFAFVASEYPLILCLGNHCSLPQQKVMAQQMKKVFGNKLYTEAPLPSESYLPSPEKLKRMIIVKGKKLPSDPDVLEGEVTDEDEEAQMSRRMSVDYNGEQKQIRLCRELSDLVSICKSVQYRDFELSMKSQNYWEMCSFSETEASRIANEYPEDFVNYNKKFLSRIYPSAMRIDSSNLNPQDFWNCGCQIVAMNFQTPGPMMDLHTGWFLQNGGCGYVLRPSIMRDEVSYFSANTKGILPGVSPLALHIKIISGQNFPKPKGACAKGDVIDPYVCIEIHGIPADCSEQRTKTVQQNSDNPIFDETFEFQVNLPELAMIRFVVLDDDYIGDEFIGQYTIPFECLQPGYRHVPLRSFVGDIMEHVTLFVHIAITNRSGGGKAQKRSLSVRMGKKVREYTMLRNIGLKTIDDIFKIAVHPLREAIDMRENMQNAIVSIKELCGLPPIASLKQCLLTLSSRLITSDNTPSVSLVMKDSFPYLEPLGAIPDVQKKMLTAYDLMIQESRFLIEMADTVQEKIVQCQKAGMEFHEELHNLGAKEGLKGRKLNKATESFAWNITVLKGQGDLLKNAKNEAIENMKQIQLACLSCGLSKAPSSSAEAKSKRSLEAIEEKESSEENGKL

SEQ ID NO: 566 - DNA, 3319 bp, Homo sapien
ggcggtcccctgttctccccgctcaggtgcggcgctgtggcaggaagccaccccctcggtcggccggtgcgcggggctgttgcgccatccgctccggctttcgtaaccgcaccctgggacggcccagagacgctccagcgcgagttcctcaaatgttttcctgcgttgccaggaccgtccgccgctctgagtcatgtgcgagtgggaagtcgcactgacactgagccgggccagagggagaggagccgagcgcggcgcggggccgagggactcgcagtgtgtgtagagagccgggctcctgcggatgggggctgcccccggggcctgagcccgcctgcccgcccaccgccccgccccgcccctgccacccctgccgcccggttcccattagcctgtccgcctctgcgggaccatggagtggtagccgaggaggaagcatgctggccgtcggctgcgcgctgctggctgccctgctggccgcgccgggagcggcgctggccccaaggcgctgccctgcgcaggaggtggcaagaggcgtgctgaccagtctgccaggagacagcgtgactctgacctgcccgggggtagagccggaagacaatgccactgttcactgggtgctcaggaagccggctgcaggctcccaccccagcagatgggctggcatgggaaggaggctgctgctgaggtcggtgcagctccacgactctggaaactattcatgctaccgggccggccgcccagctgggactgtgcacttgctggtggatgttccccccgaggagccccagctctcctgcttccggaagagccccctcagcaatgttgtttgtgagtggggtcctcggagcaccccatccctgacgacaaaggctgtgctcttggtgaggaagtttcagaacagtccggccgaagacttccaggagccgtgccagtattcccaggagtcccagaagttctcctgccagttagcagtcccggagggagacagctctttctacatagtgtccatgtgcgtcgccagtagtgtcgggagcaagttcagcaaaactcaaacctttcagggttgtggaatcttgcagcctgatccgcctgccaacatcacagtcactgccgtggccagaaacccccgctggctcagtgtcacctggcaagacccccactcctggaactcatctttctacagactacggtttgagctcagatatcgggctgaacggtcaaagacattcacaacatggatggtcaaggacctccagcatcactgtgtcatccacgacgcctggagcggcctgaggcacgtggtgcagcttcgtgcccaggaggagttcgggcaaggcgagtggagcgagtggagcccggaggccatgggcacgccttggacagaatccaggagtcctccagctgagaacgaggtgtccacccccatgcaggcacttactactaataaagacgatgataatattctcttcagagattctgcaaatgcgacaagcctcccagtgcaagattcttcttcagtaccactgcccacattcctggttgctggagggagcctggccttcggaacgctcctctgcattgccattgttctgaggttcaagaagacgtggaagctgcgggctctgaaggaaggcaagacaagcatgcatccgccgtactctttggggcagctggtcccggagaggcctcgacccaccccagtgcttgttcctctcatctccccaccggtgtcccccagcagcctggggtctgacaatacctcgagccacaaccgaccagatgccagggacccacggagcccttatgacatcagcaatacagactacttcttccccagatagctggctgggtggcaccagcagcctggaccctgtggatgacaaaacacaaacgggctcagcaaaagatgcttctcactgccatgccagcttatctcaggggtgtgcggcctttggcttcacggaagagccttgcggaaggttctacgccaggggaaaatcagcctgctccagctgttcagctggttgaggtttcaaacctccctttccaaatgcccagcttaaaggggttagagtgaacttgggccactgtgaagagaaccatatcaagactctttggacactcacacggacactcaaaagctgggcaggttggtgggggcctcggtgtggagaagcggctggcagcccacccctcaacacctctgcacaagctgcaccctcaggcaggtgggatggatttccagccaaagcctcctccagccgccatgctcctggcccactgcatcgtttcatcttccaactcaaactcttaaaacccaagtgcccttagcaaattctgtttttctaggcctggggacggcttttacttaaacgccaaggcctgggggaagaagctctctcctccctttcttccctacagttcaaaaacagctgagggtgagtgggtgaataatacagtatgtcagggcctggtcgttttcaacagaattataattagttcctcattagcagttttgcctaaatgtgaatgatgatcctaggcatttgctgaatacagaggcaactgcattggctttgggttgcaggacctcaggtgagaagcagaggaaggagaggagaggggcacagggtctctaccatcccctgtagagtgggagctgagtgggggatcacagcctctgaaaaccaatgttctctcttctccacctcccacaaaggagagctagcagcagggagggcttctgccatttctgagatcaaaacggttttactgcagctttgtttgttgtcagctgaacctgggtaactagggaagataatattaaggaagacaatgtgaaaagaaaaatgagcctggcaagaatgcgtttaaacttggtttttaaaaaactgctgactgttttctcttgagagggtggaatatccaatattcgctgtgtcagcatagaagtaacttacttaggtgtgggggaagcaccataactttgtttagcccaaaaccaagtcaagtgaaaaaggaggaagagaaaaaatattttcctgccaggcatggaggcccacgcacttcgggaggtcgaggcaggaggatcacttgagtccagaagtttgagatcagcctgggcaatgtgataaaaccccatctctacaaaaagcataaaaattagccaagtgtggtagagtgtgcctgaagtcccagatacttggggggctgaggtgggaggatctcttgagcctgggaggtcaaggctgcagtgagccgagattgcaccactgcactccagcctggggtgacagagcaagtgagaccctgtctc

SEQ ID NO: 567 - protein, 468 aa, Homo sapien
MLAVGCALLAALLAAPGAALAPRRCPAQEVARGVLTSLPGDSVTLTCPGVEPEDNATVHWVLRKPAAGSHPSRWAGMGRRLLLRSVQLHDSGNYSCYRAGRPAGTVHLLVDVPPEEPQLSCFRKSPLSNVVCEWGPRSTPSLTTKAVLLVRKFQNSPAEDFQEPCQYSQESQKFSCQLAVPEGDSSFYIVSMCVASSVGSKFSKTQTFQGCGILQPDPPANITVTAVARNPRWLSVTWQDPHSWNSSFYRLRFELRYRAERSKTFTTWMVKDLQHHCVIHDAWSGLRHVVQLRAQEEFGQGEWSEWSPEAMGTPWTESRSPPAENEVSTPMQALTTNKDDDNILFRDSANATSLPVQDSSSVPLPTFLVAGGSLAFGTLLCIAIVLRFKKTWKLRALKEGKTSMHPPYSLGQLVPERPRPTPVLVPLISPPVSPSSLGSDNTSSHNRPDARDPRSPYDISNTDYFFPR

SEQ ID NO: 568 - DNA, 938 bp, Homo sapien
caagagagagagagaggtgcaagccccaaagcgagcgacatgtccctttggggagcagtccctctgcaccccagagtgaggaggacgcaggggtcagaggtggctacagggcaggcagaggaggcacctgtagggggtggtgggctggtggcccaggagaagtcaggaagggagcccagctggtgacaagagagcccagaggtgcctggggctgagtgtgagagcccggaagatttcagccatgcctcacagctccgacagcagtgactccagcttcagccgctctcctccccctggcaaacaggactcatctgatgatgtgagaagagttcagaggagggagaaaaatcgtattgccgcccagaagagccgacagaggcagacacagaaggccgacaccctgcacctggagagcgaagacctggagaaacagaacgcggctctacgcaaggagatcaagcagctcacagaggaactgaagtacttcacgtcggtgctgaacagccacgagcccctgtgctcggtgctggccgccagcacgccctcgccccccgaggtggtgtacagcgcccacgcattccaccaacctcatgtcagctccccgcgcttccagccctgagcttccgatgcggggagagcagagcctcgggaggggcacacagactgtggcagagctgcgcccatcccgcagaggcccctgtccacctggagacccggagacagaggcctggacaaggagtgaacacgggaactgtcacgactggaagggcgtgaggcctcccagcagtgccgcagcgtttcgaggggcgtgtgctggaccccaccactgtgggttgcaggcccaatgcagaagagtattaagaaagatgctcaagtcccatggcacagagcaaggcgggcagggaacggttatttttctaaataaatgctttaaaaga

SEQ ID NO: 569 - protein, 125 aa, Homo sapien
MPHSSDSSDSSFSRSPPPGKQDSSDDVRRVQRREKNRIAAQKSRQRQTQKADTLHLESEDLEKQNAALRKEIKQLTEELKYFTSVLNSHEPLCSVLAASTPSPPEVVYSAHAFHQPHVSSPRFQP

SEQ ID NO: 570 - DNA, 2337 bp, Homo sapien
  Unsure 61: Unknown base
  Unsure 2277: Unknown base
cggaaggtgtgagccgcaaacccagcggagggcgggaagaaggaggaggcctctagggtgntcgggggactgggggccccgccggcagaggtccctcggcctcctgactgactgactgcggccgcctccggccaggacgctgggagctgcctgcgggaaggtgcggggagcggagccatggcctccggtgcgtataacccgtatatagagataattgaacaacccaggcagaggggaatgcgttttagatacaaatgtgaagggcgatcagcaggcagcattccaggggagcacagcacagacaacaaccgaacatacccttctatccagattatgaactattatggaaaaggaaaagtgagaattacattagtaacaaagaatgacccatataaacctcatcctcatgatttagttggaaaagactgcagagacggctactatgaagcagaatttggacaagaacgcagacctttgtttttccaaaatttgggtattcgatgtgtgaagaaaaaagaagtaaaagaagctattattacaagaataaaggcaggaatcaatccattcaatgtccctgaaaaacagctgaatgatattgaagattgtgacctcaatgtggtgagactgtgttttcaagtttttctccctgatgaacatggtaatttgacgactgctcttcctcctgttgtctcgaacccaatttatgacaaccgtgctccaaatactgcagaattaaggatttgtcgtgtaaacaagaattgtggaagtgtcagaggaggagatgaaatatttctactttgtgacaaagttcagaaagatgacatagaagttcgttttgtgttgaacgattgggaagcaaaaggcatcttttcacaagctgatgtacaccgtcaagtagccattgttttcaaaactccaccatattgcaaagctatcacagaacccgtaacagtaaaaatgcagttgcggagaccttctgaccaggaagttagtgaatctatggattttagatatctgccagatgaaaaagatacttacggcaataaagcaaagaaacaaaagacaactctgcttttccagaaactgtgccaggatcacgtagaaacagggtttcgccatgttgaccaggatggtcttgaactcctgacatcaggtgatccacccaccttggcctcccaaagtgctgggattacagttaattttcctgagagaccaagacctggtctcctcggttcaattggagaaggaagatacttcaaaaaagaaccaaacttgttttctcatgatgcagttgtgagagaaatgcctacaggggtttcaagtcaagcagaatcctactatccctcacctgggcccatctcaagtggattgtcacatcatgcctcaatggcacctctgccttcttcaagctggtcatcagtggcccaccccaccccacgctcaggcaatacaaacccactgagtagtttttcaacaaggacacttccttctaattcgcaaggtatcccaccattcctgagaatacctgttgggaatgatttaaatgcttctaatgcttgcatttacaacaatgccgatgacatagtcggaatggaagcgtcatccatgccatcagcagatttatatggtatttctgatcccaacatgctgtctaattgttctgtgaatatgatgacaaccagcagtgacagcatgggagagactgataatccaagacttctgagcatgaatcttgaaaacccctcatgtaattcagtgttagacccaagagacttgagacagctccatcagatgtcctcttccagtatgtcagcaggcgccaattccaatactactgtttttgtttcacaatcagatgcatttgagggatctgacttcagttgtgcagataacagcatgataaatgagtcgggaccatcaaacagtactaatccaaacagtcatggttttgttcaagatagtcagtattcaggtattggcagtatgcaaaatgagcaattgagtgactcctttccatatgaattttttcaagtataacttgcaagatttaaatccttttaaatcttgataccacctatatagatgcagcattttgtatttgtctaactggggatataatactatatttatactgtatatataatactgactgagaatataatactgtatttgagaatataaaaaacttttttcagggaagaagcatacaactttggacatagcgaatacaaaattggaagctgtcataaaaagacaactcagaggccaggcgcaggngctcacacctgtaatcctagcactttgggaggccaaggcgggtggatcacttgagaccag

SEQ ID NO: 571 - protein, 619 aa, Homo sapien
MASGAYNPYIEIIEQPRQRGMRFRYKCEGRSAGSIPGEHSTDNNRTYPSIQIMNYYGKGKVRITLVTKNDPYKPHPHDLVGKDCRDGYYEAEFGQERRPLFFQNLGIRCVKKKEVKEAIITRIKAGINPFNVPEKQLNDIEDCDLNVVRLCFQVFLPDEHGNLTTALPPVVSNPIYDNRAPNTAELRICRVNKNCGSVRGGDEIFLLCDKVQKDDIEVRFVLNDWEAKGIFSQADVHRQVAIVFKTPPYCKAITEPVTVKMQLRRPSDQEVSESMDFRYLPDEKDTYGNKAKKQKTTLLFQKLCQDHVETGFRHVDQDGLELLTSGDPPTLASQSAGITVNFPERPRPGLLGSIGEGRYFKKEPNLFSHDAVVREMPTGVSSQAESYYPSPGPISSGLSHHASMAPLPSSSWSSVAHPTPRSGNTNPLSSFSTRTLPSNSQGIPPFLRIPVGNDLNASNACIYNNADDIVGMEASSMPSADLYGISDPNMLSNCSVNMMTTSSDSMGETDNPRLLSMNLENPSCNSVLDPRDLRQLHQMSSSSMSAGANSNTTVFVSQSDAFEGSDFSCADNSMINESGPSNSTNPNSHGFVQDSQYSGIGSMQNEQLSDSFPYEFFQV

SEQ ID NO: 572 - DNA, 1743 bp, Homo sapien
ggcgcggggacgcgggtttctgcctcaggccctgccctgctctactctgcgctctctgcccgcgccgccgccgcctcagcctcggccctgcgctgcgcgcccggcccgtgctgccatggcctgccgcccgcgaagcccgccgaggcatcagagccgctgcgacggtgacgccagcccgccgtcccccgcgcgatggagcctgggacggaagcgcagagccgacggcaggcgctggaggcccgaagacgccgaggaggcagagcaccgcggcgccgagcgcagacccgagagctttaccactcctgaaggccctaaaccccgttccagatgctctgactgggcaagtgcagttgaagaagatgaaatgaggaccagagttaacaaagaaatggcaagatataaaaggaaactcctcatcaatgactttggaagagagagaaaatcatcatcaggaagttctgattcaaaggagtctatgtctactgtgccggctgactttgagacagatgaaagtgtcctaatgaggagacagaagcagatcaactatgggaagaacacaattgcctacgatcgttatattaaagaagtcccaagacaccttcgacaacctggcattcatcccaagacccctaataaatttaagaagtatagtcgacgttcatgggaccagcaaatcaaactctggaaggtggctctgcatttttgggatcctccagcggaagaaggatgtgatttgcaagaaatacaccctgtagaccttgaatctgcagaaagcagctccgagccccagaccagctctcaggatgactttgatgtgtactctggcacacccaccaaggtgagacacatggacagtcaagtggaggatgagtttgatttggaagcttgtttaactgaacccttgagagacttctcagccatgagctaactgccccctggcggccaggaagagaaacagctcctccccgactaggtggaaggctggccaggcaccaagcatgtgtgtgcacttgtacctggtggtttctctgttagcagtccattagctcatgctgaattatttttgccttactttcttaagaaacattaattttatgtatagtgagtatattttgcatgttttaaattgtaaatggagctaagtccaagaaagtacttgaagctctcttccagcgagcttaattgcgtaatccctgttgtcctccagggtaagctgacacgtctacataactggttttccacaggcatcttcagttattgcttgtcaggtggactgttttggatttaaccatgtaatccatgggaccaattgagagtcagctacttttataggcatcaaagtattctcagacacctttaatatctttatggaaacttaatttttggccttttatcaatatgtcataacagcattctgaagtcagacattgttaaattgagctattaaactaatgagttttatgtaagttatatggtcttaatttggtacttgtaaatagcactagttagactctttagaatactccaagagttagggcagcagagtggagcgatttagaaagaacattttaaaacaatcagttaatttaccatgtaaaattgctgtaaatgataatgtgtacagattttctgttcaaatattcaattgtaaacttcttgttaagactgttacgtttctattgcttttgtatgggatattgcaaaaataaaaaggaaagaaccctcaaaaaaaaaaaaaaaaaa

SEQ ID NO: 573 - protein, 270 aa, Homo sapien
MACRPRSPPRHQSRCDGDASPPSPARWSLGRKRRADGRRWRPEDAEEAEHRGAERRPESFTTPEGPKPRSRCSDWASAVEEDEMRTRVNKEMARYKRKLLINDFGRERKSSSGSSDSKESMSTVPADFETDESVLMRRQKQINYGKNTIAYDRYIKEVPRHLRQPGIHPKTPNKFKKYSRRSWDQQIKLWKVALHFWDPPAEEGCDLQEIHPVDLESAESSSEPQTSSQDDFDVYSGTPTKVRHMDSQVEDEFDLEACLTEPLRDFSAMS

SEQ ID NO: 574 - DNA, 3107 bp, Homo sapien
aagcggcaggagcagcgttggcaccggcgaaccatggctgggattttctatttcgccctattttcgtgtctcttcgggatttgcgacgctgtcacaggttccagggtataccccgcgaatgaagttaccttattggattccagatctgttcagggagaacttgggtggatagcaagccctctggaaggagggtgggaggaagtgagtatcatggatgaaaaaaatacaccaatccgaacctaccaagtgtgcaatgtgatggaacccagccagaataactggctacgaactgattggatcacccgagaaggggctcagagggtgtatattgagattaaattcaccttgagggactgcaatagtcttccgggcgtcatggggacttgcaaggagacgtttaacctgtactactatgaatcagacaacgacaaagagcgtttcatcagagagaaccagtttgtcaaaattgacaccattgctgctgatgagagcttcacccaagtggacattggtgacagaatcatgaagctgaacaccgagatccgggatgtagggccattaagcaaaaaggggttttacctggcttttcaggatgtgggggcctgcatcgccctggtatcagtccgtgtgttctataaaaagtgtccactcacagtccgcaatctggcccagtttcctgacaccatcacaggggctgatacgtcttccctggtggaagttcgaggctcctgtgtcaacaactcagaagagaaagatgtgccaaaaatgtactgtggggcagatggtgaatggctggtacccattggcaactgcctatgcaacgctgggcatgaggagcggagcggagaatgccaagcttgcaaaattggatattacaaggctctctccacggatgccacctgtgccaagtgcccaccccacagctactctgtctgggaaggagccacctcgtgcacctgtgaccgaggctttttcagagctgacaacgatgctgcctctatgccctgcacccgtccaccatctgctcccctgaacttgatttcaaatgtcaacgagacatctgtgaacttggaatggagtagccctcagaatacaggtggccgccaggacatttcctataatgtggtatgcaagaaatgtggagctggtgaccccagcaagtgccgaccctgtggaagtggggtccactacaccccacagcagaatggcttgaagaccaccaaagtctccatcactgacctcctagctcataccaattacacctttgaaatctgggctgtgaatggagtgtccaaatataaccctaacccagaccaatcagtttctgtcactgtgaccaccaaccaagcagcaccatcatccattgctttggtccaggctaaagaagtcacaagatacagtgtggcactggcttggctggaaccagatcggcccaatggggtaatcctggaatatgaagtcaagtattatgagaaggatcagaatgagcgaagctatcgtatagttcggacagctgccaggaacacagatatcaaaggcctgaaccctctcacttcctatgttttccacgtgcgagccaggacagcagctggctatggagacttcagtgagcccttggaggttacaaccaacacagtgccttcccggatcattggagatggggctaactccacagtccttctggtctctgtctcgggcagtgtggtgctggtggtaattctcattgcagcttttgtcatcagccggagacggagtaaatacagtaaagccaaacaagaagcggatgaagagaaacatttgaatcaaggtgtaagaacatatgtggacccctttacgtacgaagatcccaaccaagcagtgcgagagtttgccaaagaaattgacgcatcctgcattaagattgaaaaagttataggagttggtgaatttggtgaggtatgcagtgggcgtctcaaagtgcctggcaagagagagatctgtgtggctatcaagactctgaaagctggttatacagacaaacagaggagagacttcctgagtgaggccagcatcatgggacagtttgaccatccgaacatcattcacttggaaggcgtggtcactaaatgtaaaccagtaatgatcataacagagtacatggagaatggctccttggatgcattcctcaggaaaaatgatggcagatttacagtcattcagctggtgggcatgcttcgtggcattgggtctgggatgaagtatttatctgatatgagctatgtgcatcgtgatctggccgcacggaacatcctggtgaacagcaacttggtctgcaaagtgtctgattttggcatgtcccgagtgcttgaggatgatccggaagcagcttacaccaccaggggtggcaagattcctatccggtggactgcgccagaagcaattgcctatcgtaaattcacatcagcaagtgatgtatggagctatggaatcgttatgtgggaagtgatgtcgtacggggagaggccctattgggatatgtccaatcaagatgtgattaaagccattgaggaaggctatcggttaccccctccaatggactgccccattgcgctccaccagctgatgctagactgctggcagaaggagaggagcgacaggcctaaatttgggcagattgtcaacatgttggacaaactcatccgcaaccccaacagcttgaagaggacagggacggagagctccagacctaacactgccttgttggatccaagctcccctgaattctctgctgtggtatcagtgggcgattggctccaggccattaaaatggaccggtataaggataacttcacagctgctggttataccacactagaggctgtggtgcacgtgaaccaggaggacctggcaagaattggtatcacagccatcacgcaccagaataagattttgagcagtgtccaggcaatgcgaacccaaatgcagcagatgcacggcagaatggttcccgtctgagccagtactgaataaactcaaaactcttgaaattagtttacctcatccatgcactttaattgaagaactgcactttttttacttcgtcttcgccctctgaaattaaagaaatg

SEQ ID NO: 575 - protein, 986 aa, Homo sapien
MAGIFYFALFSCLFGICDAVTGSRVYPANEVTLLDSRSVQGELGWIASPLEGGWEEVSIMDEKNTPIRTYQVCNVMEPSQNNWLRTDWITREGAQRVYIEIKFTLRDCNSLPGVMGTCKETFNLYYYESDNDKERFIRENQFVKIDTIAADESFTQVDIGDRIMKLNTEIRDVGPLSKKGFYLAFQDVGACIALVSVRVFYKKCPLTVRNLAQFPDTITGADTSSLVEVRGSCVNNSEEKDVPKMYCGADGEWLVPIGNCLCNAGHEERSGECQACKIGYYKALSTDATCAKCPPHSYSVWEGATSCTCDRGFFRADNDAASMPCTRPPSAPLNLISNVNETSVNLEWSSPQNTGGRQDISYNVVCKKCGAGDPSKCRPCGSGVHYTPQQNGLKTTKVSITDLLAHTNYTFEIWAVNGVSKYNPNPDQSVSVTVTTNQAAPSSIALVQAKEVTRYSVALAWLEPDRPNGVILEYEVKYYEKDQNERSYRIVRTAARNTDIKGLNPLTSYVFHVRARTAAGYGDFSEPLEVTTNTVPSRIIGDGANSTVLLVSVSGSVVLVVILIAAFVISRRRSKYSKAKQEADEEKHLNQGVRTYVDPFTYEDPNQAVREFAKEIDASCIKIEKVIGVGEFGEVCSGRLKVPGKREICVAIKTLKAGYTDKQRRDFLSEASIMGQFDHPNIIHLEGVVTKCKPVMIITEYMENGSLDAFLRKNDGRFTVIQLVGMLRGIGSGMKYLSDMSYVHRDLAARNILVNSNLVCKVSDFGMSRVLEDDPEAAYTTRGGKIPIRWTAPEAIAYRKFTSASDVWSYGIVMWEVMSYGERPYWDMSNQDVIKAIEEGYRLPPPMDCPIALHQLMLDCWQKERSDRPKFGQIVNMLDKLIRNPNSLKRTGTESSRPNTALLDPSSPEFSAVVSVGDWLQAIKMDRYKDNFTAAGYTTLEAVVHVNQEDLARIGITAITHQNKILSSVQAMRTQMQQMHGRMVPV

SEQ ID NO: 576 - DNA, 4289 bp, Homo sapien
gatcaatactgaggccgcgtcgacccccttgagccgagacccccccccagcccagcccccaccccaccccccgcacacgccccaccccccccacgacccagcctcataccgcaccagctgaggcacccaagaggattaccccctggggccctctcccgccccccaaaaaagagaagatcccctctcctggcccatcccttcccttcttccctcccccctccccccgaactttccctctcgcatgcttttcccctgcaccacggatcgcctctcggatgccgcttgcctggaagctgcgttaggagcgagcggcggcggtggcggcggtggcggcggcggcggcagctcgggagtgctatgaccggcaaactcgccgagaagctgccggtgaccatgagcagtttgctaaaccaactgcctgacaatctgtaccccgaggagatccccagcgcgctcaacctcttctccggcagcagcgactcggtagtccattacaatcagatggctacagagaatgtaatggacatcggtctgaccaacgagaagcccaacccggaactctcttactccggctccttccagccagcccccgggaacaagaccgtgacctacttgggaaagttcgccttcgactccccttccaactggtgccaggacaacatcattagcctcatgagcgccggcatcttgggggtgcccccggcttcaggggcgctaagcacgcagacgtccacggccagcatggtgcagccaccgcagggtgacgtggaggccatgtatcccgcgctacccccctactccaactgcggcgacctctactcagagcccgtgtctttccacgacccccagggcaatcccgggctcgcctattccccccaggattaccaatcggccaagccggcgttggacagcaatctcttccccatgattcctgactacaacctctaccaccaccccaacgacatgggctccattccggagcacaagcccttccagggcatggaccccatccgggtcaacccgccccctactacccctctggagaccatcaaggcattcaaagacaagcagatccacccgggctttggcagcctgccccagccgccgctcaccctcaagcccatccggccccgcaagtaccccaaccggcctagcaagacaccgctccacgaacggccccacgcgtgcccggccgagggctgcgaccgccgtttcagccgttcggacgagctgacccggcacctgcgcatccacacgggccacaagcccttccagtgccggatctgcatgcggagcttcagccgcagcgaccacctcaccactcacatccgcactcatacgggcgagaagccctttgcctgcgagttctgcgggcgcaagtttgcgcgcagcgacgagcgcaagcgccacgccaagatccacctcaagcaaaaggagaagaaggcggagaagggcggtgcaccctctgcatcctcggcgccccccgtgtcgctggcccccgtggtcaccacctgcgcctgaggatcgggcccccagatccccacttttcccctccagtgcctcccggctgctagcctgaaagcagcgggaaagccagccacggaggcgtaggggccgcgccctggcctctccatggacgtgcggccccttgcttccccttcgatgcccccggttcccaacctttcacgccggccagcggtcaggggccagggctggaggcgccttcccctcgcggtcccccacttagccaaggcgtgggggcggaaaggtggcgtctagcccgctttgttcagttcggatcgccttgatccaggggccgccgggccgcgccaaggacctgcaagggactgaaggcggagcccatccaaccctcgcccgacccaaacacctcattgtttcccccacgtctccctctataccccctcgaagactcgagagggggagggggtaaggagcgcaccaaagcgcagagcttgctgcccgccgcacgcacgcgcgcctgcgtgcggggatgcgcgcgagtgtgtgcgtgctcgcgtgtgtgtgtatgtgtgtgtgtgagtgtgtgtgtgtgcgcgcgcgcaagcgtgtgtgtttaagactcttgagctgaactgggctgtgtttaccccaaactcttccccacctcgggtccccaagccgctgggagatgtcccatgctgggggtccgcacgtggctggaggaggtggtcttccatccgctctgaaatcatgtttcttagagaaatgcctcggatgccgccgacgcggtgctgctgccgccgcttcgggtttggcccctcagaacccctccttttctgagcgcttccctcttaggcctcagggcagtttgatctgtggggagaaagagcagccatcgctgagcctgccttttaaaatatatgtgtatttccttagccccactctaagaaatctatgttcctgagtttgccccctgccctcccactccttccccttttcccctctaaaccttctcccatctctttcaaaatcttttcccagaaaggcaggcttcaaccagccactccagctttgtgtcttctctcaattacatagcaatttctccttcccaccatcatggggaagctggctctgcttttgccctttgtcatcaccaacacaacagatagaatttaaatataagtatatggtgtgcgtgtgtatgtatgtgtatgtatatgcatgcatgtgtataaagatgcacatgcgtacatatacataacatacacacaatatgtattcctagcaaaataaaatctctaaggtacttggttatccagtgcagtgcaccggaataaagagaatttgtaggcgtatacagctttaaatgatttattttttatgaaaatgttaactgatgagattatatctacatacgtgtgttatgtgtgtggatatagatgcacacatatctgtacatatacatgtgagtgtacatatatacacatatacacatctatgtatggatatgtgtgtatacacatatacacatctctgtccaaaatttcctcaaagatatggggattttttcatgaatccatgtggatgaatgaggtgtctcctttccatacccagtctcaccttctccccaccctacctcacctcttctcaggcacccctcttccccagctgtcctgccagcccttctcgtacagggtggctcctttgaagtggagtaatagggaaggttgctctctgccacagcttgcagcatggtcttgactgaatgtactgttcctgttagcgttacttctcctgtggtcagtaagttgcccagagagaaggaacaaaggtctggagtttacagaatgtctgtttttaaagtcactttatgcgttttccacttttttcttttttaagaaaaagaagtaccatttttgttttgttttgttttgatttttggtggtggataaataatactaaaaggactctagtggaaaggggggatatcgaagagcagggggttgtgaatttccaggtacttggactttttgtagaagtagagagaagaagatgaagtttgccaggagggcccatattttttcagctgaagggtaaaatctttctttgcagagacagtattttgctgaatactttttataatgtgatgattattaaaaaagcaaaaattttggtcacttccaagctagaaggaggaatcagataccctttaatattttttcctcgctccttctggtatatgcatgtcactgcatgataattgagttttcctttgttttaataaaactgttctcagacattaagctaaactaagagaaaaataactttgttgccaaaaggttgtgctatccagattttttatatgtctgcatgtttaaaaaaaaaaaagcaacaaaagaaaatgcactctaacttatgtgaactgagagaaaaaaatcaggttttaaacaggaaaacctatggggaatgatattttttgaaagacttttgtataaagttgagtacttagaaaaaagacaaaccagatgtaatatattttgtggatgtttttatttcttggatttatagtaccttatactaaggttaaaaaaatatgcttgatattgtgaaaaggtgaaattcttcaccaacatttcatttgctcctttgtcatattgtaatgccaatataatatagttaatgaaaacagcatttttaaaaaccgaaatattgaaatggtgtaatgttgtaccatttgcactgtgagcaaatgctaatacagtaaatatattgtgtttgctgacaatcaaaaaaaaaaaaaaaaaaaa

SEQ ID NO: 577 - protein, 387 aa, Homo sapien [sequence omitted]

SEQ ID NO: 578 - DNA, 3669 bp, Homo sapien
acctaaaaccttgcaagttcaggaagaaaccatctgcatccatattgaaaacctgacacaatgtatgcagcaggctcagtgtgagtgaactggaggcttctctacaacatgacccaaaggagcattgcaggtcctatttgcaacctgaagtttgtgactctcctggttgccttaagttcagaactcccattcctgggagctggagtacagcttcaagacaatgggtataatggattgctcattgcaattaatcctcaggtacctgagaatcagaacctcatctcaaacattaaggaaatgataactgaagcttcattttacctatttaatgctaccaagagaagagtatttttcagaaatataaagattttaatacctgccacatggaaagctaataataacagcaaaataaaacaagaatcatatgaaaaggcaaatgtcatagtgactgactggtatggggcacatggagatgatccatacaccctacaatacagagggtgtggaaaagagggaaaatacattcatttcacacctaatttcctactgaatgataacttaacagctggctacggatcacgaggccgagtgtttgtccatgaatgggcccacctccgttggggtgtgttcgatgagtataacaatgacaaacctttctacataaatgggcaaaatcaaattaaagtgacaaggtgttcatctgacatcacaggcatttttgtgtgtgaaaaaggtccttgcccccaagaaaactgtattattagtaagctttttaaagaaggatgcacctttatctacaatagcacccaaaatgcaactgcatcaataatgttcatgcaaagtttatcttctgtggttgaattttgtaatgcaagtacccacaaccaagaagcaccaaacctacagaaccagatgtgcagcctcagaagtgcatgggatgtaatcacagactctgctgactttcaccacagctttcccatgaatgggactgagcttccacctcctcccacattctcgcttgtacaggctggtgacaaagtggtctgtttagtgctggatgtgtccagcaagatggcagaggctgacagactccttcaactacaacaagccgcagaattttatttgatgcagattgttgaaattcataccttcgtgggcattgccagtttcgacagcaaaggagagatcagagcccagctacaccaaattaacagcaatgatgatcgaaagttgctggtttcatatctgcccaccactgtatcagctaaaacagacatcagcatttgttcagggcttaagaaaggatttgaggtggttgaaaaactgaatggaaaagcttatggctctgtgatgatattagtgaccagcggagatgataagcttcttggcaattgcttacccactgtgctcagcagtggttcaacaattcactccattgccctgggttcatctgcagccccaaatctggaggaattatcacgtcttacaggaggtttaaagttctttgttccagatatatcaaactccaatagcatgattgatgctttcagtagaatttcctctggaactggagacattttccagcaacatattcagcttgaaagtacaggtgaaaatgtcaaacctcaccatcaattgaaaaacacagtgactgtggataatactgtgggcaacgacactatgtttctagttacgtggcaggccagtggtcctcctgagattatattatttgatcctgatggacgaaaatactacacaaataattttatcaccaatctaacttttcggacagctagtctttggattccaggaacagctaagcctgggcactggacttacaccctgaacaatacccatcattctctgcaagccctgaaagtgacagtgacctctcgcgcctccaactcagctgtgcccccagccactgtggaagcctttgtggaaagagacagcctccattttcctcatcctgtgatgatttatgccaatgtgaaacagggattttatcccattcttaatgccactgtcactgccacagttgagccagagactggagatcctgttacgctgagactccttgatgatggagcaggtgctgatgttataaaaaatgatggaatttactcgaggtattttttctcctttgctgcaaatggtagatatagcttgaaagtgcatgtcaatcactctcccagcataagcaccccagcccactctattccagggagtcatgctatgtatgtaccaggttacacagcaaacggtaatattcagatgaatgctccaaggaaatcagtaggcagaaatgaggaggagcgaaagtggggctttagccgagtcagctcaggaggctccttttcagtgctgggagttccagctggcccccaccctgatgtgtttccaccatgcaaaattattgacctggaagctgtaaaagtagaagaggaattgaccctatcttggacagcacctggagaagactttgatcagggccaggctacaagctatgaaataagaatgagtaaaagtctacagaatatccaagatgactttaacaatgctattttagtaaatacatcaaagcgaaatcctcagcaagctggcatcagggagatatttacgttctcaccccagatttccacgaatggacctgaacatcagccaaatggagaaacacatgaaagccacagaatttatgttgcaatacgagcaatggataggaactccttacagtctgctgtatctaacattgcccaggcgcctctgtttattccccccaattctgatcctgtacctgccagagattatcttatattgaaaggagttttaacagcaatgggtttgataggaatcatttgccttattatagttgtgacacatcatactttaagcaggaaaaagagagcagacaagaaagagaatggaacaaaattattataaataaatatccaaagtgtcttccttcttagatataagacccatggccttcgactacaaaaacatactaacaaagtcaaattaacatcaaaactgtattaaaatgcattgagtttttgtacaatacagataagatttttacatggtagatcaacaattctttttgggggtagattagaaaacccttacactttggctatgaacaaataataaaaattattctttaaagtaatgtctttaaaggcaaagggaagggtaaagtcggaccagtgtcaaggaaagtttgttttattgaggtggaaaaatagccccaagcagagaaaaggagggtaggtctgcattataactgtctgtgtgaagcaatcatttagttactttgattaatttttcttttctccttatctgtgcagaacaggttgcttgtttacaactgaagatcatgctatattttatatatgaagcccctaatgcaaagctctttacctcttgctattttgttatatatattacagatgaaatctcactgctaatgctcagagatcttttttcactgtaagaggtaacctttaacaatatgggtattacctttgtctcttcataccggttttatgacaaaggtctattgaatttatttgtttgtaagtttctactcccatcaaagcagctttctaagttattgccttggttattatggatgatagttatagcccttataatgccttacctaggaaa

SEQ ID NO: 579 - protein, 943 aa, Homo sapien
MTQRSIAGPICNLKFVTLLVALSSELPFLGAGVQLQDNGYNGLLIAINPQVPENQNLISNIKEMITEASFYLFNATKRRVFFRNIKILIPATWKANNNSKIKQESYEKANVIVTDWYGAHGDDPYTLQYRGCGKEGKYIHFTPNFLLNDNLTAGYGSRGRVFVHEWAHLRWGVFDEYNNDKPFYINGQNQIKVTRCSSDITGIFVCEKGPCPQENCIISKLFKEGCTFIYNSTQNATASIMFMQSLSSVVEFCNASTHNQEAPNLQNQMCSLRSAWDVITDSADFHHSFPMNGTELPPPPTFSLVQAGDKVVCLVLDVSSKMAEADRLLQLQQAAEFYLMQIVEIHTFVGIASFDSKGEIRAQLHQINSNDDRKLLVSYLPTTVSAKTDISICSGLKKGFEVVEKLNGKAYGSVMILVTSGDDKLLGNCLPTVLSSGSTIHSIALGSSAAPNLEELSRLTGGLKFFVPDISNSNSMIDAFSRISSGTGDIFQQHIQLESTGENVKPHHQLKNTVTVDNTVGNDTMFLVTWQASGPPEIILFDPDGRKYYTNNFITNLTFRTASLWIPGTAKPGHWTYTLNNTHHSLQALKVTVTSRASNSAVPPATVEAFVERDSLHFPHPVMIYANVKQGFYPILNATVTATVEPETGDPVTLRLLDDGAGADVIKNDGIYSRYFFSFAANGRYSLKVHVNHSPSISTPAHSIPGSHAMYVPGYTANGNIQMNAPRKSVGRNEEERKWGFSRVSSGGSFSVLGVPAGPHPDVFPPCKIIDLEAVKVEEELTLSWTAPGEDFDQGQATSYEIRMSKSLQNIQDDFNNAILVNTSKRNPQQAGIREIFTFSPQISTNGPEHQPNGETHESHRIYVAIRAMDRNSLQSAVSNIAQAPLFIPPNSDPVPARDYLILKGVLTAMGLIGIICLIIVVTHHTLSRKKRADKKENGTKLL

SEQ ID NO: 580 - DNA, 2015 bp, Homo sapien
actgcgaagcggcttcttcagagcacgggctggaactggcaggcaccgcgagcccctagcacccgacaagctgagtgtgcaggacgagtccccaccacacccacaccacagccgctgaatgaggcttccaggcgtccgctcgcggcccgcagagccccgccgtgggtccgcccgctgaggcgcccccagccagtgcgcttacctgccagactgcgcgccatggggcaacccgggaacggcagcgccttcttgctggcacccaatagaagccatgcgccggaccacgacgtcacgcagcaaagggacgaggtgtgggtggtgggcatgggcatcgtcatgtctctcatcgtcctggccatcgtgtttggcaatgtgctggtcatcacagccattgccaagttcgagcgtctgcagacggtcaccaactacttcatcacttcactggcctgtgctgatctggtcatgggcctggcagtggtgccctttggggccgcccatattcttatgaaaatgtggacttttggcaacttctggtgcgagttttggacttccattgatgtgctgtgcgtcacggccagcattgagaccctgtgcgtgatcgcagtggatcgctactttgccattacttcacctttcaagtaccagagcctgctgaccaagaataaggcccgggtgatcattctgatggtgtggattgtgtcaggccttacctccttcttgcccattcagatgcactggtaccgggccacccaccaggaagccatcaactgctatgccaatgagacctgctgtgacttcttcacgaaccaagcctatgccattgcctcttccatcgtgtccttctacgttcccctggtgatcatggtcttcgtctactccagggtctttcaggaggccaaaaggcagctccagaagattgacaaatctgagggccgcttccatgtccagaaccttagccaggtggagcaggatgggcggacggggcatggactccgcagatcttccaagttctgcttgaaggagcacaaagccctcaagacgttaggcatcatcatgggcactttcaccctctgctggctgcccttcttcatcgttaacattgtgcatgtgatccaggataacctcatccgtaaggaagtttacatcctcctaaattggataggctatgtcaattctggtttcaatccccttatctactgccggagcccagatttcaggattgccttccaggagcttctgtgcctgcgcaggtcttctttgaaggcctatgggaatggctactccagcaacggcaacacaggggagcagagtggatatcacgtggaacaggagaaagaaaataaactgctgtgtgaagacctcccaggcacggaagactttgtgggccatcaaggtactgtgcctagcgataacattgattcacaagggaggaattgtagtacaaatgactcactgctgtaaagcagtttttctacttttaaagacccccccccccccaacagaacactaaacagactatttaacttgagggtaataaacttagaataaaattgtaaaaattgtatagagatatgcagaaggaagggcatccttctgccttttttatttttttaagctgtaaaaagagagaaaacttatttgagtgattatttgttatttgtacagttcagttcctctttgcatggaatttgtaagtttatgtctaaagagctttagtcctagaggacctgagtctgctatattttcatgacttttccatgtatctacctcactattcaagtattaggggtaatatattgctgctggtaatttgtatctgaaggagattttccttcctacacccttggacttgaggattttgagtatctcggacctttcagctgtgaacatggactcttcccccactcctcttatttgctcacacggggtattttaggcagggatttgaggagcagcttcagttgttttcccgagcaaaggtctaaagtttacagtaaataaaatgtttgaccatg

SEQ ID NO: 581 - protein, 413 aa, Homo sapien
MGQPGNGSAFLLAPNRSHAPDHDVTQQRDEVWVVGMGIVMSLIVLAIVFGNVLVITAIAKFERLQTVTNYFITSLACADLVMGLAVVPFGAAHILMKMWTFGNFWCEFWTSIDVLCVTASIETLCVIAVDRYFAITSPFKYQSLLTKNKARVIILMVWIVSGLTSFLPIQMHWYRATHQEAINCYANETCCDFFTNQAYAIASSIVSFYVPLVIMVFVYSRVFQEAKRQLQKIDKSEGRFHVQNLSQVEQDGRTGHGLRRSSKFCLKEHKALKTLGIIMGTFTLCWLPFFIVNIVHVIQDNLIRKEVYILLNWIGYVNSGFNPLIYCRSPDFRIAFQELLCLRRSSLKAYGNGYSSNGNTGEQSGYHVEQEKENKLLCEDLPGTEDFVGHQGTVPSDNIDSQGRNCSTNDSLL

SEQ ID NO: 582 - DNA, 1789 bp, Homo sapien
ggttcaggaacctgctggttctgatacataaatcagacagcctctgctgcatgacacgaagcttgcttctgcctggcatctgtgagcagctgccaggctccggccaggatcccttccttctcctcattggctgatggatcccaaggggctcctctccttgaccttcgtgctgtttctctccctggcttttggggcaagctacggaacaggtgggcgcatgatgaactgcccaaagattctccggcagttgggaagcaaagtgctgctgcccctgacatatgaaaggataaataagagcatgaacaaaagcatccacattgtcgtcacaatggcaaaatcactggagaacagtgtcgagaacaaaatagtgtctcttgatccatccgaagcaggccctccacgttatctaggagatcgctacaagttttatctggagaatctcaccctggggatacgggaaagcaggaaggaggatgagggatggtaccttatgaccctggagaaaaatgtttcagttcagcgcttttgcctgcagttgaggctttatgagcaggtctccactccagaaattaaagttttaaacaagacccaggagaacgggacctgcaccttgatactgggctgcacagtggagaagggggaccatgtggcttacagctggagtgaaaaggcgggcacccacccactgaacccagccaacagctcccacctcctgtccctcaccctcggcccccagcatgctgacaatatctacatctgcaccgtgagcaaccctatcagcaacaattcccagaccttcagcccgtggcccggatgcaggacagacccctcagaaacaaaaccatgggcagtgtatgctgggctgttagggggtgtcatcatgattctcatcatggtggtaatactacagttgagaagaagaggtaaaacgaaccattaccagacaacagtggaaaaaaaaagccttacgatctatgcccaagtccagaaaccaggtcctcttcagaagaaacttgactccttcccagctcaggacccttgcaccaccatatatgttgctgccacagagcctgtcccagagtctgtccaggaaacaaattccatcacagtctatgctagtgtgacacttccagagagctgacaccagagaccaacaaagggactttctgaaggaaaatggaaaaaccaaaatgaacactgaacttggccacaggcccaagtttcctctggcagacatgctgcacgtctgtacccttctcagatcaactccctggtgatgtttcttccacatacatctgtgaaatgaacaaggaagtgaggcttcccaagaatttagcttgctgtgcagtggctgcaggcgcagaacagagcgttacttgataacagcgttccatctttgtgttgtagcagatgaaatggacagtaatgtgagttcagactttgggcatcttgctcttggctggaactgataataaaaatcagactgaaagccaggacatctgagtacctatctcacacactgaccaccagtcacaaagtctggaaaagtttacattttggctatctttactttgttctgggagctgatcatgataacctgcagacctgatcaagcctctgtgcctcagtttctctctcaggataaagagtgaatagaggccgaagggtgaatttcttattatacataaaacactctgatattattgtataaaggaagctaagaatattattttatttgcaaaacccagaagctaaaaagtcaataaacagaaagaatgattttgagaaa

SEQ ID NO: 583 - protein, 335 aa, Homo sapien
MDPKGLLSLTFVLFLSLAFGASYGTGGRMMNCPKILRQLGSKVLLPLTYERINKSMNKSIHIVVTMAKSLENSVENKIVSLDPSEAGPPRYLGDRYKFYLENLTLGIRESRKEDEGWYLMTLEKNVSVQRFCLQLRLYEQVSTPEIKVLNKTQENGTCTLILGCTVEKGDHVAYSWSEKAGTHPLNPANSSHLLSLTLGPQHADNIYICTVSNPISNNSQTFSPWPGCRTDPSETKPWAVYAGLLGGVIMILIMVVILQLRRRGKTNHYQTTVEKKSLTIYAQVQKPGPLQKKLDSFPAQDPCTTIYVAATEPVPESVQETNSITVYASVTLPES

SEQ ID NO: 584 - DNA, 641 bp, Homo sapien
atttaaattctgcagctcagagattcacacagaagtctggacacaattcagaagagccacccagaaggagacaacaatgtccctgctacccgtgccatacacagaggctgcctctttgtctactggttctactgtgacaatcaaagggcgaccacttgcctgtttcttgaatgaaccatatctgcaggtggatttccacactgagatgaaggaggaatcagacattgtcttccatttccaagtgtgctttggtcgtcgtgtggtcatgaacagccgtgagtatggggcctggaagcagcaggtggaatccaagaatatgccctttcaggatggccaagaatttgaactgagcatctcagtgctgccagataagtaccaggtaatggtcaatggccaatcctcttacacctttgaccatagaatcaagcctgaggctgtgaagatggtgcaagtgtggagagatatctccctgaccaaatttaatgtcagctatttaaagagataaccagacttcatgttgccaaggaatccctgtctctacgtgaacttgggattccaaagccagctaacagcatgatcttttctcacttcaatccttactcctgctcattaaaacttaatcaaacttcaaaaaaaaaaaa

SEQ ID NO: 585 - protein, 142 aa, Homo sapien
MSLLPVPYTEAASLSTGSTVTIKGRPLACFLNEPYLQVDFHTEMKEESDIVFHFQVCFGRRVVMNSREYGAWKQQVESKNMPFQDGQEFELSISVLPDKYQVMVNGQSSYTFDHRIKPEAVKMVQVWRDISLTKFNVSYLKR

SEQ ID NO: 586 - DNA, 1505 bp, Homo sapien
gctggtcggaggctcgcagtgctgtcggcgagaagcagtcgggtttggagcgcttgggtcgcgttggtgcgcggtggaacgcgcccagggaccccagttcccgcgagcagctccgcgccgcgcctgagagactaagctgaaactgctgctcagctcccaagatggtgccacccaaattgcatgtgcttttctgcctctgcggctgcctggctgtggtttatccttttgactggcaatacataaatcctgttgcccatatgaaatcatcagcatgggtcaacaaaatacaagtactgatggctgctgcaagctttggccaaactaaaatcccccggggaaatgggccttattccgttggttgtacagacttaatgtttgatcacactaataagggcaccttcttgcgtttatattatccatcccaagataatgatcgccttgacaccctttggatcccaaataaagaatatttttggggtcttagcaaatttcttggaacacactggcttatgggcaacattttgaggttactctttggttcaatgacaactcctgcaaactggaattcccctctgaggcctggtgaaaaatatccacttgttgttttttctcatggtcttggggcattcaggacactttattctgctattggcattgacctggcatctcatgggtttatagttgctgctgtagaacacagagatagatctgcatctgcaacttactatttcaaggaccaatctgctgcagaaataggggacaagtcttggctctaccttagaaccctgaaacaagaggaggagacacatatacgaaatgagcaggtacggcaaagagcaaaagaatgttcccaagctctcagtctgattcttgacattgatcatggaaagccagtgaagaatgcattagatttaaagtttgatatggaacaactgaaggactctattgatagggaaaaaatagcagtaattggacattcttttggtggagcaacggttattcagactcttagtgaagatcagagattcagatgtggtattgccctggatgcatggatgtttccactgggtgatgaagtatattccagaattcctcagcccctcttttttatcaactctgaatatttccaatatcctgctaatatcataaaaatgaaaaaatgctactcacctgataaagaaagaaagatgattacaatcaggggttcagtccaccagaattttgctgacttcacttttgcaactggcaaaataattggacacatgctcaaattaaagggagacatagattcaaatgtagctattgatcttagcaacaaagcttcattagcattcttacaaaagcatttaggacttcataaagattttgatcagtgggactgcttgattgaaggagatgatgagaatcttattccagggaccaacattaacacaaccaatcaacacatcatgttacagaactcttcaggaatagagaaatacaattaggattaaaataggtttttt

SEQ ID NO: 587 - protein, 441 aa, Homo sapien
MVPPKLHVLFCLCGCLAVVYPFDWQYINPVAHMKSSAWVNKIQVLMAAASFGQTKIPRGNGPYSVGCTDLMFDHTNKGTFLRLYYPSQDNDRLDTLWIPNKEYFWGLSKFLGTHWLMGNILRLLFGSMTTPANWNSPLRPGEKYPLVVFSHGLGAFRTLYSAIGIDLASHGFIVAAVEHRDRSASATYYFKDQSAAEIGDKSWLYLRTLKQEEETHIRNEQVRQRAKECSQALSLILDIDHGKPVKNALDLKFDMEQLKDSIDREKIAVIGHSFGGATVIQTLSEDQRFRCGIALDAWMFPLGDEVYSRIPQPLFFINSEYFQYPANIIKMKKCYSPDKERKMITIRGSVHQNFADFTFATGKIIGHMLKLKGDIDSNVAIDLSNKASLAFLQKHLGLHKDFDQWDCLIEGDDENLIPGTNINTTNQHIMLQNSSGIEKYN

SEQ ID NO: 588 - DNA, 2308 bp, Homo sapien
gagagactggatggacccacaagggtgacagcccaggcggaccgatcttcccatcccacatcctccggcgcgatgccaaaaagaggctgacggcaactgggccttctgcagagaaagacctccgcttcactgccccggctggtcccaagggtcaggaagatggattcatacctgctgatgtggggactgctcacgttcatcatggtgcctggctgccaggcagagctctgtgacgatgacccgccagagatcccacacgccacattcaaagccatggcctacaaggaaggaaccatgttgaactgtgaatgcaagagaggtttccgcagaataaaaagcgggtcactctatatgctctgtacaggaaactctagccactcgtcctgggacaaccaatgtcaatgcacaagctctgccactcggaacacaacgaaacaagtgacacctcaacctgaagaacagaaagaaaggaaaaccacagaaatgcaaagtccaatgcagccagtggaccaagcgagccttccaggtcactgcagggaacctccaccatgggaaaatgaagccacagagagaatttatcatttcgtggtggggcagatggtttattatcagtgcgtccagggatacagggctctacacagaggtcctgctgagagcgtctgcaaaatgacccacgggaagacaaggtggacccagccccagctcatatgcacaggtgaaatggagaccagtcagtttccaggtgaagagaagcctcaggcaagccccgaaggccgtcctgagagtgagacttcctgcctcgtcacaacaacagattttcaaatacagacagaaatggctgcaaccatggagacgtccatatttacaacagagtaccaggtagcagtggccggctgtgttttcctgctgatcagcgtcctcctcctgagtgggctcacctggcagcggagacagaggaagagtagaagaacaatctagaaaaccaaaagaacaagaatttcttggtaagaagccgggaacagacaacagaagtcatgaagcccaagtgaaatcaaaggtgctaaatggtcgcccaggagacatccgttgtgcttgcctgcgttttggaagctctgaagtcacatcacaggacacggggcagtggcaaccttgtctctatgccagctcagtcccatcagagagcgagcgctacccacttctaaatagcaatttcgccgttgaagaggaagggcaaaaccactagaactctccatcttattttcatgtatatgtgttcattaaagcatgaatggtatggaactctctccaccctatatgtagtataaagaaaagtaggtttacattcatctcattccaacttcccagttcaggagtcccaaggaaagccccagcactaacgtaaatacacaacacacacactctaccctatacaactggacattgtctgcgtggttcctttctcagccgcttctgactgctgattctcccgttcacgttgcctaataaacatccttcaagaactctgggctgctacccagaaatcattttacccttggctcaatcctctaagctaacccccttctactgagccttcagtcttgaatttctaaaaaacagaggccatggcagaataatctttgggtaacttcaaaacggggcagccaaacccatgaggcaatgtcaggaacagaaggatgaatgaggtcccaggcagagaatcatacttagcaaagttttacctgtgcgttactaattggcctctttaagagttagtttctttgggattgctatgaatgataccctgaatttggcctgcactaatttgatgtttacaggtggacacacaaggtgcaaatcaatgcgtacgtttcctgagaagtgtctaaaaacaccaaaaagggatccgtacattcaatgtttatgcaaggaaggaaagaaagaaggaagtgaagagggagaagggatggaggtcacactggtagaacgtaaccacggaaaagagcgcatcaggcctggcacggtggctcaggcctataaccccagctccctaggagaccaaggcgggagcatctcttgaggccaggagtttgagaccagcctgggcagcatagcaagacacatccctacaaaaaattagaaattggctggatgtggtggcatacgcctgtagtcctagccactcaggaggctgaggcaggaggattgcttgagcccaggagttcgaggctgcagtcagtcatgatggcaccactgcactccagcctgggcaacagagcaagatcctgtctttaaggaaaaaaagacaagg

SEQ ID NO: 589 - protein, 272 aa, Homo sapien
MDSYLLMWGLLTFIMVPGCQAELCDDDPPEIPHATFKAMAYKEGTMLNCECKRGFRRIKSGSLYMLCTGNSSHSSWDNQCQCTSSATRNTTKQVTPQPEEQKERKTTEMQSPMQPVDQASLPGHCREPPPWENEATERIYHFVVGQMVYYQCVQGYRALHRGPAESVCKMTHGKTRWTQPQLICTGEMETSQFPGEEKPQASPEGRPESETSCLVTTTDFQIQTEMAATMETSIFTTEYQVAVAGCVFLLISVLLLSGLTWQRRQRKSRRTI

SEQ ID NO: 590 - DNA, 2145 bp, Homo sapien
atcttttttcatcttctagctgtagctcgggctgcttgtcggcttggctccccctcccccctttgctctctgcctcgtctttccccaggacttcgctattttgcttttttaaaaaaaggcaagaaagaactaaactcccccctccctctcctccagtcgggctgcacctctgccttgcactttgcacagaggtagagagcgcgcgagggagagagaggaaagaaaaaaaataataaagagagccaagcagaagaggaggcgagaagcatgaagtgttaactcccccgtgccaaggcccgcgccgcccggacagacgcccgccgcgccttccagccccgagcggacgccgcgcgccgccctgcctgcagcccgggccggcgacggcgagcccttccttatgcaaagcgcgccagcagcgcgaaggcgggacgccgcgcaccgggccgggctcctccagcttcgccgccgcagccaccaccgccgccaccgcagctcgcggaggatcttcccgagcctgaagccgccggctcggcgcgcaaggaggcgagcgcaaggaggggccggggcgagcgagggagcacattggcgtgagcaggggggagggagggcgggcgcggggggcgcgggcagggcgggggggtgtgtgtgtgagcgcgcttggaggtttcgggccagccaccgccgcgcaagctagaagcgccccagcccggcaagctggctcacccgctggccacccagcacagcccgctggcccctctcctgcagcccatctggcggagcggcggcggcggcggcggcggcaggagaatggcatcagaactggcaatgagcaactccgacctgcccaccagtcccctggccatggaatatgttaatgacttcgatctgatgaagtttgaagtgaaaaaggaaccggtggagaccgaccgcatcatcagccagtgcggccgtctcatcgccgggggctcgctgtcctccacccccatgagcacgccgtgcagctcggtgcccccttcccccagcttctcggcgcccagcccgggctcgggcagcgagcagaaggcgcacctggaagactactactggatgaccggctacccgcagcagctgaaccccgaggcgctgggcttcagccccgaggacgcggtcgaggcgctcatcagcaacagccaccagctccagggcggcttcgatggctacgcgcgcggggcgcagcagctggccgcggcggccggggccggtgccggcgcctccttgggcggcagcggcgaggagatgggccccgcggccgccgtggtgtccgccgtgatcgccgcggccgccgcgcagagcggcgcgggcccgcactaccaccaccaccaccaccacgccgccggccaccaccaccacccgacggccggcgcgcccggcgccgcgggcagcgcggccgcctcggccggtggcgctgggggcgcgggcggcggtggcccggccagcgctgggggcggcggcggcggcggcggcggcggaggcggcgggggcgcggcgggggcggggggcgccctgcacccgcaccacgccgccggcggcctgcacttcgacgaccgcttctccgacgagcagctggtgaccatgtctgtgcgcgagctgaaccggcagctgcgcggggtcagcaaggaggaggtgatccggctgaagcagaagaggcggaccctgaaaaaccgcggctatgcccagtcctgccgcttcaagagggtgcagcagagacacgtcctggagtcggagaagaaccagctgctgcagcaagtcgaccacctcaagcaggagatctccaggctggtgcgcgagagggacgcgtacaaggagaaatacgagaagttggtgagcagcggcttccgagaaaacggctcgagcagcgacaacccgtcctctcccgagtttttcataactgagcccactcgcaagttggagccatcagtgggatacgccacattttggaagccccagcatcgtgtacttaccagtgtgttcacaaaatgaaatttgtgtgagagctgtacattaaaaaaaacatcattattattattatttgcagtcatggagaaccacctacccctgacttctgtttagtctcctttttaaataatactgtgttagaaaaaaaaa

SEQ ID NO: 591 - protein, 403 aa, Homo sapien
MASELAMSNSDLPTSPLAMEYVNDFDLMKFEVKKEPVETDRIISQCGRLIAGGSLSSTPMSTPCSSVPPSPSFSAPSPGSGSEQKAHLEDYYWMTGYPQQLNPEALGFSPEDAVEALISNSHQLQGGFDGYARGAQQLAAAAGAGAGASLGGSGEEMGPAAAVVSAVIAAAAAQSGAGPHYHHHHHHAAGHHHHPTAGAPGAAGSAAASAGGAGGAGGGGPASAGGGGGGGGGGGGGGAAGAGGALHPHHAAGGLHFDDRFSDEQLVTMSVRELNRQLRGVSKEEVIRLKQKRRTLKNRGYAQSCRFKRVQQRHVLESEKNQLLQQVDHLKQEISRLVRERDAYKEKYEKLVSSGFRENGSSSDNPSSPEFFITEPTRKLEPSVGYATFWKPQHRVLTSVFTK

SEQ ID NO: 592 - DNA, 1222 bp, Homo sapien
agctcagcaggacctcagccatgagacttctcatcctggccctccttggcatctgctctctcactgcatacattgtggaaggtgtagggagtgaagtctcagataagaggacctgtgtgagcctcactacccagcgactgccggttagcagaatcaagacctacaccatcacggaaggctccttgagagcagtaatttttattaccaaacgtggcctaaaagtctgtgctgatccacaagccacatgggtgagagacgtggtcaggagcatggacaggaaatccaacaccagaaataacatgatccagaccaagccaacaggaacccagcaatcgaccaatacagctgtgactctgactggctagtagtctctggcaccctgtccgtctccagccagccagctcatttcactttacacgctcatggactgagtttatactcaccttttatgaaagcactgcatgaataaaattattcctttgtatttttacttttaaatgtcttctgtattcacttatatgttctaattaataaattatttattattaagaatagttccctagtctattcattatatttagggaaaggtagtgtatcattgttgtttgatttctgaccttgtacctctctttgatggtaaccataatggaagagattctggctagtgtctatcagaggtgaaagctatatcaatctctcttagagtccagcttgtaatggttctttacacatcagtcacaagttacagctgtgacaatggcaacaatttgagatgtatttcaacttgtctctataatagaattctgtttatagaataagggagaaaataatccagtcttcactgggttcccattctgagggtccactactcaaaaatttgcttcactcaatttttttcacctctttgtgttttattttggtgtcctattaaaggaataaaatgacacaacttgtcccttttttgtcccattagcaaaaattagaattttggtataaagaaactttattcaagtaaaaatcaataccctttgaattggacaataatctcactaccttattaggatttctgtatttgccattacgctagttatcatgcatgttatgctttactgcgaataagcttttaatgctccaaatgctgacccatgcaatatttcctcatgtgatcacaatttgcagtaaacttttaattaaatgctcatctggtaactcaacaccccag

SEQ ID NO: 593 - protein, 114 aa, Homo sapien
MRLLILALLGICSLTAYIVEGVGSEVSDKRTCVSLTTQRLPVSRIKTYTITEGSLRAVIFITKRGLKVCADPQATWVRDVVRSMDRKSNTRNNMIQTKPTGTQQSTNTAVTLTG

SEQ ID NO: 594 - DNA, 1566 bp, Homo sapien
gagtcagcccccgggggaggccatgaacgccacggggaccccggtggcccccgagtcctgccaacagctggcggccggcgggcacagccggctcattgttctgcactacaaccactcgggccggctggccgggcgcggggggccggaggatggcggcctgggggccctgcgggggctgtcggtggccgccagctgcctggtggtgctggagaacttgctggtgctggcggccatcaccagccacatgcggtcgcgacgctgggtctactattgcctggtgaacatcacgctgagtgacctgctcacgggcgcggcctacctggccaacgtgctgctgtcgggggcccgcaccttccgtctggcgcccgcccagtggttcctacgggagggcctgctcttcaccgccctggccgcctccaccttcagcctgctcttcactgcaggggagcgctttgccaccatggtgcggccggtggccgagagcggggccaccaagaccagccgcgtctacggcttcatcggcctctgctggctgctggccgcgctgctggggatgctgcctttgctgggctggaactgcctgtgcgcctttgaccgctgctccagccttctgcccctctactccaagcgctacatcctcttctgcctggtgatcttcgccggcgtcctggccaccatcatgggcctctatggggccatcttccgcctggtgcaggccagcgggcagaaggccccacgcccagcggcccgccgcaaggcccgccgcctgctgaagacggtgctgatgatcctgctggccttcctggtgtgctggggcccactcttcgggctgctgctggccgacgtctttggctccaacctctgggcccaggagtacctgcggggcatggactggatcctggccctggccgtcctcaactcggcggtcaaccccatcatctactccttccgcagcagggaggtgtgcagagccgtgctcagcttcctctgctgcgggtgtctccggctgggcatgcgagggcccggggactgcctggcccgggccgtcgaggctcactccggagcttccaccaccgacagctctctgaggccaagggacagctttcgcggctcccgctcgctcagctttcggatgcgggagcccctgtccagcatctccagcgtgcggagcatctgaagttgcagtcttgcgtgtggatggtgcagccaccgggtgcgtgccaggcaggccctcctggggtacaggaagctgtgtgcacgcagcctcgcctgtatggggagcagggaacgggacaggcccccatggtcttcccggtggcctctcggggcttctgacgccaaatgggcttcccatggtcaccctggacaaggaggtaaccaccccacctccccgtaggagcagagagcaccctggtgtgggggcgagtggttccccacaaccccgcttctgtgtgattctggggaagtcccggcccctctctgggcctcagtagggctcccaggctgcaaggggtggactgtgggatgcatgccctggcaacattgaagttcgatcatggtaaaaaa

SEQ ID NO: 595 - protein, 384 aa, Homo sapien
MNATGTPVAPESCQQLAAGGHSRLIVLHYNHSGRLAGRGGPEDGGLGALRGLSVAASCLVVLENLLVLAAITSHMRSRRWVYYCLVNITLSDLLTGAAYLANVLLSGARTFRLAPAQWFLREGLLFTALAASTFSLLFTAGERFATMVRPVAESGATKTSRVYGFIGLCWLLAALLGMLPLLGWNCLCAFDRCSSLLPLYSKRYILFCLVIFAGVLATIMGLYGAIFRLVQASGQKAPRPAARRKARRLLKTVLMILLAFLVCWGPLFGLLLADVFGSNLWAQEYLRGMDWILALAVLNSAVNPIIYSFRSREVCRAVLSFLCCGCLRLGMRGPGDCLARAVEAHSGASTTDSSLRPRDSFRGSRSLSFRMREPLSSISSVRSI

SEQ ID NO: 596 - DNA, 1313 bp, Homo sapien
gtgggcagccgaggccgcgaactgcatcatggagaattttgtagccaccttggctaatgggatgagcctccagccgcctcttgaagaagtgtcctgtggccaggcggaaagcagtgagaagcccaacgctgaggacatgacatccaaagattactactttgactcctacgcacactttggcatccacgaggagatgctgaaggacgaggtgcgcaccctcacttaccgcaactccatgtttcataaccggcacctcttcaaggacaaggtggtgctggacgtcggctcgggcaccggcatcctctgcatgtttgctgccaaggccggggcccgcaaggtcatcgggatcgtgtgttccagtatctctgattatgcggtgaagatcgtcaaagccaacaagttagaccacgtggtgaccatcatcaaggggaaggtggaggaggtggagctcccagtggagaaggtggcatcatcatcagcgagtggatgggctactgcctcttctacgagtccatgctcaacaccgtgctctatgcccgggacaagtgtggcgcccgatggcctcatcttcccagaccgggccacgctgtatgtgacggccatcgaggaccggcagtacaaagactacaagatccactggtgggagaacgtgtatggcttcgacatgtcttgcatcaaagatgtggccattaaggagcccctagtggatgtcgtggaccccaaacagctggtcaccaacgcctgcctcataaaggaggtggacatctataccgtcaaggtggaagacctgaccttcacctccccgttctgcctgcaagtgaagcggaatgactacgtgcacgccctggtggcctacttcaacatcgagttcacacgctgccacaagaggaccggcttctccaccagccccgagtccccgtacacgcactggaagcagacggtgttctacatggaggactacctgaccgtgaagacgggcgaggagatcttcggcaccatcggcatgcggcccaacgccaagaacaaccgggacctggacttcaccatcgacctggacttcaagggccagctgtgcgagctgtcctgctccaccgactaccggatgcgctgaggcccggctctcccgccctgcacgagcccaggggctgagcgttcctaggcggtttcggggctcccccttcctctccctccctcccgcagaagggggttttaggggcctgggctggggggatggggagggcacatcgtgactgtgtttttcataacttatgtttttatatggttgcatttacgccaataaatcctcagctggg

SEQ ID NO: 597 - protein, 360 aa, Homo sapien
MENFVATLANGMSLQPPLEEVSCGQAESSEKPNAEDMTSKDYYFDSYAHFGIHEEMLKDEVRTLTYRNSMFHNRHLFKDKVVLDVGSGTGILCMFAAKAGARKVIGIVCSSISDYAVKIVKANKLDHVVTIIKGKVEEVELPVEKVASSSASGWATASSTSPCSTPCSMPGTSVAPDGLIFPDRATLYVTAIEDRQYKDYKIHWWENVYGFDMSCIKDVAIKEPLVDVVDPKQLVTNACLIKEVDIYTVKVEDLTFTSPFCLQVKRNDYVHALVAYFNIEFTRCHKRTGFSTSPESPYTHWKQTVFYMEDYLTVKTGEEIFGTIGMRPNAKNNRDLDFTIDLDFKGQLCELSCSTDYRMR

SEQ ID NO: 598 - DNA, 1991 bp, Homo sapien
acaggggtgaaggcccagagaccagcagaacggcatcccagccacgacggccactttgctctgtctgctgtccgccacggccctgctctgttccctgggacacccccgcccccacctcctcaggctgcctgatctgcccagctttccagctttcctctggattccggcctctggtcatccctccccaccctctctccaaggccctctcctggtctcccttcttctagaaccccttcctccacctccctctctgcagaacttctcctttaccccccaccccccaccactgccccctttccttttctgacctccttttggagggctcagcgctgcccagaccataggagagatgtgggaggctcagttcctgggcttgctgtttctgcagccgctttgggtggctccagtgaagcctctccagccaggggctgaggtcccggtggtgtgggcccaggagggggctcctgcccagctcccctgcagccccacaatccccctccaggatctcagccttctgcgaagagcaggggtcacttggcagcatcagccagacagtggcccgcccgctgccgcccccggccatcccctggcccccggccctcacccggcggcgccctcctcctgggggcccaggccccgccgctacacggtgctgagcgtgggtcccggaggcctgcgcagcgggaggctgcccctgcagccccgcgtccagctggatgagcgcggccggcagcgcggggacttctcgctatggctgcgcccagcccggcgcgcggacgccggcgagtaccgcgccgcggtgcacctcagggaccgcgccctctcctgccgcctccgtctgcgcctgggccaggcctcgatgactgccagccccccaggatctctcagagcctccgactgggtcattttgaactgctccttcagccgccctgaccgcccagcctctgtgcattggttccggaaccggggccagggccgagtccctgtccgggagtccccccatcaccacttagcggaaagcttcctcttcctgccccaagtcagccccatggactctgggccctggggctgcatcctcacctacagagatggcttcaacgtctccatcatgtataacctcactgttctgggtctggagcccccaactcccttgacagtgtacgctggagcaggttccagggtggggctgccctgccgcctgcctgctggtgtggggacccggtctttcctcactgccaagtggactcctcctgggggaggccctgacctcctggtgactggagacaatggcgactttacccttcgactagaggatgtgagccaggcccaggctgggacctacacctgccatatccatctgcaggaacagcagctcaatgccactgtcacattggcaatcatcacagtgactcccaaatcctttgggtcacctggatccctggggaagctgctttgtgaggtgactccagtatctggacaagaacgctttgtgtggagctctctggacaccccatcccagaggagtttctcaggaccttggctggaggcacaggaggcccagctcctttcccagccttggcaatgccagctgtaccagggggagaggcttcttggagcagcagtgtacttcacagagctgtctagcccaggtgcccaacgctctgggagagccccaggtgccctcccagcaggccacctcctgctgtttctcacccttggtgtcctttctctgctccttttggtgactggagcctttggctttcacctttggagaagacagtggcgaccaagacgattttctgccttagagcaagggattcaccctccgcaggctcagagcaagatagaggagctggagcaagaaccggagccggagccggagccggaaccggagcccgagcccgagcccgagccggagcagctctgacctggagctgaggcagccagcagatctcagcagcccagtccaaataaacgtcctgtctagcagc

SEQ ID NO: 599 - protein, 529 aa, Homo sapien
MWEAQFLGLLFLQPLWVAPVKPLQPGAEVPVVWAQEGAPAQLPCSPTIPLQDLSLLRRAGVTWQHQPDSGPPAAAPGHPLAPGPHPAAPSSWGPRPRRYTVLSVGPGGLRSGRLPLQPRVQLDERGRQRGDFSLWLRPARRADAGEYRAAVHLRDRALSCRLRLRLGQASMTASPPGSLRASDWVILNCSFSRPDRPASVHWFRNRGQGRVPVRESPHHHLAESFLFLPQVSPMDSGPWGCILTYRDGFNVSIMYNLTVLGLEPPTPLTVYAGAGSRVGLPCRLPAGVGTRSFLTAKWTPPGGGPDLLVTGDNGDFTLRLEDVSQAQAGTYTCHIHLQEQQLNATVTLAIITVTPKSFGSPGSLGKLLCEVTPVSGQERFVWSSLDTPSQRSFSGPWLEAQEAQLLSQPWQCQLYQGERLLGAAVYFTELSSPGAQRSGRAPGALPAGHLLLFLTLGVLSLLLLVTGAFGFHLWRRQWRPRRFSALEQGIHPRQAQTQDRGAGARTGAGAGAGTGARARARAGAALTWS

SEQ ID NO: 600 - DNA, 2308 bp, Homo sapien
gttttcaggctcttggcggtgaaggtcagagtgcagacctgagaccactgctcaccgacttcagactccagtttatctgtgccccagcttcctcacttagtctcagaagacttaggctgaggcctcagaaggagatctccatcctttgtccagagcagaacaggatggccatgtcccaggaatcattgaccttcaaggacgtgtttgtggacttcaccctggaggagtggcagcaactggactctgcccagaagaacctctacagggatgtcatgcttgagaactacagccacctggtgtccgtggggtatctagttgcgaagcctgatgtgatcttcaggttgggaccaggtggagagtcctggatggcagatggggggaccccggtacggacctgtgcagaagtctggcaagttgatgagcagatagatcactacaaggaaagccaagacaaacttccttggcaagctgcattcataggcaaggaaacactgaaggatgaaagcggtcaagaatccagaacatgtagaaaaagcatttatctgagcacagaatttgattctgtaaggcaaagactccctaaatattattcgtgggaaaaggcattcaaaacatcatttaaactttcttggtcaaaatggaagctatgtaagaaagaaagatgatggatgtaaagcatattggaaagtatgcttccattataatcttcataaagctcaacctgcagagagattttttgaccctaatcaacgagggaaagccctccaccaaaagcaagcccttagaaaaagtcagagaagtcaaactggggagaaactctacaaatgtactgaatgtggaaaagtgtttatccagaaagcaaacttagttgtacatcaaagaactcacaccggagagaaaccttatgaatgctgcgaatgtgcaaaagccttcagccagaagtcaaccctcatagcacaccagagaactcacacaggggagaagccctatgaatgcagtgaatgtggaaaaacctttatccagaagtcaactctgattaaacataagaaaattcatatggagagagaccctataaatgcagtgtctgtgagaaagccttcagtaggaagtcaactctcattaaacatcagataattcatatgggagaaaccttatgaatgtaataaatgtgggaaatcttttagtgttaaatcaactctcattgtatgtcacagaacataaatgcataagttgcatgctattgtgaatagtgtgatgaaattttgcactgtcctgctctttcctgctcaggatgcaaatcagtgaatctttttttttttttttttttgagacagagtcttgctctgtcatccaaactggagtgcagtggcacaatcttggctcactgcaacctccgcctcttgggttcaaccgattctcctgcctcaacctcccaaatagttgggattacaggcacatgccaccatacgcagctaatttgtatttttagtagagacagggtttcaccatgttggccagcctggtcttgaactcctgacctcaagtgatccgcctgcctcagcctcccaaagtgctgggattacaggcatgagccactgcacccggcttgaatcatccttttgtccagtattatatccatgctgtatatgctacccgcccactagtcccttagctgtctcagttgtcagattgactgtcatgggattgcagtgcttgcattaaagctacccttattgtataatgaccccaaagtgcaagagtagtgatgttggcaatttgcatacaccaaaaataagttataaagtgcttccttaaagtgaaatggttaaagttcttgacttaataaagaaaaaaaatgtatgctgaggttgttaagatttacagtaagaatgaatcttctatccagaaattgtgaaggaggaaaaagaaacttgtgctagttttgctgtcacatctgaaactgcaaaagttgtggccacagtgcatcataagtgctaagacgaaaaagacattaaatttgcggatggaaggcgtgaatagaaatgggttctgacagcaatcaggttcggtactattcacagtttcaggcatccgctagggatcttggaacatatcccccatggataagggaggggtactgtaccttgtcatattgtgcattaaagaattcattgagtgtaatcatgtaagtctaacacacatttaaaaagctctcagatatcatttcgccttcggttgatgtaagaaaattcaaagctactcaaatcattcaataaatgataaaattatttaaaaaaaaaaaaaaaaa

SEQ ID NO: 601 - protein, 166 aa, Homo sapien
MAMSQESLTFKDVFVDFTLEEWQQLDSAQKNLYRDVMLENYSHLVSVGYLVAKPDVIFRLGPGGESWMADGGTPVRTCAEVWQVDEQIDHYKESQDKLPWQAAFIGKETLKDESGQESRTCRKSIYLSTEFDSVRQRLPKYYSWEKAFKTSFKLSWSKWKLCKKER

SEQ ID NO: 602 - DNA, 2809 bp, Homo sapien
agattcgcggccgcgtcgacggtgcgcccaccggtcccgccgggcgcccgcgggacgcgccgccagggccctctccgccgggggctcggcgctcgcccacctcttccaaatttaaccattacctaaatccgaagggaaatgagcaaacctctcggattgggtgtcaaggtctcctccgggctggggctgagcaagccctcggagtgaccgtgggtgacagcggctccagggactcttggggcgcagtggggaaagtgccggaccaccatgccgcgctcatttctcgtcaaaagcaagaaggctcacagctaccaccagccgcgctccccaggaccagactattccctccgtttagagaatgtaccggcgcctagccgagcagacagcacttcaaatgcaggcggggcgaaagcggagccccgggaccgtttgtcccccgaatcgcagctgaccgaagccccagacagagcctccgcatcccccagacagctgcgaagcagcgtctgcgaacggagctcggagtttgaggacttctggaggcccccgtcaccctccgcgtctccagcctcggagaagtcaatgtgcccatcgctggacgaagcccagcccttccccctgcctttcaaaccgtactcatggagcggcctggcgggttctgacctgcggcacctggtgcagagctaccgaccgtgtggggccctggagcgtggcgctggcctgggcctcttctgtgaacccgccccggagcctggccacccggccgcgctgtacggcccgaagcgggctgccggcggcgcgggggccggggcgccagggaactgcatcgcaggggccggtgccaccgctggccctggcctagggctctacggcgacttcgggtctgcggcagccgggctgtatgaaaagcccacggcagcggcgggcttgctgtaccccgagcgtggccaccggctgcacgcaaacaaaggcgctggcgtcaaggtggagtcggagctgctgtgcacccgcctgctgctgggcggcggctcctacaagtgcatcaagtgcagcaaggtgttttccacgccgcacgggctcgaggtgcacgtgcgcaggtcccacagcggtaccagaccctttgcctgcgagatgtgcggcaagaccttcgggcacgcggtgagcctggagcagcacaaagccgtgcactcgcaggaacggagctttgactgtaagatctgtgggaagagcttcaagaggtcatccacactgtccacacacctgcttatccactcagacactcggccctacccctgtcagtactgtggcaagaggttccaccagaagtcagacatgaagaaacacactttcatccacactggtgagaagcttcacaagtgccaggtgtgcggcaaggcattcagccagagctccaacctcatcacccacagccgcaaacacacaggcttcaagcccttcggctgcgacctctgtgggaagggtttccagaggaaggtggacctccgaaggcaccgggagacgcagcatgggctcaaatgagcaccctggctggctgcaagcagcagctacacaacactacagagggcagcctccctgcttgccaccactctgctccctgcttgcctccactcccttctgactttccagaccccaggtccagtctgcagatcctaccaggttgctcctccttcgccttacctcctggagctgccagaagaaatgaggtaccttttcaaagtgcagccgagagtgagaaccaagtgactccctaggcttcggacacaaataggctcctctacacctgaagacaaaggcaaagtcaaatggggaccagaataaatcttagaccccacagtccttcccatttccagccttaatctacagacaggaatgcccttcaggtttcttccttcccccttcttgacctaccccagatatttgtgtggaagaggaggaatcaccatttacaaggtggacaaatgctaatatttttatctagaaagaagagtgagtgttaacttttatttttttccttctggggggtctgttgactcctttcttttgggtgctgcctataaatcttggaggaatcatttctcctcctcaaaaactgattcagaaactgacttggggaaggaatttaatactttgaagtcatgagatgcaccatcgaggctacccccaagaagaagcagaagagaagttggtaatgagaggggattagaggtcctcccttcagtagggctgtgaaaacctcatcactggaggtaaaagcacaagcaatgcctgtggacaagatgtcattcattcactcagcaaatgttcatggatcaccggctaccaagtaccaggcaccatgttaggtattggggaagagagactgaagtcacaacccctgactgctcctcaaaagctaacggttgcacctccaagtggctgggtctgttcttactcttggagggaattctgagaagacagcacagaattgtaaaccttcccttttgacccttttggattttatcaggtgtaaacaaaaagctgaacagttacttcaaagatatgtgtgtatattcagttttttattgttaagctgatattttaaagatttctgagctagcaggcatgtgggaaggaaggctctgtcttcaactctttgaccctccatgtgtaccatagaggggggaaaggtggtattttcactttgatgaggttggtaaatgtttttagatcttctggtaagcattatgtttgttaatacatatttattagagtgatgttttaagttaataaagtattaagagtaaaaaaaaaa

SEQ ID NO: 603 - protein, 422 aa, Homo sapien
MPRSFLVKSKKAHSYHQPRSPGPDYSLRLENVPAPSRADSTSNAGGAKAEPRDRLSPESQLTEAPDRASASPRQLRSSVCERSSEFEDFWRPPSPSASPASEKSMCPSLDEAQPFPLPFKPYSWSGLAGSDLRHLVQSYRPCGALERGAGLGLFCEPAPEPGHPAALYGPKRAAGGAGAGAPGNCIAGAGATAGPGLGLYGDFGSAAAGLYEKPTAAAGLLYPERGHRLHANKGAGVKVESELLCTRLLLGGGSYKCIKCSKVFSTPHGLEVHVRRSHSGTRPFACEMCGKTFGHAVSLEQHKAVHSQERSFDCKICGKSFKRSSTLSTHLLIHSDTRPYPCQYCGKRFHQKSDMKKHTFIHTGEKLHKCQVCGKAFSQSSNLITHSRKHTGFKPFGCDLCGKGFQRKVDLRRHRETQHGLK

SEQ ID NO: 604 - DNA, 2386 bp, Homo sapien
ggaggaggaagcaagcgagggggctggttcctgagcttcgcaattcctgtgtcgccttctgggctcccagcctgccgggtcgcatgatccctccggccggagctggtttttttgccagccaccgcgaggccggctgagttaccggcatccccgcagccacctcctctcccgacctgtgatacaaaagatcttccgggggctgcacctgcctgcctttgcctaaggcggatttgaatctctttctctcccttcagaatcttatcttggctttggatcttagaagagaatcactaaccagagacgagactcagtgagtgagcaggtgttttggacaatggactggttgagcccatccctattataaaaatgtctcagagcaaccgggagctggtggttgactttctctcctacaagctttcccagaaaggatacagctggagtcagtttagtgatgtggaagagaacaggactgaggccccagaagggactgaatcggagatggagacccccagtgccatcaatggcaacccatcctggcacctggcagacagccccgcggtgaatggagccactggccacagcagcagtttggatgcccgggaggtgatccccatggcagcagtaaagcaagcgctgagggaggcaggcgacgagtttgaactgcggtaccggcgggcattcagtgacctgacatcccagctccacatcaccccagggacagcatatcagagctttgaacaggatacttttgtggaactctatgggaacaatgcagcagccgagagccgaaagggccaggaacgcttcaaccgctggttcctgacgggcatgactgtggccggcgtggttctgctgggctcactcttcagtcggaaatgaccagacactgaccatccactctaccctcccacccccttctctgctccaccacatcctccgtccagccgccattgccaccaggagaaccactacatgcagcccatgcccacctgcccatcacagggttgggcccagatctggtcccttgcagctagttttctagaatttatcacacttctgtgagacccccacacctcagttcccttggcctcagaattcacaaaatttccacaaaatctgtccaaaggaggctggcaggtatggaagggtttgtggctgggggcaggagggccctacctgattggtgcaacccttaccccttagcctccctgaaaatgtttttctgccagggagcttgaaagttttcagaacctcttccccagaaaggagactagattgcctttgttttgatgtttgtggcctcagaattgatcattttccccccactctccccacactaacctgggttccctttccttccatccctaccccctaagagccatttaggggccacttttgactagggattcaggctgcttgggataaagatgcaaggaccaggactccctcctcacctctggactggctagagtcctcactcccagtccaaatgtcctccagaagcctctggctagaggccagccccacccaggagggagggggctatagctacaggaagcaccccatgccaaagctagggtggcccttgcagttcagcaccaccctagtcccttcccctccctggctcccatgaccatactgagggaccaactgggcccaagacagatgccccagagctgtttatggcctcagctgcctcacttcctacaagagcagcctgtggcatctttgccttgggctgctcctcatggtgggttcaggggactcagccctgaggtgaaagggagctatcaggaacagctatgggagccccagggtcttccctacctcaggcaggaagggcaggaaggagagcctgctgcatggggtggggtagggctgactagaagggccagtcctgcctggccaggcagatctgtgccccatgcctgtccagcctgggcagccaggctgccaaggccagagtggcctggccaggagctcttcaggcctccctctctcttctgctccacccttggcctgtctcatccccaggggtcccagccaccccgggctctctgctgtacatatttgagactagtttttattccttgtgaagatgatatactatttttgttaagcgtgtctgtatttatgtgtgaggagctgctggcttgcagtgcgcgtgcacgtggagagctggtgcccggagattggacggcctgatgctccctcccctgccctggtccagggaagctggccgagggtcctggctcctgaggggcatctgcccctcccccaacccccaccccacacttgttccagctctttgaaatagtctgtgtgaaggtgaaagtgcagttcagtaataaactgtgtttactcagtgaaaaaaaaaaaaaaaaaa

SEQ ID NO: 605 - protein, 233 aa, Homo sapien
MSQSNRELVVDFLSYKLSQKGYSWSQFSDVEENRTEAPEGTESEMETPSAINGNPSWHLADSPAVNGATGHSSSLDAREVIPMAAVKQALREAGDEFELRYRRAFSDLTSQLHITPGTAYQSFEQVVNELFRDGVNWGRIVAFFSFGGALCVESVDKEMQVLVSRIAAWMATYLNDHLEPWIQENGGWDTFVELYGNNAAAESRKGQERFNRWFLTGMTVAGVVLLGSLFSRK

SEQ ID NO: 606 - DNA, 1040 bp, Homo sapien
aacacatttcatctgggcttcttaaatctaaatctttaaaatgactaagttttcttccttttctctgtttttcctaatagttggggcttatatgactcatgtgtgtttcaatatggaaattattggagggaaagaagtgtcacctcattccaggccatttatggcctccatccagtatggcggacatcacgtttgtggaggtgttctgattgatccacagtgggtgctgacagcagcccactgccaatatcggtttaccaaaggccagtctcccactgtggttttaggcgcacactctctctcaaagaatgaggcctccaaacaaacactggagatcaaaaaatttataccattctcaagagttacatcagatcctcaatcaaatgatatcatgctggttaagcttcaaacagccgcaaaactcaataaacatgtcaagatgctccacataagatccaaaacctctcttagatctggaaccaaatgcaaggttactggctggggagccaccgatccagattcattaagaccttctgacaccctgcgagaagtcactgttactgtcctaagtcgaaaactttgcaacagccaaagttactacaacggcgacccttttatcaccaaagacatggtctgtgcaggagatgccaaaggccagaaggattcctgtaagggtgactcagggggccccttgatctgtaaaggtgtcttccacgctatagtctctggaggtcatgaatgtggtgttgccacaaagcctggaatctacaccctgttaaccaagaaataccagacttggatcaaaagcaaccttgtcccgcctcatacaaattaagttacaaataattttattggatgcacttgcttcttttttcctaatatgctcgcaggttagagttgggtgtaagtaaagcagagcacatatggggtccatttttgcacttgtaagtcattttattaaggaatcaagttctttttcacttgtatcactgatgtatttctaccatgctggttttattctaaataaaatttagaagact

SEQ ID NO: 607 - protein, 264 aa, Homo sapien
MTKFSSFSLFFLIVGAYMTHVCFNMEIIGGKEVSPHSRPFMASIQYGGHHVCGGVLIDPQWVLTAAHCQYRFTKGQSPTVVLGAHSLSKNEASKQTLEIKKFIPFSRVTSDPQSNDIMLVKLQTAAKLNKHVKMLHIRSKTSLRSGTKCKVTGWGATDPDSLRPSDTLREVTVTVLSRKLCNSQSYYNGDPFITKDMVCAGDAKGQKDSCKGDSGGPLICKGVFHAIVSGGHECGVATKPGIYTLLTKKYQTWIKSNLVPPHTN

SEQ ID NO: 608 - DNA, 1926 bp, Homo sapien
ggggcgacgtgagcgcgcaggggggcggcggcctcgcctcgtctctctctctgcgcctgggtcgggtgggtgacgccgagagccagagagatgtcggatttcgacagtaacccgtttgccgacccggatctcaacaatcccttcaaggatccatcagttacacaagtgacaagaaatgttccaccaggacttgatgaatataatccattctcggattctagaacacctccaccaggcggtgtgaagatgcctaatgtacccaatacacaaccagcaataatgaaaccaacagaggaacatccagcttatacacagattgcaaaggaacatgcattggcccaagctgaacttcttaagcgccaggaagaactagaaagaaaagccgcagaattagatcgtcgggaacgagaaatgcaaaacctcagtcaacatggtagaaaaaataattggccacctcttcctagcaattttcctgtcggaccttgtttctatcaggatttttctgtagacattcctgtagaattccaaaagacagtaaagcttatgtactacttgtggatgttccatgcagtaacactgtttctaaatatcttcggatgcttggcttggttttgtgttgattctgcaagagcggttgattttggattgagtatcctgtggttcttgctttttactccttgttcatttgtctgttggtacagaccactttatggagctttcaggagtgacagttcatttagattctttgtattcttcttcgtctatatttgtcagtttgctgtacatgtactccaagctgcaggatttcataactggggcaattgtggttggatttcatcccttactggtctcaaccaaaatattcctgttggaatcatgatgataatcatagcagcacttttcacagcatcagcagtcatctcactagttatgttcaaaaaagtacatggactatatcgcacaacaggtgctagttttgagaaggcccaacaggagtttgcaacaggtgtgatgtccaacaaaactgtccagaccgcagctgcaaatgcagcttcaactgcagcatctagtgcagctcagaatgctttcaagggtaaccagatttaagaatcttcaaacaatacactgttaccttttgactgtacctttttctccagttactgtattctacaaatatttttatgttcaaaacacacagtacagacagcatggatatttcctgttcacttgtgcatgggctaaaaccaggaaaacttccttgtcttattactttacctaatagtttcttaatatttcagtgccccttgcagaaaaaatattacatgctaaataaatattctccatatttttgggggatgacattcagtgaattatttcagtggtgacccactgaaaattaataatggtacttatgattaaaaacgcatttaatactaactgcagtagttctttcaagaatctttagagataaggattgcacattggaaaagtaaaccatgtttcattcctttttccctatttatattgaaagaaataggccagcagagacttagggattttaaattggcttgctttttagctgtttcagtcaccagtgaagagcctatgtgcattttgtagtagataatgtaaaatttgtcatctttttcttttcttttttttagaatagctgatattttgataacaatctctaatttgcatgggcaccacatttcttatattaaaagaattagtgttttggcttctgtactgcttatggttgtaggattcaggggttaatggaatcacagaaatgatattctgcaagaatttcttttaaataaaaagtttgggggtgcaatataagaagtttatataatatgcagtacattatccaaaagagaaggtagttaatgcagtagaaagtagtggtaataattccttttt

SEQ ID NO: 609 - protein, 338 aa, Homo sapien
MSDFDSNPFADPDLNNPFKDPSVTQVTRNVPPGLDEYNPFSDSRTPPPGGVKMPNVPNTQPAIMKPTEEHPAYTQIAKEHALAQAELLKRQEELERKAAELDRREREMQNLSQHGRKNNWPPLPSNFPVGPCFYQDFSVDIPVEFQKTVKLMYYLWMFHAVTLFLNIFGCLAWFCVDSARAVDFGLSILWFLLFTPCSFVCWYRPLYGAFRSDSSFRFFVFFFVYICQFAVHVLQAAGFHNWGNCGWISSLTGLNQNIPVGIMMIIIAALFTASAVISLVMFKKVHGLYRTTGASFEKAQQEFATGVMSNKTVQTAAANAASTAASSAAQNAFKGNQI

SEQ ID NO: 610 - DNA, 1355 bp, Homo sapien
gggaggcgtgagccaccgcgcctgtccaggaatcagttttttccaacaagtttttggactccactttgagaaatcctgacctgcactatgcctgaaacactccaaagggggtgctgatctggagacagatctgtcctgggacctgtttcagccctgtcagctcctggtggctgagttgaagggtgtggcccaaaaggcagggcaaagctagcttctgggttccttcagcccctgcaaggtttgggactctgtccacaggtccagacccagtacttattatgaactgttgggggtgcatcctggtgccagcactgaggaagttaaacgagctttcttctccaagtccaaagaggtacccgtacccctgaggtggggagggggagcaggaactttgagccagtgggggtgtgcttcaaattcccaggagtagaccagcatctctggtgggtgccacattttttcagccctcatagggagtggcaggtgctcaatggtaggggaaaggctgtgggcaggagccaggggtcctgtctgatgggctgggcttggttttcttgacctgcctgcctgctcttgagaaacctggaccagggcatatggtgaatgcagggggctggcaggtggggagggcttgaacacaggaggaagcaggagtccatgctctctggccttctgaggagtgggcaggcctgagtgagggtcactgaccaggcagggcctctgggtatgactggagccctggtgggtggatgtcatcagcatgggtcctggggagggacaggcaaagggagataaggggagtcctgccccaccccagctgcacccagaccgggaccctgggaacccaagcctgcacagccgctttgtggagctgagcgaggcataccgtgtgctcagccgtgagcagagccgccgcagctatgatgaccagctccgctcaggtagtcccccaaagtctccacgaaccacagtccatgacaagtctgcccaccaaacacacagctcctggacaccccccaacgcacagtactggtcccagtttcacagcgtgaggccacaggggccccagttgaggcagcagcaacacaaacaaaacaaacaagtgctggggtactgcctcctcctcatgctggcgggcatgggcctgcactacattgccttcaggtgatgcctgttctccccggggtgatgggcaaagggcaggagggtgggtgaattccagtgtggtcagccagtcctccacagcacctcgtggcccgtactcttgtgtctctcaagctaaaactgcttgaagttggtctctggacctctccttacttattaaaggcagcgctgcaccaaaaaaaaaaaaaaaa

SEQ ID NO: 611 - protein, 135 aa, Homo sapien
MGPGEGQAKGDKGSPAPPQLHPDRDPGNPSLHSRFVELSEAYRVLSREQSRRSYDDQLRSGSPPKSPRTTVHDKSAHQTHSSWTPPNAQYWSQFHSVRPQGPQLRQQQHKQNKQVLGYCLLLMLAGMGLHYIAFR

SEQ ID NO: 612 - DNA, 822 bp, Homo sapien
gggctgctccacgcttttgccggagacagagactgacatggaacaggggaagggcctggctgtcctcatcctggctatcattcttcttcaaggtactttggcccagtcaatcaaaggaaaccacttggttaaggtgtatgactatcaagaagatggttcggtacttctgacttgtgatgcagaagccaaaaatatcacatggtttaaagatgggaagatgatcggcttcctaactgaagataaaaaaaaatggaatctgggaagtaatgccaaggaccctcgagggatgtatcagtgtaaaggatcacagaacaagtcaaaaccactccaagtgtattacagaatgtgtcagaactgcattgaactaaatgcagccaccatatctggctttctctttgctgaaatcgtcagcattttcgtccttgctgttggggtctacttcattgctggacaggatggagttcgccagtcgagagcttcagacaagcagactctgttgcccaatgaccagctctaccagcccctcaaggatcgagaagatgaccagtacagccaccttcaaggaaaccagttgaggaggaattgaactcaggactcagagtagtccaggtgttctcctcctattcagttcccagaatcaaagcaatgcattttggaaagctcctagcagagagactttcagccctaaatctagactcaaggttcccagagatgacaaatggagaagaaaggccatcagagcaaatttgggggtttctcaaataaaataaaaataaaaacaaatactgtgtttcagaagcgccacctattggggaaaattgt

SEQ ID NO: 613 - protein, 182 aa, Homo sapien
MEQGKGLAVLILAIILLQGTLAQSIKGNHLVKVYDYQEDGSVLLTCDAEAKNITWFKDGKMIGFLTEDKKKWNLGSNAKDPRGMYQCKGSQNKSKPLQVYYRMCQNCIELNAATISGFLFAEIVSIFVLAVGVYFIAGQDGVRQSRASDKQTLLPNDQLYQPLKDREDDQYSHLQGNQLRRN

SEQ ID NO: 614 - DNA, 2564 bp, Homo sapien
gatttcagttgaaagatgtgtttttgtgagtagagcaccgcagaagaactgaagactgttgtgtgctccccgcagaaggggctaccatgatcctttcctcctataacaccatccagtcggttttctgttgctgctgttgctgttcagtgcagaagcgacaaatgagaacacagataagcctgagcacagatgaagagcttccagaaaaatacacccagcatcgcaggccgtggctcagccaattgtcaaataagaagcaatccaacacgggccgtgtgcagccgtcaaaacgaaagccactgcctcccctcccaccctctgaggttgctgaagagaagatccaagtcaaggcactttatgattttctgcccagagaaccctgtaatttagccttaaggagagcagaagaatacctgatactggagaaatacaatcctcactggtggaaggcaagagaccgtttggggaatgaaggcttaatcccaagcaactatgtgactgaaaacaaaataactaatttagaaatatatgagtggtaccatagaaacattaccagaaatcaggcagaacatctattgagacaagagtctaaagaaggtgcatttattgtcagagattcaagacatttaggatcctacacaatttccgtatttatgggagctagaagaagtacggaggctgccataaaacattatcagataaaaaagaatgactcaggacagtggtatgtggctgaaagacacgcctttcaatcaatccctgagttaatctggtatcaccagcacaatgcagccggtctcatgactcgtctccgatatccagttgggctgatgggcagttgtttaccagccacagctgggtttagctacgaaaagtgggagatagatccatctgagttggcttttataaaggagattggaagcggtcagtttggagtggtccatttaggtgaatggcggtcacatatccaggtagctatcaaggccatcaatgaaggctccatgtctgaagaggatttcattgaagaggccaaagtgatgatgaaattatctcattcaaagctagtgcaactttatggagtctgtatacagcggaagcccctttacattgtgacagagttcatggaaaatggctgcctgcttaactatctcagggagaataaaggaaagcttaggaaggaaatgctactgagtgtatgccaggatatatgtgaaggaatggaatatctggagaggaatggctatattcatagggatttggcggcaaggaattgtttggtcagttcaacatgcatagtaaaaatttcagactttggaatgacaaggtacgttttggatgatgagtatgtcagttcttttggagccaagttcccaatcaagtggtcccctcctgaagtttttcttttcaataagtacagcagtaaatctgatgtctggtcatttggagttttaatgtgggaagtttttacagaaggaaaaatgccttttgaaaataagtcaaatttgcaagtcgtggaagctatttctgaaggcttcaggctatatcgccctcacctggcaccaatgtccatatatgaagtcatgtacagctgctggcatgagaaacctgaaggccgccctacatttgcggagctgctgcgggctgtcacagagattgcggaaacctggtgaccggaaacagaatgccaacccaaagagtcatcttgcaaaactgtcatttattgtgaatatcttcaccatatggggtcacttatggtgaatatctttcttcagagttgctgactcttgaaaacagtgcaaagatcacagtttttaaaagttttaaaaatttaagaatattcacacaatcgtttttctatgtgtgagagggatttgcacactcttatttttctgtaaaatatttcacatcccaaatgtgaagaagtgaaaaagacttcgcagcagtcttcattgtggtgctcttcatgatcatagccccaggaacccttgaggttcttcttcacaaggctgagagtgcttccttcttgaagacgagtgtcattcatcacttcagtgatccatgcatagaatatgaaaataaattcttccaactcatgggataaaggggactcccttgaagaatttcatgtttttgggctgtatagctctttacagaaaatgcacctttataaatcacatgaatgttagtattctggaaatgtcttttgttaatataatcttcccatgttatttaacaaattgtttttgcacatatctgattatattgaaagcagtttttttgcattcgagttttaaacactgttataaaatgtagccaaagctcacctttgaacagatcccggtgacattctatttccaggaaaatccggaacctgattttagttctgtgattttacactttttacatgtgagattggacagtttcagaggccttattttgtcatactaagtgtctcctgtaattttcaggaagatgatttgttctttccagaagaggagacaaaagcaagatagccaaatgtgacatcaagctccattgtttcggaaatccaggattttgaattc

SEQ ID NO: 615 - protein, 527 aa, Homo sapien
MILSSYNTIQSVFCCCCCCSVQKRQMRTQISLSTDEELPEKYTQHRRPWLSQLSNKKQSNTGRVQPSKRKPLPPLPPSEVAEEKIQVKALYDFLPREPCNLALRRAEEYLILEKYNPHWWKARDRLGNEGLIPSNYVTENKITNLEIYEWYHRNITRNQAEHLLRQESKEGAFIVRDSRHLGSYTISVFMGARRSTEAAIKHYQIKKNDSGQWYVAERHAFQSIPELIWYHQHNAAGLMTRLRYPVGLMGSCLPATAGFSYEKWEIDPSELAFIKEIGSGQFGVVHLGEWRSHIQVAIKAINEGSMSEEDFIEEAKVMMKLSHSKLVQLYGVCIQRKPLYIVTEFMENGCLLNYLRENKGKLRKEMLLSVCQDICEGMEYLERNGYIHRDLAARNCLVSSTCIVKISDFGMTRYVLDDEYVSSFGAKFPIKWSPPEVFLFNKYSSKSDVWSFGVLMWEVFTEGKMPFENKSNLQVVEAISEGFRLYRPHLAPMSIYEVMYSCWHEKPEGRPTFAELLRAVTEIAETW

SEQ ID NO: 616 - DNA, 2425 bp, Homo sapien
atgtggtggagagttctcagcttgctggcatggttccccttgcaagaggcctctctgactaaccacacagaaaccatcaccgtggaggaaggccagacgctcactctaaagtgtgtcacttctctgaggaagaactcctccctccagtggctgaccccctcagggttcaccatttttttaaatgagtatcctgctttaaaaaattccaaataccagcttcttcatcactcggccaatcagctctccatcactgtgcctaacgtaaccctgcaagatgaaggcgtgtacaagtgcttacattacagcgactctgtaagcacaaaggaagtgaaagtgattgtgctggcaactcctttcaagccaatcctggaagcttcagttatcagaaagcaaaatggagaagaacatgttgtactcatgtgctccaccatgagaagcaagccccctccgcagataacctggctacttgggaatagcatggaagtgtccggtggaacgctccatgaatttgaaactgatgggaagaaatgtaatactaccagcactctcataatccacacttatggcaaaaattcaacggtggactgcattatccgacacagaggcctgcaagggagaaaactagtagcacccttccggtttgaagatttggttactgatgaagagacagcttcagatgctctggagagaaactctctatcctctcaagacccacagcagcccaccagtactgtctcagtaacggaagattctagtacatcggagattgacaaggaagagaaagaacaaaccactcaagatcctgacttgaccaccgaagcaaatcctcagtatttaggactggcaagaaagaaaagtggcatcctgctgctcacgctggtgtccttcctcattttcatactcttcatcatagtccagctcttcatcatgaagctgaggaaagcacatgtgatatggaagagagaaaacgaagtttcagaacacacactagaaagttacagatcaaggtcaaataatgaagaaacatcatctgaagagaaaaatggccaatcttcccaccctatgcgttgcatgaactacatcacaaagttgtactcagaagcaaaaacaaagaggaaggaaaatgtacaacattcaaaattagaagaaaagcacatccaagtaccagagagtattgtgtagtgctctctgcaatggaacatgtgatttcagggttgccgcagtgtcacctcagtggaccagcctgggggaaggagcttaattgctgagacattaataatgacctcttagtgcaatgcaagatggtgtcctcggataatgatctgccccggagctagggcagcaacatgaggaccaaaccatgcacataaagcttgtagtttaaaaaagaaaagcaaaaaaataattatgcctgacactacttcagagcaggaggattctacgaagccttggggatcagggtcagtgtgagcagctaacatcctacctcaaatggaacaggattttttgatgctttgctctaatggaactgttttaaaaatttttttttctttttaatattttcttctggtcacaaaataaagaaatttgggatgcaaagtacctaaagatctctgatcctaagaagttacttctggccaggcgcggtggctcatgcctgtaatcctagcactttgggaggctgaggtaggcagatcacttgaggtcaggagttggagaccagcctggccaacatagtgaaaccccgtctctactaaaaatgcaaaaattagccaggcgtagtggtgcgcacctgtagtctcagatacttgggaggctgagggtggagaatcgcttgaacctgggaggtggagattgcagtgagtcaagatctcaccactgaactccagcctgggcgacagagggagactctgtctcaaaaaaaaagaagttacttccaagacagacttttaacatgtaaccagcacaaagcaatgtcagggaggagtgatacatgacaataaatgagtcagatgagcaagaaggccccagaacccatgccccaaggcacaaagaggagctcagggtaggcccaaagattcgaattccttagattactaaatcacatgagcggaccttgtctgtcagataagatttttacctggaaattccatgaccaatacatgtgcaaaagaaaatgatgggttgaatttactgattattgacctaatggatggctttttaaaatgttttaataaaaagcagaatagatgtttgtttttctagtggttataccaagctatacttcctgttttcacgtgtgaaagtaacatgggacatgcctttcttttccgatcagtttatttaagctatacagcaaactttggcatttatgtggagcatttctcattgttggaatctgaataaaccaattacaaaataaaaa

SEQ ID NO: 617 - protein, 393 aa, Homo sapien
MWWRVLSLLAWFPLQEASLTNHTETITVEEGQTLTLKCVTSLRKNSSLQWLTPSGFTIFLNEYPALKNSKYQLLHHSANQLSITVPNVTLQDEGVYKCLHYSDSVSTKEVKVIVLATPFKPILEASVIRKQNGEEHVVLMCSTMRSKPPPQITWLLGNSMEVSGGTLHEFETDGKKCNTTSTLIIHTYGKNSTVDCIIRHRGLQGRKLVAPFRFEDLVTDEETASDALERNSLSSQDPQQPTSTVSVTEDSSTSEIDKEEKEQTTQDPDLTTEANPQYLGLARKKSGILLLTLVSFLIFILFIIVQLFIMKLRKAHVIWKRENEVSEHTLESYRSRSNNEETSSEEKNGQSSHPMRCMNYITKLYSEAKTKRKENVQHSKLEEKHIQVPESIV

SEQ ID NO: 618 - DNA, 1597 bp, Homo sapien
agccgctgagaggctctgcgtgtgcgtgtgcgcgggtgacgccgtgtgtgtgcgagtgtgtgtgtgtgtgtgcgcgcgcgcgtgtgagagagagaaagggagagagagagggggactctgtgtgagggaaagaaaacaatttctcctgctctgcagcttctgttcaggatcaatgtgactctaagaacaaatggatgaatgaatatccatatgaagagaaaaacaataaagaatatcaacacctttgagaacagaatgttaatgcttgatgggatgccggcagtcagagtcaaaacagagcttttggaatctgaacaagggtctccaaacgtccacaactatcccgatatggaagccgttcccctgttgctaaataatgtgaaaggggagcccccggaggactcgttatctgtagatcacttccaaacacaaactgagccagtggacttgtcaataaacaaagccaggacgtcccctactgccgtttcatcctccccagtttccatgacagcatctgcctcctcaccttcttcaacttcaacctcttcatcgtcttctagtcgtctagcctcatccccaactgttatcacatcagtatcttcagcgtcatcttcgtcaacagtattaactccagggccccttgtggcctctgcatctggtgttggaggccagcagtttttgcacattatccatcccgtaccgccttcaagtcccatgaatttacagtctaacaaactgagtcatgttcaccgcatccccgtggtggtacagtcggtgcctgttgtctacacagctgtaaggtcacctggaaatgtgaacaacactattgtcgtgccgcttttggaggatgggagaggccatggcaaagcacaaatggacccccgaggcctatctcccagacaaagtaaaagtgacagtgatgatgatgacctgccaaatgtgaccttagatagcgttaatgaaactggatctacggccctttccatagccagagcagtacaagagtaagtatcacattcacaggatgaattaagaattgccaaggtgttcaatggataatggaaactgcagcatctcctgtcccccagccatgtcattctagctgtgaactggcacgaatgtcagcagcttttcattcagctgaatgctctttgggagattagggcagagaatggagtgttttaatgagttggaaattcatgctttgatgagatataagacctatgtgcatcttttctaatacctcctgcacccttctcctgaactctgcaaaaaaaaaaaaattgttatttttgaatgtcactatttgattatcatcatcattattattacacaaagtcaagggaaatatggcaaagtattgttatcttgttttgataggaaattacagaatagctttttggaagatttaaatttggaaaataatatgttcatcctttgaaaagtagtactcatatgttatttttaaatgaatcttttctctgtccttttacctggaccgcagggttagatttcagccctcgtttattgaaaatagctgcttttctatcagtcaaccttgtacctagaattgaacctaaatgattgaaaaaaaaaa

SEQ ID NO: 619 - protein, 402 aa, Homo sapien
MNIHMKRKTIKNINTFENRMLMLDGMPAVRVKTELLESEQGSPNVHNYPDMEAVPLLLNNVKGEPPEDSLSVDHFQTQTEPVDLSINKARTSPTAVSSSPVSMTASASSPSSTSTSSSSSSRLASSPTVITSVSSASSSSTVLTPGPLVASASGVGGQQFLHIIHPVPPSSPMNLQSNKLSHVHRIPVVVQSVPVVYTAVRSPGNVNNTIVVPLLEDGRGHGKAQMDPRGLSPRQSKSDSDDDDLPNVTLDSVNETGSTALSIARAVQEVHPSPVSRVRGNRMNNQKFPCSISPFSIESTRRQRRSESPDSRKRRIHRCDFEGCNKVYTKSSHLKAHRRTHTGEKPYKCTWEGCTWKFARSDELTRHYRKHTGVKPFKCADCDRSFSRSDHLALHRRRHMLV

SEQ ID NO: 620 - DNA, 1386 bp, Homo sapien
gccccatctccttgggctgcccgtgcttcgtgctttggactaccgcccagcagtgtcctgccctctgcctgggcctcggtccctcctgcacctgctgcctggatccccggcctgcctgggcctgggccttggttctccccatgacaccacctgaacgtctcttcctcccaagggtgtgtggcaccaccctacacctcctccttctggggctgctgctggttctgctgcctggggcccaggggctccctggtgttggcctcacaccttcagctgcccagactgcccgtcagcaccccaagatgcatcttgcccacagcaccctcaaacctgctgctcacctcattggagaccccagcaagcagaactcactgctctggagagcaaacacggaccgtgccttcctccaggatggtttctccttgagcaacaattctctcctggtccccaccagtggcatctacttcgtctactcccaggtggtcttctctgggaaagcctactctcccaaggccacctcctccccactctacctggcccatgaggtccagctcttctcctcccagtaccccttccatgtgcctctcctcagctcccagaagatggtgtatccagggctgcaggaaccctggctgcactcgatgtaccacggggctgcgttccagctcacccagggagaccagctatccacccacacagatggcatcccccacctagtcctcagccctagtactgtcttctttggagccttcgctctgtagaacttggaaaaatccagaaagaaaaaataattgatttcaagaccttctccccattctgcctccattctgaccatttcaggggtcgtcaccacctctcctttggccattccaacagctcaagtcttccctgatcaagtcaccggagctttcaaagaaggaattctaggcatcccaggggaccacacctccctgaaccatccctgatgtctgtctggctgaggatttcaagcctgcctaggaattcccagcccaaagctgttggtctgtcccaccagctaggtggggcctagatccacacacagaggaagagcaggcacatggaggagcttgggggatgactagaggcagggaggggactatttatgaaggcaaaaaaattaaattatttatttatggaggatggagagaggggaataatagaagaacatccaaggagaaacagagacaggcccaagagatgaagagtgagagggcatgcgcacaaggctgaccaagagagaaagaagtaggcatgagggatcacagggccccagaaggcagggaaaggctctgaaagccagctgccgaccagagccccacacggaggcatctgcaccctcgatgaagcccaataaacctcttttctctg

SEQ ID NO: 621 - protein, 205 aa, Homo sapien
MTPPERLFLPRVCGTTLHLLLLGLLLVLLPGAQGLPGVGLTPSAAQTARQHPKMHLAHSTLKPAAHLIGDPSKQNSLLWRANTDRAFLQDGFSLSNNSLLVPTSGIYFVYSQVVFSGKAYSPKATSSPLYLAHEVQLFSSQYPFHVPLLSSQKMVYPGLQEPWLHSMYHGAAFQLTQGDQLSTHTDGIPHLVLSPSTVFFGAFAL

SEQ ID NO: 622 - DNA, 3448 bp, Homo sapien
gttcagcgccggcgccggtgtgcgagccgcggcagagtgaggcaggcaacccgaggtgcggagcgacctgcggaggctgagccccgctttctcccagggtttcttatcagccagccgccgctgtccccgggggagtaggaggctcctgacaggccgcggctgtctgtgtgtccttctgagtgtcagaggaacggccagaccccgcgggccggagcagaacgcggccagggcagaaagcggcggcaggagaagcaggcagggggccggaggacgcagaccgagacccgaggcggaggcggaccgcgagccggccatgtcggtggtggggttggacgtgggctcgcagagctgctacatcgcggtagcccgggccgggggcatcgagaccatcgccaatgagttcagcgaccggtgcaccccgtcagtcatatcatttggatcaaaaaatagaacaatcggagttgcagccaaaaatcagcaaatcactcatgcaaacaatacggtgtctaacttcaaaagatttcatggccgagcattcaacgaccccttcattcaaaaggagaaggaaaacttgagttacgatttggttccattgaaaaatggtggagttggaataaaggtaatgtacatgggtgaagaacatctatttagtgtggagcagataacagccatgttgttgactaagctgaaggaaactgctgaaaacagcctcaagaaaccagtaacagattgtgttatttcagtcccctccttctttacagatgctgagaggcgatctgtgttagatgctgcacagattgttggcctaaactgtttaagacttatgaatgacatgacagctgttgctttgaattacggaatttataagcaggatctcccaagcctggatgagaaacctcggatagtggtttttgttgatatgggacattcagcttttcaagtgtctgcttgtgcttttaacaagggaaaattgaaggtactgggaacagcttttgatcctttcttaggaggaaaaaacttcgatgaaaagttagtggaacatttctgtgcagaatttaaaactaagtacaagttggatgcaaaatccaaaatacgagcactcctacgtctgtatcaggaatgtgaaaaactgaaaaagctaatgagctctaacagcacagaccttccactgaatatcgaatgctttatgaatgataaagatgtttccggaaagatgaacaggtcacaatttgaagaactctgtgctgaacttctgcaaaagatagaagtacccctttattcactgttggaacaaactcatctcaaagtagaagatgtgagtgcagttgagattgttggaggcgctacacgaattccagctgtgaaggaaagaattgccaaattctttggaaaagatattagcacaacactcaatgcagatgaagcagtagccagaggatgtgcattacagtgtgcaatactttccccggcatttaaagttagagaattttccgtcacagatgcagttccttttccaatatctctgatctggaaccatgattcagaagatactgaaggtgttcatgaagtctttagtcgaaaccatgctgctcctttctccaaagttctcacctttctgagaagggggccttttgagctagaagctttctattctgatccccaaggagttccatatccagaagcaaaaataggccgctttgtagttcagaatgtttctgcacagaaagatggagaaaaatctagagtaaaagtcaaagtgcgagtcaacacccatggcattttcaccatctctacggcatctatggtggagaaagtcccaactgaggagaatgaaatgtcttctgaagctgacatggagtgtctgaatcagagaccaccagaaaacccagacactgatgcaaatgaaaaaaaagttgaccagcctccagaagctaaaaagcccaaaataaaggtggtgaatgttgagctgcctattgaagccaacttggtctggcagttagggaaagaccttcttaacatgtatattgagacagagggtaagatgataatgcaagataaattggaaaaagaaaggaatgatgctaaaaatgcagttgaggaatatgtgtatgagttcagagacaagctgtgtggaccatatgaaaaatttatatgtgagcaggatcatcaaaattttttgagactcctcacagaaactgaagactggctgtatgaagaaggagaggaccaagctaaacaagcatatgttgacaagttggaagaattaatgaaaattggcactccagttaaagttcggtttcaggaagctgaagaacggccaaaaatgtttgaagaactaggacagaggctgcagcattatgccaagatagcagctgacttcagaaataaggatgagaaatacaaccatattgatgagtctgaaatgaaaaaagtggagaagtctgttaatgaagtgatggaatggatgaataatgtcatgaatgctcaggctaaaaagagtcttgatcaggatccagttgtacgtgctcaggaaattaaaacaaaaatcaaggaattgaacaacacatgtgaacccgttgtaacacaaccgaaaccaaaaattgaatcacccaaactggaaagaactccaaatggcccaaatattgataaaaaggaagaagatttagaagacaaaaacaattttggtgctgaacctccacatcagaatggtgaatgttaccctaatgagaaaaattctgttaatatggacttggactagataaccttaaattggcctattccttcaattaataaaatatttttgccatagtatgtgactctacataacatactgaaactatttatattttcttttttaaggatatttagaaattttgtgtattatatggaaaaagaaaaaaagcttaagtctgtagtctttatgatcctaaaagggaaaattgccttggtaactttcagattcctgtggaattgtgaattcatactaagctttctgtgcagtctcaccatttgcatcactgaggatgaaactgacttttgtcttttggagaaaaaaaactgtactgttgttcaagagggctgtgattaaaatctttaagcatttgttcctgccaaggtagttttcttgcattttgctctccattcagcatgtgtgtgggtgtggatgtttataaacaagactaagtctgacttcataagggctttctaaaaccatttctgtccaagagaaaatgactttttgctttgatattaaaaattcaatgagtaaaacaaaagctagtcaaatgtgttagcagcatgcagaacaaaaactttaaactttctctctcactatacagtatattgtcaatgtgaaagtgtggaatggaagaaatgtcgatcctgttgtaactgattgtgaacacttttatgagctttaaaataaagttcatcttatggtgtcatttct

SEQ ID NO: 623 - protein, 814 aa, Homo sapien
MSVVGLDVGSQSCYIAVARAGGIETIANEFSDRCTPSVISFGSKNRTIGVAAKNQQITHANNTVSNFKRFHGRAFNDPFIQKEKENLSYDLVPLKNGGVGIKVMYMGEEHLFSVEQITAMLLTKLKETAENSLKKPVTDCVISVPSFFTDAERRSVLDAAQIVGLNCLRLMNDMTAVALNYGIYKQDLPSLDEKPRIVVFVDMGHSAFQVSACAFNKGKLKVLGTAFDPFLGGKNFDEKLVEHFCAEFKTKYKLDAKSKIRALLRLYQECEKLKKLMSSNSTDLPLNIECFMNDKDVSGKMNRSQFEELCAELLQKIEVPLYSLLEQTHLKVEDVSAVEIVGGATRIPAVKERIAKFFGKDISTTLNADEAVARGCALQCAILSPAFKVREFSVTDAVPFPISLIWNHDSEDTEGVHEVFSRNHAAPFSKVLTFLRRGPFELEAFYSDPQGVPYPEAKIGRFVVQNVSAQKDGEKSRVKVKVRVNTHGIFTISTASMVEKVPTEENEMSSEADMECLNQRPPENPDTDANEKKVDQPPEAKKPKIKVVNVELPIEANLVWQLGKDLLNMYIETEGKMIMQDKLEKERNDAKNAVEEYVYEFRDKLCGPYEKFICEQDHQNFLRLLTETEDWLYEEGEDQAKQAYVDKLEELMKIGTPVKVRFQEAEERPKMFEELGQRLQHYAKIAADFRNKDEKYNHIDESEMKKVEKSVNEVMEWMNNVMNAQAKKSLDQDPVVRAQEIKTKIKELNNTCEPVVTQPKPKIESPKLERTPNGPNIDKKEEDLEDKNNFGAEPPHQNGECYPNEKNSVNMDLD

SEQ ID NO: 624 - DNA, 4040 bp, Homo sapien
tgcagagaacagagaaaggacatctgcgaggaaagttccctgatggctgtcaacaaagtgccacgtctctatggctgtgtacgctgagcacacgattttatcgcgcctatcatatcttggtgcataaacgcacctcacctcggtcaacccttgctccgtcttatgagacaggctttattatccgcattttatatgaggggaatctgacggtggagagagaattatcttgctcaaggcgacacagcagagcccacaggtggcagaatcccacccgagcccgcttcgacccgcggggtggaaaccacgggcgcccgcccggctgcgcttccagagctgaactgagaagcgagtcctctccgccctgcggccaccgcccagccccgacccccgccccggcccgatcctcactcgccgccagctccccgcgcccaccccggagttggtggcgcagaggcgggaggcggaggcgggagggcgggcgctggcaccgggaacgcccgagcgccggcagagagcgcggagagcgcgacacgtgcggcccagagcaccggggccacccggtccccgcaggcccgggaccgcgcccgctggcaggcgacacgtggaagaatacggagttctataccagagttgattgttgatggcacatacttttagaggatgctcattggcatttatgtttataatcacgtggctgttgattaaagcaaaaatagatgcgtgcaagagaggcgatgtgactgtgaagccttcccatgtaattttacttggatccactgtcaatattacatgctctttgaagcccagacaaggctgctttcactattccagacgtaacaagttaatcctgtacaagtttgacagaagaatcaattttcaccatggccactccctcaattctcaagtcacaggtcttccccttggtacaaccttgtttgtctgcaaactggcctgtatcaatagtgatgaaattcaaatatgtggagcagagatcttcgttggtgttgctccagaacagcctcaaaatttatcctgcatacagaagggagaacaggggactgtggcctgcacctgggaaagaggacgagacacccacttatacactgagtatactctacagctaagtggaccaaaaaatttaacctggcagaagcaatgtaaagacatttattgtgactatttggactttggaatcaacctcacccctgaatcacctgaatccaatttcacagccaaggttactgctgtcaatagtcttggaagctcctcttcacttccatccacattcacattcttggacatagtgaggcctcttcctccgtgggacattagaatcaaatttcaaaaggcttccgtgagcagatgtaccctttattggagagatgagggactggtactgcttaatcgactcagatatcggcccagtaacagcaggctctggaatatggttaatgttacaaaggccaaaggaagacatgatttgctggatctgaaaccatttacagaatatgaatttcagatttcctctaagctacatctttataagggaagttggagtgattggagtgaatcattgagagcacaaacaccagaagaagagcctactgggatgttagatgtctggtacatgaaacggcacattgactacagtagacaacagatttctcttttctggaagaatctgagtgtctcagaggcaagaggaaaaattctccactatcaggtgaccttgcaggagctgacaggagggaaagccatgacacagaacatcacaggacacacctcctggaccacagtcattcctagaaccggaaattgggctgtggctgtgtctgcagcaaattcaaaaggcagttctctgcccactcgtattaacataatgaacctgtgtgaggcagggttgctggctcctcgccaggtctctgcaaactcagagggcatggacaacattctggtgacttggcagcctcccaggaaagatccctctgctgttcaggagtacgtggtggaatggagagagctccatccagggggtgacacacaggtccctctaaactggctacggagtcgaccctacaatgtgtctgctctgatttcagagaacataaaatcctacatctgttatgaaatccgtgtgtatgcactctcaggggatcaaggaggatgcagctccatcctgggtaactctaagcacaaagcaccactgagtggcccccacattaatgccatcacagaggaaaaggggagcattttaatttcatggaacagcattccagtccaggagcaaatgggctgcctcctccattataggatatactggaaggaacgggactccaactcccagcctcagctctgtgaaattccctacagagtctcccaaaattcacatccaataaacagcctgcagccccgagtgacatatgtcctgtggatgacagctctgacagctgctggtgaaagttcccacggaaatgagagggaattttgtctgcaaggtaaagccaattggatggcgtttgtggcaccaagcatttgcattgctatcatcatggtgggcattttctcaacgcattacttccagcaaaaggtgtttgttctcctagcagccctcagacctcagtggtgtagcagagaaattccagatccagcaaatagcacttgcgctaagaaatatcccattgcagaggagaagacacagctgcccttggacaggctcctgatagactggcccacgcctgaagatcctgaaccgctggtcatcagtgaagtccttcatcaagtgaccccagttttcagacatcccccctgctccaactggccacaaagggaaaaaggaatccaaggtcatcaggcctctgagaaagacatgatgcacagtgcctcaagcccaccacctccaagagctctccaagctgagagcagacaactggtggatctgtacaaggtgctggagagcaggggctccgacccaaagccagaaaacccagcctgtccctggacggtgctcccagcaggtgaccttcccacccatgatggctacttaccctccaacatagatgacctcccctcacatgaggcacctctcgctgactctctggaagaactggagcctcagcacatctccctttctgttttcccctcaagttctcttcacccactcaccttctcctgtggtgataagctgactctggatcagttaaagatgaggtgtgactccctcatgctctgagtggtgaggcttcaagccttaaagtcagtgtgccctcaaccagcacagcctgccccaattcccccagcccctgctccagcagctgtcatctctgggtgccaccatcggtctggctgcagctagaggacaggcaagccagctctgggggagtcttaggaactgggagttggtcttcactcagatgcctcatcttgcctttcccagggccttaaaattacatccttcactgtgtggacctagagactccaacttgaattcctagtaactttcttggtatgctggccagaaagggaaatgaggaggagagtagaaaccacagctcttagtagtaatggcatacagtctagaggaccattcatgcaatgactatttctaaagcacctgctacacagcaggctgtacacagcagatcagtactgttcaacagaacttcctgagatgatggaaatgttctacctctgcactcactgtccagtacattagacactaggcacattggctgttaatcacttggaatgtgtttagcttgactgaggaattaaattttgattgtaaatttaaatcgccacacatggctagtggctactgtattggagtgcacagctctagatggctcctagattattgagagcctccaaaacaaatcaacctagttctatagatgaagacataaaagacactggtaaacaccaatgtaaaagggcccccaaggtggtcatgactggtctcatttgcagaagtctaagaatgtacctttttctggccgggcgtggtagctcatgcctgtaatcccagcactttgggaggctga

SEQ ID NO: 625 - protein, 862 aa, Homo sapien
MAHTFRGCSLAFMFIITWLLIKAKIDACKRGDVTVKPSHVILLGSTVNITCSLKPRQGCFHYSRRNKLILYKFDRRINFHHGHSLNSQVTGLPLGTTLFVCKLACINSDEIQICGAEIFVGVAPEQPQNLSCIQKGEQGTVACTWERGRDTHLYTEYTLQLSGPKNLTWQKQCKDIYCDYLDFGINLTPESPESNFTAKVTAVNSLGSSSSLPSTFTFLDIVRPLPPWDIRIKFQKASVSRCTLYWRDEGLVLLNRLRYRPSNSRLWNMVNVTKAKGRHDLLDLKPFTEYEFQISSKLHLYKGSWSDWSESLRAQTPEEEPTGMLDVWYMKRHIDYSRQQISLFWKNLSVSEARGKILHYQVTLQELTGGKAMTQNITGHTSWTTVIPRTGNWAVAVSAANSKGSSLPTRINIMNLCEAGLLAPRQVSANSEGMDNILVTWQPPRKDPSAVQEYVVEWRELHPGGDTQVPLNWLRSRPYNVSALISENIKSYICYEIRVYALSGDQGGCSSILGNSKHKAPLSGPHINAITEEKGSILISWNSIPVQEQMGCLLHYRIYWKERDSNSQPQLCEIPYRVSQNSHPINSLQPRVTYVLWMTALTAAGESSHGNEREFCLQGKANWMAFVAPSICIAIIMVGIFSTHYFQQKVFVLLAALRPQWCSREIPDPANSTCAKKYPIAEEKTQLPLDRLLIDWPTPEDPEPLVISEVLHQVTPVFRHPPCSNWPQREKGIQGHQASEKDMMHSASSPPPPRALQAESRQLVDLYKVLESRGSDPKPENPACPWTVLPAGDLPTHDGYLPSNIDDLPSHEAPLADSLEELEPQHISLSVFPSSSLHPLTFSCGDKLTLDQLKMRCDSLML

SEQ ID NO: 626 - DNA, 885 bp, Homo sapien
ctcgaggccaagaattcggcacgagggaacctgtaaacgctctcggaattatggcggcggtggatatccgagacaatctgctgggaatttcttgggttgacagctcttggatccctattttgaacagtggtagtgtcctggattacttttcagaaagaagtaatcctttttatgacagaacatgtaataatgaagtggtcaaaatgcagaggctaacattagaacacttgaatcagatggttggaatcgagtacatccttttgcatgctcaagagcccattcttttcatcattcggaagcaacagcggcagtcccctgcccaagttatcccactagctgattactatatcattgctggagtgatctatcaggcaccagacttgggatcagttataaactctagagtgcttactgcagtgcatggtattcagtcagcttttgatgaagctatgtcatactgtcgatatcatccttccaaagggtattggtggcacttcaaagatcatgaagagcaaggtaagtagaacatccataccctcctaaaacactttttgatcctctgagaatgaagctgttttctttaggaaaatggctgttgatcttttctaagtgtgtttcactttttcatgggatgatggctttgttgcagctgagattcatgtaactagagtggtaataatagtttcacataggaacagatgcaagttcactctgttagttaactggtagtctttgttaaggtgattcaaggttttaaaatatttggggccaggtgtggtggctcactcctgtaatcccggcactttggaatgccaaggcaggtggatcacctgagcctaggagttcaagatcagcctgggcaacatagtgaaacctggtctctgc

SEQ ID NO: 627 - protein, 157 aa, Homo sapien
MAAVDIRDNLLGISWVDSSWIPILNSGSVLDYFSERSNPFYDRTCNNEVVKMQRLTLEHLNQMVGIEYILLHAQEPILFIIRKQQRQSPAQVIPLADYYIIAGVIYQAPDLGSVINSRVLTAVHGIQSAFDEAMSYCRYHPSKGYWWHFKDHEEQGK

SEQ ID NO: 628 - DNA, 552 bp, Homo sapien
ctcatatttcacacagatgagttggcgaggaagatcgacctattattggtctaggccaataataggtcgatcttcctcgccaactcatatttcacacagatgaatctcagtagaggaaaatcgacctattattggcctagaccaaggcgctatgtacagcctcctgaagtgattgggcctatgcggcccgagcagttcagtgatgaagtggaaccagcaacacctgaagaaggggaaccagcaactcaacgtcaggatcctgcagctgctcaggagggagaggatgagggagcatctgcaggtcaagggccgaagcctgaagctgatagccaggaacagggtcacccacagactgggtgtgagtgtgaagatggtcctgatgggcaggagatggacccgccaaatccagaggaggtgaaaacgcctgaagaaggtgaaaagcaatcacagtgttaaaagaaggcacgttgaaatgatgcaggctgctcctatgttggaaatttgttcattaaaattctcccaataaagctttacagccttctgcaaagaaaa

SEQ ID NO: 629 - protein, 118 aa, Homo sapien
MNLSRGKSTYYWPRPRRYVQPPEVIGPMRPEQFSDEVEPATPEEGEPATQRQDPAAAQEGEDEGASAGQGPKPEADSQEQGHPQTGCECEDGPDGQEMDPPNPEEVKTPEEGEKQSQC

SEQ ID NO: 630 - DNA, 1585 bp, Homo sapien
cacaccctgacaagctgccaggcaggttctcttcctctcacatactgacccacggctccaccctctctcccctggaaaggacaccatgagcactgaaagcatgatccgggacgtggagctggccgaggaggcgctccccaagaagacaggggggccccagggctccaggcggtgcttgttcctcagcctcttctccttcctgatcgtggcaggcgccaccacgctcttctgcctgctgcactttggagtgatcggcccccagagggaagagtcccccagggacctctctctaatcagccctctggcccaggcagtcagatcatcttctcgaaccccgagtgacaagcctgtagcccatgttgtagcaaaccctcaagctgaggggcagctccagtggctgaaccgccgggccaatgccctcctggccaatggcgtggagctgagagataaccagctggtggtgccatcagagggcctgtacctcatctactcccaggtcctcttcaagggccaaggctgcccctccacccatgtgctcctcacccacaccatcagccgcatcgccgtctcctaccagaccaaggtcaacctcctctctgccatcaagagcccctgccagagggagaccccagagggggctgaggccaagccctggtatgagcccatctatctgggaggggtcttccagctggagaagggtgaccgactcagcgctgagatcaatcggcccgactatctcgactttgccgagtctgggcaggtctactttgggatcattgccctgtgaggaggacgaacatccaaccttcccaaacgcctcccctgccccaatccctttattaccccctccttcagacaccctcaacctcttctggctcaaaaagagaattgggggcttagggtcggaacccaagcttagaactttaagcaacaagaccaccacttcgaaacctgggattcaggaatgtgtggcctgcacagtgaagtgctggcaaccactaagaattcaaactggggcctccagaactcactggggcctacagctttgatccctgacatctggaatctggagaccagggagcctttggttctggccagaatgctgcaggacttgagaagacctcacctagaaattgacacaagtggaccttaggccttcctctctccagatgtttccagacttccttgagacacggagcccagccctccccatggagccagctccctctatttatgtttgcacttgtgattatttattatttatttattatttatttatttacagatgaatgtatttatttgggagaccggggtatcctgggggacccaatgtaggagctgccttggctcagacatgttttccgtgaaaacggaggctgaacaataggctgttcccatgtagccccctggcctctgtgccttcttttgattatgttttttaaaatattatctgattaagttgtctaaacaatgctgatttggtgaccaactgtcactcattgctgaggcctctgctccccagggagttgtgtctgtaatcggcctactattcagtggcgagaaataaaggttgcttaggaaagaa

SEQ ID NO: 631 - protein, 233 aa, Homo sapien [sequence omitted]

SEQ ID NO: 632 - DNA, 4193 bp, Homo sapien
catggcggcgactgcggcaaagcgagagcctcggagacgccgctgccgccagcacagccggagatctgagccgacactgggggcagtccgcgagccccgcactctctcgatgagtcggagaagtcccgttgtatcagagtaagatggacggtagctttgattgtgattgtggtgagctggagccacctgatcactaacaaaagacatcttctgttaaccaacagccgccaggcttcctgttgaaataaatatatagcaacaaaggaaaaaaagaagcaaaacggaaatagtgcttaccagcaccttagaatgatgctgctcaggaccagtccaacactgaatgtatctgcactgtgaggagaatgttcatagaagcctgttgtgtgcatatttattcactttttgttaaatgttaaatcgtttagcacggtaatctgagtgcacagtatgtcatttcattccgtttgagtttcttgttttcgttaaatgtctgcagagttgctgcccctttcttgaactatgagtactgcaatctttttaattctcaatatgaatagagctttttgagctttaaatctaaggggaactcgacaggcctgtttggcatatgcaatgaacatcaagaaaccatcttgctgtggaagcataattatttttcttctccctttttgaaagatctttccttttgatgccagttttcttccttgtttacacaagttcaatttgaaaggaaaaggcaatagtaagggtttcaaaatggcagagaaatttgaaagtctcatgaacattcatggttttgatctgggttctaggtatatggacttaaaaccattgggttgtggaggcaatggcttggttttttctgctgtagacaatgactgtgacaaaagagtagccatcaagaaaattgtccttactgatccccagagtgtcaaacatgctctacgtgaaatcaaaattattagaagacttgaccatgataacattgtgaaagtgtttgagattcttggtcccagtggaagccaattaacagacgatgtgggctctcttacggaactgaacagtgtttacattgttcaggagtacatggagacagacttggctaatgtgctggagcagggccctttactggaagagcatgccaggcttttcatgtatcagctgctacgggggctcaagtatattcactctgcaaatgtactgcacagagatctcaaaccagctaatcttttcattaatacggaagacttggtgctgaagataggtgactttggtcttgcacggatcatggatcctcattattcccataagggtcatctttctgaaggattggttactaaatggtacagatctccacgtcttttactttctcctaataattatactaaagccattgacatgtgggctgcaggctgcatctttgctgaaatgctgactggtaaaaccctttttgcaggtgcacatgaacttgaacagatgcagctgattttagaatctattcctgttgtacatgaggaagatcgtcaggagcttctcagcgtaattccagtttacattagaaatgacatgactgagccacacaaacctttaactcagctgcttccaggaattagtcgagaagcactggatttcctggaacaaattttgacatttagccccatggatcggttaacagcagaagaagcactctcccatccttacatgagcatatattcttttccaatggatgagccaatttcaagccatccttttcatattgaagatgaagttgatgatattttgcttatggatgaaactcacagtcacatttataactgggaaaggtatcatgattgtcagttttcagagcatgattggcctgtacataacaactttgatattgatgaagttcagcttgatccaagagctctgtccgatgtcactgatgaagaagaagtacaagttgatccccgaaaatatttggatggagatcgggaaaagtatctggaggatcctgcttttgataccaattactctactgagccttgttggcaatactcagatcatcatgaaaacaaatattgtgatctggagtgtagccatacttgtaactacaaaacgaggtcatcatcatatttagataacttagtttggagagagagtgaagttaaccattactatgaacccaagcttattatagatctttccaattggaaagaacaaagcaaagaaaaatctgataagaaaggcaaatcaaaatgtgaaaggaatggattggttaaagcccagatagcgctagaggaagcatcacagcaactggctggaaaagaaagggaaaagaatcagggatttgattttgattcctttattgcaggaactattcagcttagttcccagcatgagcctactgatgttgttgataaattaaatgacttgaatagctcagtgtcccaactagaattgaaaagtttgatatcaaagtcagtaagccaagaaaaacaggaaaaaggaatggcaaatctggctcaattagaagccttgtaccagtcttcttgggacagccagtttgtgagtggtggggaggactgttttttcataaatcagttttgtgaggtaaggaaggatgaacaagttgagaaggaaaacacttacactagttacttggacaagttctttagcaggaaagaagatactgaaatgctagaaactgagccagtagaggatgggaagcttggggagagaggacatgaggaaggatttctgaacaacagtggggagttcctctttaacaagcagctcgagtccataggcatcccacagtttcacagtccagttgggtcaccacttaagtcaatacaggccacattaacaccttctgctatgaaatcttcccctcaaattcctcatcaaacatacagcagcattctgaaacatctgaactaaaacactcagcagacatttatctttgtattcttcatgaaatgtgttttgtctttttttattactagtgtttaagtcattttttacttgaatcagatggtgtcatttagtaaggattttatgagttcttgttttttaaaatccagactttctttttctacatgtgagatagttttcattttaactggcatgtcatttgcacacaaaaataaagactagagcaaaataatgcaacgcaggaggagaaaagaaatgcactaagacaagaacattctctcatagaacattgatctgttttacaggaaacaaaccttgccttgaaatttacacagtgagactgtacataattgcatgaaaatagctatttttttcctaagacatttttcattcatgaatattttcaagtttttcatactgtacacatttcttaaaacacatgataccagcagcaactgaaaatgaatgccgaatttggtacacatgtgttatctacctcaaggtaacaagagtatgtggcaaaacatataccacccatagtgcttcacaaaatgcacttctatttagccagcgtttattgtagtaaactattcttaataaaactcactcactgtttataaatgttctggtatgcattctttatagtgaagtgttaatacatcacatcttatttattttagcaaatcagtatattttctgtatttaattataaaaaattaacttagtttttaaaatttatttgcaaatatactttttccatttggcactatggtttgttgcctacctagctgcatctataatgtcagcttatcctaaggctgtccacgtacttaatttacttaagtgttcattttaagtaacgtgctcactgtgtataggaatttgtattttggaggtgcttgatctatctacaaagaaaaattaattaggaattactttattataaaatgctcctagaagtcttaattgtgtttattttttaaaaaaacaaatgttagacttgtgtgcatggaagtaattaaggtacatcattattgtagtttgaaagttgtacatgataagacattttgtttttactgtatgtttttactgaatgatctattccccatcccaaggcaagcatgaataaaattaggttaaacgtagcatgtggcatcgcagtctcttagaatttgtttcatctattttattttattgaatactgtctgtatctttggttatcctgtttgaagaaaaaggacaaataaaacatggccagcaaatacaaaaaaaaaaaa

SEQ ID NO: 633 - protein, 721 aa, Homo sapien
MAEKFESLMNIHGFDLGSRYMDLKPLGCGGNGLVFSAVDNDCDKRVAIKKIVLTDPQSVKHALREIKIIRRLDHDNIVKVFEILGPSGSQLTDDVGSLTELNSVYIVQEYMETDLANVLEQGPLLEEHARLFMYQLLRGLKYIHSANVLHRDLKPANLFINTEDLVLKIGDFGLARIMDPHYSHKGHLSEGLVTKWYRSPRLLLSPNNYTKAIDMWAAGCIFAEMLTGKTLFAGAHELEQMQLILESIPVVHEEDRQELLSVIPVYIRNDMTEPHKPLTQLLPGISREALDFLEQILTFSPMDRLTAEEALSHPYMSIYSFPMDEPISSHPFHIEDEVDDILLMDETHSHIYNWERYHDCQFSEHDWPVHNNFDIDEVQLDPRALSDVTDEEEVQVDPRKYLDGDREKYLEDPAFDTNYSTEPCWQYSDHHENKYCDLECSHTCNYKTRSSSYLDNLVWRESEVNHYYEPKLIIDLSNWKEQSKEKSDKKGKSKCERNGLVKAQIALEEASQQLAGKEREKNQGFDFDSFIAGTIQLSSQHEPTDVVDKLNDLNSSVSQLELKSLISKSVSQEKQEKGMANLAQLEALYQSSWDSQFVSGGEDCFFINQFCEVRKDEQVEKENTYTSYLDKFFSRKEDTEMLETEPVEDGKLGERGHEEGFLNNSGEFLFNKQLESIGIPQFHSPVGSPLKSIQATLTPSAMKSSPQIPHQTYSSILKHLN

SEQ ID NO: 634 - DNA, 1970 bp, Homo sapien
ggccttggggctttgtgagatagctagggtcgacttgtgtggattctagtagaacggagctgaccctatccgaacaggcccctgcctgcttggatagaggcctccgaacaggagtaaagaatggctgttgaacatccacaaggcacctgcaagactatgaatcaaagttgagaccaagaaattatttctgaaaaaggatatggaaaaccttacaaaacacagcattgagtgttcaagtttcagaggtgattgggaatgtaaaaaccagtttgagagaaaacagggatctcaggaaggacatttcagtgaaatgatatttactcctgaagacatgcccactttcagtatccagcatcagagaattcatactgatgagaaactccttgaatgtaaggaatgtgggaaggattttagttttgtatcagtccttgttcgacatcagcgaattcatactggtgagaaaccttatgaatgcaaagaatgtggcaaggcctttggtagtggtgcaaaccttgcttaccatcaaagaattcatactggtgagaagccttttgaatgtaaagaatgtgggaaggcctttggtagtggctcaaaccttactcaccatcagagaattcatactggtgagaaaccctatgagtgtaaggaatgtgggaaagcctttagttttggatcaggccttatacgacatcagatcattcacagtggagagaagccttatgagtgtaaggaatgtgggaagtcctttagttttgaatcagcccttattcggcatcacagaattcacacaggtgagaaaccttatgaatgtatagattgtggtaaagcctttggcagtggttcaaaccttactcaacatcggcggattcatactggtgagaaaccttatgaatgcaaagcatgtggaatggcctttagcagtggttcggctcttactcggcatcagagaattcataccggtgagaaaccatatatatgtaatgaatgtggtaaggcctttagttttggatcagcccttactcgacatcaaagaattcatactggtgagaaaccttatgtatgtaaggaatgtgggaaggcttttaatagtggctcagatctcactcagcatcagagaattcacactggtgagaaaccctatgagtgtaaggagtgtgagaaagcctttagaagtggttcaaaacttattcagcatcaaagaatgcatactggagagaaaccttatgaatgtaaggaatgtgggaagacctttagtagtggttcagaccttactcaacatcacagaattcatactggtgagaaaccctatgaatgtaaggaatgtgggaaggcctttggtagtggctcaaaacttatccaacaccagctaatccatactggtgaaagaccctatgaatgtaaagaatgtggaaagtcctttagtagtggttcagctcttaatcggcaccagagaatacacactggtgagaaaccctatgaatgtaaggagtgtgggaaggctttttatagtggctcaagccttactcagcatcagagaattcatacaggtgagaaactttatgaatgtaagaactgtgggaaggcttatgggagggattcagagtttcagcaacataagaaaagtcataatggtaagaaactctgcgaattggaaactataaattgaaattatgtgctgaaggaaggactctaaacatatgacttaagaaaattcatagtggtgaaaatctctacaaatagaactaaggtacaaatgccttacttatgcttcacaggttagtcagtctaagaatatttatacaggaaaaaaatcaccccaaataaaataaatatttgaagatccttatctatattcattccttcattacttttggaaaattcttacttgtgaatgttaaaaatgaaaaaaaaatcatttattatattttgcctcaactttaaacattggaaaactcatttctgggttaatc

SEQ ID NO: 635 - protein, 488 aa, Homo sapien
MENLTKHSIECSSFRGDWECKNQFERKQGSQEGHFSEMIFTPEDMPTFSIQHQRIHTDEKLLECKECGKDFSFVSVLVRHQRIHTGEKPYECKECGKAFGSGANLAYHQRIHTGEKPFECKECGKAFGSGSNLTHHQRIHTGEKPYECKECGKAFSFGSGLIRHQIIHSGEKPYECKECGKSFSFESALIRHHRIHTGEKPYECIDCGKAFGSGSNLTQHRRIHTGEKPYECKACGMAFSSGSALTRHQRIHTGEKPYICNECGKAFSFGSALTRHQRIHTGEKPYVCKECGKAFNSGSDLTQHQRIHTGEKPYECKECEKAFRSGSKLIQHQRMHTGEKPYECKECGKTFSSGSDLTQHHRIHTGEKPYECKECGKAFGSGSKLIQHQLIHTGERPYECKECGKSFSSGSALNRHQRIHTGEKPYECKECGKAFYSGSSLTQHQRIHTGEKLYECKNCGKAYGRDSEFQQHKKSHNGKKLCELETIN

SEQ ID NO: 636 - DNA, 2603 bp, Homo sapien
ccacgcgtccgcgctcccctcagctcctgcagtgctaattaagggagggagcagcggggagcttgcagtgaccaagagggtgttgaggctaggaggccacgataaacaggatacgataaaagtccttaaccaagacgcagatgggaagaagcgttagagcgagcagcactcacatctcaagaaccagcctttcaaacagtttccagagatggattatcctactttacttttggctcttcttcatgtatacagagctctatgtgaagaggtgctttggcatacatcagttccctttgccgagaacatgtctctagaatgtgtgtatccatcaatgggcatcttaacacaggtggagtggttcaagatcgggacccagcaggattccatagccattttcagccctactcatggcatggtcataaggaagccctatgctgagagggtttactttttgaattcaacgatggcttccaataacatgactcttttctttcggaatgcctctgaagatgatgttggctactattcctgctctctttacacttacccacagggaacttggcagaaggtgatacaggtggttcagtcagatagttttgaggcagctgtgccatcaaatagccacattgtttcggaacctggaaagaatgtcacactcacttgtcagcctcagatgacgtggcctgtgcaggcagtgaggtgggaaaagatccagccccgtcagatcgacctcttaacttactgcaacttggtccatggcagaaatttcacctccaagttcccaagacaaatagtgagcaactgcagccacggaaggtggagcgtcatcgtcatccccgatgtcacagtctcagactcggggctttaccgctgctacttgcaggccagcgcaggagaaaacgaaaccttcgtgatgagattgactgtagccgagggtaaaaccgataaccaatataccctctttgtggctggagggacagttttattgttgttgtttgttatctcaattaccaccatcattgtcattttccttaacagaaggagaaggagagagagaagagatctatttacagagtcctgggatacacagaaggcacccaataactatagaagtcccatctctaccggtcaacctaccaatcaatccatggatgatacaagagaggatatttatgtcaactatccaaccttctctcgcagaccaaagactagagtttaagcttattcttgacatgagtgcattagtaatgactcttatgtactcatgcatggatctttatgcaatttttttccactacccaaggtctaccttagatactagttgtctgaattgagttactttgataggaaaaatacttcattacctaaaatcatttttcatagaactgtttcagaaaacctgactctaactggtttatatacaaaagaaaacttactgtatcatataacagaatgatccaggggagattaagctttgggcaagggctatttaccagggcttaaatgttgtgtctagaattaagtatgggcataaactggcttctgaatccctttccagagtgttggatccatttccctggtcttggcctcactctcatgcaggctttcctcttgtgttggcaagatggctgccaactcttggcaattcatacatccttgtttctgtctggtagagagtttgcttctcaaatggagcaaacaaatttgattattttttcattgttaaataggcaacatgaccagaaaggatggaatggcttaagtaaactaagggttcacttctagagctgagaagcagggtcaaagcacaatactgggcaattcagagcatggttagaagaggaaaggggagtctcaaagctggagagtttaccaacaaatattgactgcagtgattaaccaagacatttttgttaactaaaaagtgaaatatgggatggattctagaaatggggtatctctgtccatacttctagaatccactctatcagcatagtccagaagaatacctggcagtagaagaaatgaatattcaagaggaagataaatgcgagagggcaatcctttactattctcatatttatttatctctcattctgtatagaattcttgccgccatcccaggtctagccttaggagcaaatgtagtagatagtcgaataataaataacttaatgttttggacatattttgtctacttttgagaattatttttaatatgtaaattctctcaaaagggtcaggcacctagttattattttttaatgattatgtgaaagttgaatataatataccactaaaagtgacagttgaaagtggtggcataggatggtagggtagaaatttgggagggaaaaaagaaattgggagggtacaggcaacaggagaaaggaatcaaaccacagaaaaatacaaagggaaacttctgcttcactattcagacaaagacagccctaatgacatcaccaacagtcaaagcaattagagaccatacctaatattgtttaaattctagatgtaggctaacaatgaaaagtatttgccaaactgaataaaactgtcatggttaccttgaaaaaaaaaaaaaaaaaaaaaaaaaaaaa

SEQ ID NO: 637 - protein, 336 aa, Homo sapien
MDYPTLLLALLHVYRALCEEVLWHTSVPFAENMSLECVYPSMGILTQVEWFKIGTQQDSIAIFSPTHGMVIRKPYAERVYFLNSTMASNNMTLFFRNASEDDVGYYSCSLYTYPQGTWQKVIQVVQSDSFEAAVPSNSHIVSEPGKNVTLTCQPQMTWPVQAVRWEKIQPRQIDLLTYCNLVHGRNFTSKFPRQIVSNCSHGRWSVIVIPDVTVSDSGLYRCYLQASAGENETFVMRLTVAEGKTDNQYTLFVAGGTVLLLLFVISITTIIVIFLNRRRRRERRDLFTESWDTQKAPNNYRSPISTGQPTNQSMDDTREDIYVNYPTFSRRPKTRV

SEQ ID NO: 638 - DNA, 5010 bp, Homo sapien
ggcggctcgggacggaggacgcgctagtgtgagtgcgggcttctagaactacaccgaccctcgtgtcctcccttcatcctgcggggctggctggagcggccgctccggtgctgtccagcagccatagggagccgcacggggagcgggaaagcggtcgcggccccaggcggggcggccgggatggagcggggccgcgagcctgtggggaaggggctgtggcggcgcctcgagcggctgcaggttcttctgtgtggcagttcagaatgatggatcaagctagatcagcattctctaacttgtttggtggagaaccattgtcatatacccggttcagcctggctcggcaagtagatggcgataacagtcatgtggagatgaaacttgctgtagatgaagaagaaaatgctgacaataacacaaaggccaatgtcacaaaaccaaaaaggtgtagtggaagtatctgctatgggactattgctgtgatcgtctttttcttgattggatttatgattggctacttgggctattgtaaaggggtagaaccaaaaactgagtgtgagagactggcaggaaccgagtctccagtgagggaggagccaggagaggacttccctgcagcacgtcgcttatattgggatgacctgaagagaaagttgtcggagaaactggacagcacagacttcaccagcaccatcaagctgctgaatgaaaattcatatgtccctcgtgaggctggatctcaaaaagatgaaaatcttgcgttgtatgttgaaaatcaatttcgtgaatttaaactcagcaaagtctggcgtgatcaacattttgttaagattcaggtcaaagacagcgctcaaaactcggtgatcatagttgataagaacggtagacttgtttacctggtggagaatcctgggggttatgtggcgtatagtaaggctgcaacagttactggtaaactggtccatgctaattttggtactaaaaaagattttgaggatttatacactcctgtgaatggatctatagtgattgtcagagcagggaaaatcacctttgcagaaaaggttgcaaatgctgaaagcttaaatgcaattggtgtgttgatatacatggaccagactaaatttcccattgttaacgcagaactttcattctttggacatgctcatctggggacaggtgacccttacacacctggattcccttccttcaatcacactcagtttccaccatctcggtcatcaggattgcctaatatacctgtccagacaatctccagagctgctgcagaaaagctgtttgggaatatggaaggagactgtccctctgactggaaaacagactctacatgtaggatggtaacctcagaaagcaagaatgtgaagctcactgtgagcaatgtgctgaaagagataaaaattcttaacatctttggagttattaaaggctttgtagaaccagatcactatgttgtagttggggcccagagagatgcatggggccctggagctgcaaaatccggtgtaggcacagctctcctattgaaacttgcccagatgttctcagatatggtcttaaaagatgggtttcagcccagcagaagcattatctttgccagttggagtgctggagactttggatcggttggtgccactgaatggctagagggatacctttcgtccctgcatttaaaggctttcacttatattaatctggataaagcggttcttggtaccagcaacttcaaggtttctgccagcccactgttgtatacgcttattgagaaaacaatgcaaaatgtgaagcatccggttactgggcaatttctatatcaggacagcaactgggccagcaaagttgagaaactcactttagacaatgctgctttccctttccttgcatattctggaatcccagcagtttctttctgtttttgcgaggacacagattatccttatttgggtaccaccatggacacctataaggaactgattgagaggattcctgagttgaacaaagtggcacgagcagctgcagaggtcgctggtcagttcgtgattaaactaacccatgatgttgaattgaacctggactatgagaggtacaacagccaactgctttcatttgtgagggatctgaaccaatacagagcagacataaaggaaatgggcctgagtttacagtggctgtattctgctcgtggagacttcttccgtgctacttccagactaacaacagatttcgggaatgctgagaaaacagacagatttgtcatgaagaaactcaatgatcgtgtcatgagagtggagtatcacttcctctctccctacgtatctccaaaagagtctcctttccgacatgtcttctggggctccggctctcacacgctgccagctttactggagaacttgaaactgcgtaaacaaaataacggtgcttttaatgaaacgctgttcagaaaccagttggctctagctacttggactattcagggagctgcaaatgccctctctggtgacgtttgggacattgacaatgagttttaaatgtgatacccatagcttccatgagaacagcagggtagtctggtttctagacttgtgctgatcgtgctaaattttcagtagggctacaaaacctgatgttaaaattccatcccatcatcttggtactactagatgtctttaggcagcagcttttaatacagggtagataacctgtacttcaagttaaagtgaataaccacttaaaaaatgtccatgatggaatattcccctatctctagaattttaagtgctttgtaatgggaactgcctctttcctgttgttgttaatgaaaatgtcagaaaccagttatgtgaatgatctctctgaatcctaagggctggtctctgctgaaggttgtaagtggttcgcttactttgagtgatcctccaacttcatttgatgctaaataggagataccaggttgaaagacctctccaaatgagatctaagcctttccataaggaatgtagcaggtttcctcattcctgaaagaaacagttaactttcagaagagatgggcttgttttcttgccaatgaggtctgaaatggaggtccttctgctggataaaatgaggttcaactgttgattgcaggaataaggccttaatatgttaacctcagtgtcatttatgaaaagaggggaccagaagccaaagacttagtatattttcttttcctctgtcccttcccccataagcctccatttagttctttgttatttttgtttcttccaaagcacattgaaagagaaccagtttcaggtgtttagttgcagactcagtttgtcagactttaaagaataatatgctgccaaattttggccaaagtgttaatcttaggggagagctttctgtccttttggcactgagatatttattgtttatttatcagtgacagagttcactataaatggtgtttttttaatagaatataattatcggaagcagtgccttccataattatgacagttatactgtcggttttttttaaataaaagcagcatctgctaataaaacccaacagatactggaagttttgcatttatggtcaacacttaagggttttagaaaacagccgtcagccaaatgtaattgaataaagttgaagctaagatttagagatgaattaaatttaattaggggttgctaagaagcgagcactgaccagataagaatgctggttttcctaaatgcagtgaattgtgaccaagttataaatcaatgtcacttaaaggctgtggtagtactcctgcaaaattttatagctcagtttatccaaggtgtaactctaattcccatttgcaaaatttccagtacctttgtcacaatcctaacacattatcgggagcagtgtcttccataatgtataaagaacaaggtagtttttacctaccacagtgtctgtatcggagacagtgatctccatatgttacactaagggtgtaagtaattatcgggaacagtgtttcccataattttcttcatgcaatgacatcttcaaagcttgaagatcgttagtatctaacatgtatcccaactcctataattccctatcttttagttttagttgcagaaacattttgtggtcattaagcattgggtgggtaaattcaaccactgtaaaatgaaattactacaaaatttgaaatttagcttgggtttttgttacctttatggtttctccaggtcctctacttaatgagatagcagcatacatttataatgtttgctattgacaagtcattttaatttatcacattatttgcatgttacctcctataaacttagtgcggacaagttttaatccagaattgaccttttgacttaaagcagagggactttgtatagaaggtttgggggctgtggggaaggagagtcccctgaaggtctgacacgtctgcctacccattcgtggtgatcaattaaatgtaggtatgaataagttcgaagctccgtgagtgaaccatcatataaacgtgtagtacagctgtttgtcatagggcagttggaaacggcctcctagggaaaagttcatagggtctcttcaggttcttagtgtcacttacctagatttacagcctcacttgaatgtgtcactactcacagtctctttaatcttcagttttatctttaatctcctcttttatcttggactgacatttagcgtagctaagtgaaaaggtcatagctgagattcctggttcgggtgttacgcacacgtacttaaatgaaagcatgtggcatgttcatcgtataacacaatatgaatacagggcatgcattttgcagcagtgagtctcttcagaaaacccttttctacagttagggttgagttacttcctatcaagccagtacgtgctaacaggctcaatattcctgaatgaaatatcagactagtgacaagctcctggtcttgagatgtcttctcgttaaggagtagggccttttggaggtaaaggtata

SEQ ID NO: 639 - protein, 760 aa, Homo sapien
MMDQARSAFSNLFGGEPLSYTRFSLARQVDGDNSHVEMKLAVDEEENADNNTKANVTKPKRCSGSICYGTIAVIVFFLIGFMIGYLGYCKGVEPKTECERLAGTESPVREEPGEDFPAARRLYWDDLKRKLSEKLDSTDFTSTIKLLNENSYVPREAGSQKDENLALYVENQFREFKLSKVWRDQHFVKIQVKDSAQNSVIIVDKNGRLVYLVENPGGYVAYSKAATVTGKLVHANFGTKKDFEDLYTPVNGSIVIVRAGKITFAEKVANAESLNAIGVLIYMDQTKFPIVNAELSFFGHAHLGTGDPYTPGFPSFNHTQFPPSRSSGLPNIPVQTISRAAAEKLFGNMEGDCPSDWKTDSTCRMVTSESKNVKLTVSNVLKEIKILNIFGVIKGFVEPDHYVVVGAQRDAWGPGAAKSGVGTALLLKLAQMFSDMVLKDGFQPSRSIIFASWSAGDFGSVGATEWLEGYLSSLHLKAFTYINLDKAVLGTSNFKVSASPLLYTLIEKTMQNVKHPVTGQFLYQDSNWASKVEKLTLDNAAFPFLAYSGIPAVSFCFCEDTDYPYLGTTMDTYKELIERIPELNKVARAAAEVAGQFVIKLTHDVELNLDYERYNSQLLSFVRDLNQYRADIKEMGLSLQWLYSARGDFFRATSRLTTDFGNAEKTDRFVMKKLNDRVMRVEYHFLSPYVSPKESPFRHVFWGSGSHTLPALLENLKLRKQNNGAFNETLFRNQLALATWTIQGAANALSGDVWDIDNEF

SEQ ID NO: 640 - DNA, 1610 bp, Homo sapien
cccagagcagcgctcgccacctccccccggcctgggcagcgctcgcccggggagtccagcggtgtcctgtggagctgccgccatggccccgcggcgggcgcgcggctgccggaccctcggtctcccggcgctgctactgctgctgctgctccggccgccggcgacgcggggcatcacgtgccctccccccatgtccgtggaacacgcagacatctgggtcaagagctacagcttgtactccagggagcggtacatttgtaactctggtttcaagcgtaaagccggcacgtccagcctgacggagtgcgtgttgaacaaggccacgaatgtcgcccactggacaacccccagtctcaaatgcattagagaccctgccctggttcaccaaaggccagcgccaccctccacagtaacgacggcaggggtgaccccacagccagagagcctctccccttctggaaaagagcccgcagcttcatctcccagctcaaacaacacagcggccacaacagcagctattgtcccgggctcccagctgatgccttcaaaatcaccttccacaggaaccacagagataagcagtcatgagtcctcccacggcaccccctctcagacaacagccaagaactgggaactcacagcatccgcctcccaccagccgccaggtgtgtatccacagggccacagcgacaccactgtggctatctccacgtccactgtcctgctgtgtgggctgagcgctgtgtctctcctggcatgctacctcaagtcaaggcaaactcccccgctggccagcgttgaaatggaagccatggaggctctgccggtgacttgggggaccagcagcagagatgaagacttggaaaactgctctcaccacctatgaaactcggggaaaccagcccagctaagtccggagtgaaggagcctctctgctttagctaaagacgactgagaagaggtgcaaggaagcgggctccaggagcaagctcaccaggcctctcagaagtcccagcaggatctcacggactgccgggtcggcgcctcctgcgcgagggagcaggttctccgcattcccatgggcaccacctgcctgcctgtcgtgccttggacccagggcccagcttcccaggagagaccaaaggcttctgagcaggatttttatttcattacagtgtgagctgcctggaatacatgtggtaatgaaataaaaaccctgccccgaatcttccgtccctcatcctaacttgcagttcacagagaaaagtgacatacccaaagctctctgtcaattacaaggcttctcctggcgtgggagacgtctacagggaagacaccagcgtttgggcttctaaccaccctgtctccagctgctctgcacacatggacagggacctgggaaaggtgggagagatgctgagcccagcgaatcctctccattgaaggattcaggaagaagaaaactcaactcagtgccattttacgaatatatgcgtttatatttatacttccttgtctattatatctatacattatatattatttgtattttgacattgtaccttgtataaacaaaataaaacatctattttcaatatttttaaaatgca

SEQ ID NO: 641 - protein, 267 aa, Homo sapien
MAPRRARGCRTLGLPALLLLLLLRPPATRGITCPPPMSVEHADIWVKSYSLYSRERYICNSGFKRKAGTSSLTECVLNKATNVAHWTTPSLKCIRDPALVHQRPAPPSTVTTAGVTPQPESLSPSGKEPAASSPSSNNTAATTAAIVPGSQLMPSKSPSTGTTEISSHESSHGTPSQTTAKNWELTASASHQPPGVYPQGHSDTTVAISTSTVLLCGLSAVSLLACYLKSRQTPPLASVEMEAMEALPVTWGTSSRDEDLENCSHHL

SEQ ID NO: 642 - DNA, 1601 bp, Homo sapien
aaaccacaagacagacttgcaaaagaaggcatgcacagctcagcactgctctgttgcctggtcctcctgactggggtgagggccagcccaggccagggcacccagtctgagaacagctgcacccacttcccaggcaacctgcctaacatgcttcgagatctccgagatgccttcagcagagtgaagactttctttcaaatgaaggatcagctggacaacttgttgttaaaggagtccttgctggaggactttaagggttacctgggttgccaagccttgtctgagatgatccagttttacctggaggaggtgatgccccaagctgagaaccaagacccagacatcaaggcgcatgtgaactccctgggggagaacctgaagaccctcaggctgaggctacggcgctgtcatcgatttcttccctgtgaaaacaagagcaaggccgtggagcaggtgaagaatgcctttaataagctccaagagaaaggcatctacaaagccatgagtgagtttgacatcttcatcaactacatagaagcctacatgacaatgaagatacgaaactgagacatcagggtggcgactctatagactctaggacataaattagaggtctccaaaatcggatctggggctctgggatagctgacccagccccttgagaaaccttattgtacctctcttatagaatatttattacctctgatacctcaacccccatttctatttatttactgagcttctctgtgaacgatttagaaagaagcccaatattataatttttttcaatatttattattttcacctgtttttaagctgtttccatagggtgacacactatggtatttgagtgttttaagataaattataagttacataagggaggaaaaaaaatgttctttggggagccaacagaagcttccattccaagcctgaccacgctttctagctgttgagctgttttccctgacctccctctaatttatcttgtctctgggcttggggcttcctaactgctacaaatactcttaggaagagaaaccagggagcccctttgatgattaattcaccttccagtgtctcggagggattcccctaacctcattccccaaccacttcattcttgaaagctgtggccagcttgttatttataacaacctaaatttggttctaggccgggcgcggtggctcacgcctgtaatcccagcactttgggaggctgaggcgggtggatcacttgaggtcaggagttcctaaccagcctggtcaacatggtgaaaccccgtctctactaaaaatacaaaaattagccgggcatggtggcgcgcacctgtaatcccagctacttgggaggctgaggcaagagaattgcttgaacccaggagatggaagttgcagtgagctgatatcatgcccctgtactccagcctgggtgacagagcaagactctgtctcaaaaaaataaaaataaaaataaatttggttctaatagaactcagttttaactagaatttattcaattcctctgggaatgttacattgtttgtctgtcttcatagcagattttaattttgaataaataaatgtatcttattcacatc

SEQ ID NO: 643 - protein, 178 aa, Homo sapien
MHSSALLCCLVLLTGVRASPGQGTQSENSCTHFPGNLPNMLRDLRDAFSRVKTFFQMKDQLDNLLLKESLLEDFKGYLGCQALSEMIQFYLEEVMPQAENQDPDIKAHVNSLGENLKTLRLRLRRCHRFLPCENKSKAVEQVKNAFNKLQEKGIYKAMSEFDIFINYIEAYMTMKIRN

SEQ ID NO: 644 - DNA, 3452 bp, Homo sapien
ctgaagcttgcatgcctgcaggtcgacccacgcgtccgcggacgcgtgggcggacgcgtgggtttttcctttcttccagaaggagatttaaccatagtagaaagaatggagaactattaactgccttccttctgtgggctgtgattttcagaggggaatgctaagaggtgattttcaatgttgggactcaaaggtgaagacactgaaggacagaatttttggcagaggaaagatcttcttcggtcaccatacttgagttagctctagggaagtggaggtttccatttggaattctatagcttcttccaggtcatagtgtctgccccccaccttccagtatctcctgatatgcagcatgaatgaaaatggcaagtttcctggccttccttctgctcaactttcgtgtctgcctccttttgcttcagctgctcatgcctcactcagctcagttttctgtgcttggaccctctgggcccatcctggccatggtgggtgaagacgctgatctgccctgtcacctgttcccgaccatgagtgcagagaccatggagctgaagtgggtgagttccagcctaaggcaggtggtgaacgtgtatgcagatggaaaggaagtggaagacaggcagagtgcaccgtatcgagggagaacttcgattctgcgggatggcatcactgcagggaaggctgctctccgaatacacaacgtcacagcctctgacagtggaaagtacttgtgttatttccaagatggtgacttctatgaaaaagccctggtggagctgaaggttgcagcactgggttctgatcttcacgttgatgtgaagggttacaaggatggagggatccatctggagtgcaggtccactggctggtacccccaaccccaaatacagtggagcaacaacaagggagagaacatcccgactgtggaagcacctgtggttgcagacggagtgggcctgtatgcagtagcagcatctgtgatcatgagaggcagctctggggagggtgtatcctgtaccatcagaagttccctcctcggcctggaaaagacagccagcatttccatcgcagaccccttcttcaggagcgcccagaggtggatcgccgccctggcacggaccctgcctgtcttgctgctgcttcttgggggagccggttacttcctgtggcaacagcaggaggaaaaaaagactcagttcagaaagaaaaagagagagcaagagttgagagaaatggcatggagcacaatgaagcaagaacaaagcacaagagtgaagctcctggaggaactcagatggagaagtatccagtatgcatctcggggagagagacattcagcctataatgaatggaaaaaggccctcttcaagcctgcggatgtgattctggatccaaaaacagcaaaccccatcctccttgtttctgaggaccagaggagtgtgcagcgtgccaaggagccccaggatctgccagacaaccctgagagatttaattggcattattgtgttctcggctgtgagagcttcatatcagggagacattactgggaggtggaggtaggggacaggaaagagtggcatataggggtgtgcagtaagaatgtgcagagaaaaggctgggtcaaaatgacacctgagaatggattctggactatggggctgactgatgggaataagtatcggactctaactgagcccagaaccaacctgaaacttcctaagccccctaagaaagtgggggtcttcctggactatgagactggagatatctcattctacaatgctgtggatggatcgcatattcatactttcctggacgtctccttctctgaggctctatatcctgttttcagaattttgaccttggagcccacggccctgagtatttgtccagcgtgaaaagaagaagagagttcctccaattctgaccgagtgctgatcattccctagagacaccagtaaccccgggcttagctaacgaaagtggggagcctcaggctgaagtaacttttctctgcttctccctgcccagctcagagctgagggcctccccctccacagcaaccaatcacaaccataaagctacaagcacgcactgaagcactttactgatactcattcaattattcatatgacagttgtttgagtttggtaccatcttattttccccttatacagataaggaaactggggtgcagaaaagtgaattgactacaaagtagacatgactagttaacaacacagctgggatctaaacagcaataactaacattaatggagaacttaaaatgctctgagtgctgtgttatgagctttggtggatgtcactcctttaatcctcgcaacaccctgtcgggtagtctcatttagcaagtatggaagttgaggcagggcaacattaagcaacttacataactcatgcagtaatttctgcagttgggagatgttcagcttcagtccccggccctatggccgttcttttccaccctgtttcttcccccataggaagaacccacctgtagccctgaggttcttttcccaggatggctccaggataaggatcactgtaggtggttgtggagttgacacccctgttgactccttcccagctgattgtcagagccttagacccagcacgccttggattagctttgcagagtgtcttggttgagagaataacctcaccgtacccacatgacacgtgatttggaaagagactagaggccacacttgataaatcatggggaacagatgtgttccacccaacaaatgtgataagtgatcatgcagccagagccagccttccttcaatcaaggtttccaggcagagcaaataccctagagattttctgtgatataggaaatttggatgaagggagctagaagaaatacagggatttttttttttttttaagatggagtcttactctgttgctaggctggagtgcagtggtgcgatctcagctccctgcaacctccacctcctgggttcaaacaattctcctgcctcagcctcccgagtactgggaatataggtgcacgccaccacacccaacaaatttttgtacttttagtacagatgagggttcactatgttggccaggatggtctcgatctcttgacctcatgatccacccacctcggtctcccaaagtgctgggattacaggcttgagccaccgggtgaccggcttacagggatatttttaatcccgttatggactctgtctccaggagaggggtctatccacccctgctcattggtggatgttaaaccaatattcctttcaactgctgcctgctagggaaaaactactcctcattatcatcattattattgctctccactgtatcccctctacctggcatgtgcttgtcaagttctagttgttcaataaatttgttaataatgctgaaaaaaaaaaaaaaaaaaaaaaaaaaaaaaaaaaaa

SEQ ID NO: 645 - protein, 513 aa, Homo sapien
MKMASFLAFLLLNFRVCLLLLQLLMPHSAQFSVLGPSGPILAMVGEDADLPCHLFPTMSAETMELKWVSSSLRQVVNVYADGKEVEDRQSAPYRGRTSILRDGITAGKAALRIHNVTASDSGKYLCYFQDGDFYEKALVELKVAALGSDLHVDVKGYKDGGIHLECRSTGWYPQPQIQWSNNKGENIPTVEAPVVADGVGLYAVAASVIMRGSSGEGVSCTIRSSLLGLEKTASISIADPFFRSAQRWIAALARTLPVLLLLLGGAGYFLWQQQEEKKTQFRKKKREQELREMAWSTMKQEQSTRVKLLEELRWRSIQYASRGERHSAYNEWKKALFKPADVILDPKTANPILLVSEDQRSVQRAKEPQDLPDNPERFNWHYCVLGCESFISGRHYWEVEVGDRKEWHIGVCSKNVQRKGWVKMTPENGFWTMGLTDGNKYRTLTEPRTNLKLPKPPKKVGVFLDYETGDISFYNAVDGSHIHTFLDVSFSEALYPVFRILTLEPTALSICPA

SEQ ID NO: 646 - DNA, 826 bp, Homo sapien
aattccggaattccccggcctggccagggcggagcggcgcccagtagggacccattcattgtgccggcgcctcactgggcacggggcccaagctgacggcgtgcacgggagcctgcggagcctgggtgggaagaacaggcccctggagggcacttgaccttaagcctcttttcctccgcagagaggaagcgggagaggagcccacgtcgcctgtcacccaatatctccagccgcgcagtcccgaagagtgtaagatgttcgcctgcgccaagctcgcctgcaccccctctctgatccgagctggatccagagttgcatacagaccaatttctgcatcagtgttatctcgaccagaggctagtaggactggagagggctctacggtatttaatggggcccagaatggtgtgtctcagctaatccaaagggagtttcagaccagtgcaatcagcagagacattgatactgctgccaaatttattggtgcaggtgctgcaacagtaggagtggctggttctggtgctggtattggaacagtctttggcagccttatcattggttatgccagaaacccttcgctgaagcagcagctgttctcatatgctatcctgggatttgccttgtctgaagctatgggtctcttttgtttgatggttgctttcttgattttgtttgccatgtaacaaattactgcttgacatgttggcattcatattaattacggatgtaattctgtgtatcttactgtgactccgaaaactgtagtattggtgtcatgggaatgtacgttatttccaaagtcatttcattaaagatgaaaacttta

SEQ ID NO: 647 - protein, 142 aa, Homo sapien
MFACAKLACTPSLIRAGSRVAYRPISASVLSRPEASRTGEGSTVFNGAQNGVSQLIQREFQTSAISRDIDTAAKFIGAGAATVGVAGSGAGIGTVFGSLIIGYARNPSLKQQLFSYAILGFALSEAMGLFCLMVAFLILFAM

SEQ ID NO: 648 - DNA, 1937 bp, Homo sapien
ggcacgaggggagtggaaagttctccggcagccctgagatctcaagagtgacatttgtgagaccagctaatttgattaaaattctcttggaatcagctttgctagtatcatacctgtgccagatttcatcatgggaaacagctgttacaacatagtagccactctgttgctggtcctcaactttgagaggacaagatcattgcaggatccttgtagtaactgcccagctggtacattctgtgataataacaggaatcagatttgcagtccctgtcctccaaatagtttctccagcgcaggtggacaaaggacctgtgacatatgcaggcagtgtaaaggtgttttcaggaccaggaaggagtgttcctccaccagcaatgcagagtgtgactgcactccagggtttcactgcctgggggcaggatgcagcatgtgtgaacaggattgtaaacaaggtcaagaactgacaaaaaaaggttgtaaagactgttgctttgggacatttaacgatcagaaacgtggcatctgtcgaccctggacaaactgttctttggatggaaagtctgtgcttgtgaatgggacgaaggagagggacgtggtctgtggaccatctccagccgacctctctccgggagcatcctctgtgaccccgcctgcccctgcgagagagccaggacactctccgcagatcatctccttctttcttgcgctgacgtcgactgcgttgctcttcctgctgttcttcctcacgctccgtttctctgttgttaaacggggcagaaagaaactcctgtatatattcaaacaaccatttatgagaccagtacaaactactcaagaggaagatggctgtagctgccgatttccagaagaagaagaaggaggatgtgaactgtgaaatggaagtcaatagggctgttgggactttcttgaaaagaagcaaggaaatatgagtcatccgctatcacagctttcaaaagcaagaacaccatcctacataatacccaggattcccccaacacacgttcttttctaaatgccaatgagttggcctttaaaaatgcaccactttttttttttttttgacagggtctcactctgtcacccaggctggagtgcagtggcaccaccatggctctctgcagccttgacctctgggagctcaagtgatcctcctgcctcagtctcctgagtagctggaactacaaggaagggccaccacacctgactaacttttttgttttttgtttggtaaagatggcatttcaccatgttgtacaggctggtctcaaactcctaggttcactttggcctcccaaagtgctgggattacagacatgaactgccaggcccggccaaaataatgcaccacttttaacagaacagacagatgaggacagagctggtgataaaaaaaaaaaaaaaaaagcattttctagataccacttaacaggtttgagctagtttttttgaaatccaaagaaaattatagtttaaattcaattacatagtccagtggtccaactataattataatcaaaatcaatgcaggtttgttttttggtgctaatatgacatatgacaataagccacgaggtgcagtaagtacccgactaaagtttccgtgggttctgtcatgtaacacgacatgctccaccgtcaggggggagtatgagcagagtgcctgagtttagggtcaaggacaaaaaacctcaggcctggaggaagttttggaaagagttcaagtgtctgtatatcctatggtcttctccatcctcacaccttctgcctttgtcctgctcccttttaagccaggttacattctaaaaattcttaacttttaacataatattttataccaaagccaataaatgaactgcatatgaaaaaaaaaaaaaaaaaaaaaaaaaaaaaaaaaaaaaaaaaaaaaaaaaaaa

SEQ ID NO: 649 - protein, 255 aa, Homo sapien
MGNSCYNIVATLLLVLNFERTRSLQDPCSNCPAGTFCDNNRNQICSPCPPNSFSSAGGQRTCDICRQCKGVFRTRKECSSTSNAECDCTPGFHCLGAGCSMCEQDCKQGQELTKKGCKDCCFGTFNDQKRGICRPWTNCSLDGKSVLVNGTKERDVVCGPSPADLSPGASSVTPPAPAREPGHSPQIISFFLALTSTALLFLLFFLTLRFSVVKRGRKKLLYIFKQPFMRPVQTTQEEDGCSCRFPEEEEGGCEL

SEQ ID NO: 650 - DNA, 2366 bp, Homo sapien
gaccacgcgtatcgatgtcgacccacaggattgtcacagagggcagggtggtgactgaggaccagctcctcatgcttgaggctgtggtgatgcacctcgggatccgctctgcccgctgtgtcctgggcatggagggtcagcaggtcatcctgcacctgcccctatcccagaaggggcccttctggacatgggagcctagtgcccctcgaactctgctccaggtcctacaggatccagccctgaaagacctcgtcctcacctgccccaccctgccctggcattccctgatcctgcggccccagtatgagatccaagccatcatgcacatgcgcaggaccattgtcaagatcccttctaccctggaggtcgacgtggaggacgtcaccgcctcctcccggcacgtccactttatcaaaccgctgctgctgagcgaggtcctggcctgggaaggccctttccccctgtccatggagatcctggaggttcctgagggccgccccatcttcctcagcccgtgggtgggctccttgcaaaaaggccagaggctttgcgtctatggcctagcctcaccaccctggcgggtcctggcctcaagcaagggccgcaaggtgcccaggcacttcctggtgtcagggggctaccaaggcaagctgcggcggcggccaagggagttccccacggcctatgacctcctaggtgctttccagccaggccggccactccgggtggtggccacaaaggactgtgagggcgagagggaggagaatcccgagttcacgtccctggctgtgggtgaccggctggaggtgctggggcctggccaggcccatggggcccagggcagtgacgtggatgtcttggtttgtcagcggctgagtgaccaggctggggaagatgaggaggaagagtgcaaagaggaggcagagacccagagcgggtcctgctgcccttccacttccctggcagtttcgtggaggagatgagtgacagccggcgctacagcctggcagatctgactgcccagttttcaatgccttgtgaggtcaaggtggtggccaaggacaccagccaccccaatgaccctcagaacctccttcctgggcctgcggctggaggagaagatcacagagccattcttggtggtgagcctggactctgagctgggatgtgctttgagatccctccccggaggctggacctgactgtcgtggaggccaaggggcagccagacttgccagaggggtctctccccatagccacagtggaggaagctggaacagacaccttttattattgtcttcggaagttaccagcctgtgagatccaagcccccccacccaggccccctaaaaatcagggcctcagcaagcagaggagacacagcagtgagggaggcgtcaagtcttctcaagtcttaggattgcagcaacacgttcggctgcccaaacccaaggcgaagaccttgccagagttcatcaaggatggctccagtacgtacagcaagattcctgcccacaggaagggccacaggcccgctaagccccaaaggcaggatctagatgatgatgaacatgattatgaagaaatacttgagcaatttcagaaaaccatctaagtgctggaggaaccacgcttcctaactgctgcttctcagggaatccgacaccagccaaccattttaagcctctaaaagacctcgggcaagtctcacagaaactgagctgcagacggggagtagctttgtggaaactgatttgatggacactgcaccagcttccttcaggttctagattcttgctacttagggcgggctggtttggacctaacatctcgcacgtgactccctcagcctcagagccttgggatgcagagcagctggcagggttcctctcaatcctgcaaccccagctgtcccaccggtggatgcagaggggaatccgaggccatcaaccttggtgacagcagcgcagtgccaatgctgatcacactgcatgggagattttgttaacgtctgccacccccactctcacccccaagctctaagcccccgggaggcctggactgtcttcctcatctctgtagcaccaagcctgatagatctgtatatggtaaacaggggtttaaccacatgtggttaacatggattaatgtgggaatttggcttcaagaacacaaccttaggaccttgggccccaaaagctggtggtgaaatgagaggagccaatttaagaagacccttatggagacctgaggctgcagaaactggtaggtttcatcaggtggttaaagtcgtcaaagttgtaagtgactaaccaagattatttcattttaaaaccacagaataaaaatgacacctgagcttctcc

SEQ ID NO: 651 - protein, 284 aa, Homo sapien
MEGQQVILHLPLSQKGPFWTWEPSAPRTLLQVLQDPALKDLVLTCPTLPWHSLILRPQYEIQAIMHMRRTIVKIPSTLEVDVEDVTASSRHVHFIKPLLLSEVLAWEGPFPLSMEILEVPEGRPIFLSPWVGSLQKGQRLCVYGLASPPWRVLASSKGRKVPRHFLVSGGYQGKLRRRPREFPTAYDLLGAFQPGRPLRVVATKDCEGEREENPEFTSLAVGDRLEVLGPGQAHGAQGSDVDVLVCQRLSDQAGEDEEEECKEEAETQSGSCCPSTSLAVSWRR

SEQ ID NO: 652 - DNA, 1121 bp, Homo sapien
ctagctctgtgggaaggttttgggctctctggctcggattttgcaatttctccctggggactgccgtggagccgcatccactgtggattataattgcaacatgacgctggaagagctcgtggcgtgcgacaacgcggcgcagaagatgcagacggtgaccgccgcggtggaggagcttttggtggccgctcagcgccaggatcgcctcacagtgggggtgtacgagtcggccaagttgatgaatgtggacccagacagcgtggtcctctgcctcttggccattgacgaggaggaggaggatgacatcgccctgcaaatccacttcacgctcatccagtccttctgctgtgacaacgacatcaacatcgtgcgggtgtcgggcaatgcgcgcctggcgcagctcctgggagagccggccgagacccagggcaccaccgaggcccgagacctccactgtcttcccttcctacagaaccctcacacggacgcctggaagagccacggcttggtggaggtggccagctactgcgaagaaagccggggcaacaaccagtgggtcccctacatctctcttcaggaacgctgaggcccttcccagcagcagaatctgttgagttgctgccaacaaacaaaaaatacaataaatatttgaaccccctcccccccagcacaacccccccaaaacaacccaacccacgaggaccatcgggggcaggtcgttggagactgaagagaaagagagagaggagaagggagtgaggggccgctgccgccttccccatcacggagggtccagactgtccactcgggggtggagtgagactgactgcaagccccaccctccttgagactggagctgagcgtctgcatacgagagacttggttgaaacttggttggtccttgtctgcaccctcgacaagaccacactttgggacttgggagctggggctgaagttgctctgtacccatgaactcccagtttgcgaattaataagagacaatctattttgttacttgcacttgttattcgaaccactgagagcgagatgggaagcatagatatctatatttttatttctactatgagggccttgtaataaatttctaaagcctcaaaaaa

SEQ ID NO: 653 - protein, 161 aa, Homo sapien
MTLEELVACDNAAQKMQTVTAAVEELLVAAQRQDRLTVGVYESAKLMNVDPDSVVLCLLAIDEEEEDDIALQIHFTLIQSFCCDNDINIVRVSGNARLAQLLGEPAETQGTTEARDLHCLPFLQNPHTDAWKSHGLVEVASYCEESRGNNQWVPYISLQER

SEQ ID NO: 654 - DNA, 2197 bp, Homo sapien
cccagctccctgaaacaacagtaacctacccctgtgggtcatcatcatgccctccgacctggccaagaagaaggcagccaaaaagaaggaggctgccaaagctcgacagcggcccagaaaaggacatgaagaaaatggagatgttgtcacagaaccacaggtggcagagaagaatgaggccaatggcagagagaccacagaagtagatttgctgaccaaggagctagaggactttgagatgaagaaagctgctgctcgagctgtcactggcgtcctggcctctcaccccaacagtactgatgttcacatcatcaacctctcactcacctttcatggtcaagagctgctcagtgacaccaaactggaattaaactcaggccgtcgttatggcctcattggtttaaatggaattggaaagtccatgctgctctctgctattgggaagcgtgaagtgcccatccctgagcacatcgacatctaccatctgactcgagagatgccccctagtgacaagacacccttgcattgtgtgatggaagtcgacacagagcgggccatgctggagaaagaggcagagcggctggctcatgaggatgcggagtgtgagaagctcatggagctctacgagcgcctggaggagctggatgccgacaaggcagagatgagggcctcgcggatcttgcatggactgggtttcacacctgccatgcagcgcaagaagctaaaagacttcagtgggggctggaggatgagggttgcccttgccagagccctctttattcggcccttcatgctgctcctggatgagcctaccaaccacctggacctagatgcttgcgtgtggttggaagaagaactaaaaacttttaagcgcatcttggtcctcgtctcccattcccaggattttctgaatggtgtctgtaccaatatcattcacatgcacaacaagaaactgaagtattatacgggtaattatgatcagtatgtgaagacgcggctagagctggaggagaaccagatgaagaggtttcactgggagcaagatcagattgcacacatgaagaactacattgcgaggtttggtcatggcagtgccaagctggcccggcaggcccagagcaaggagaagacgctacagaaaatgatggcatcaggactgacagagagggtcgtgagcgataagacactgtcattttatttcccaccatgtggcaagatccctccacctgtcattatggtgcaaaatgtgagcttcaagtatacaaaagatgggccttgcatctacaataatctagaatttggaattgaccttgacacacgagtggctctggtagggcccaatggagcagggaagtcaactcttctgaagctgctaactggagagctactacccacagatggcatgatccgaaaacactctcatgtcaagatagggcgttaccatcagcatttacaagagcagctggacttagatctctcacctttggagtacatgatgaagtgctacccagagatcaaggagaaggaagaaatgaggaagatcattgggcgatacggtctcactgggaaacaacaggtgagcccaatccggaacttgtcagacgggcagaagtgccgagtgtgtctggcctggctggcctggcagaacccccacatgctcttcctggatgaacccaccaatcacctggatatcgagaccatcgacgccctggcagatgccatcaatgagtttgagggtggtatgatgctggtcagccatgacttcagactcattcagcaggttgcacaggaaatttgggtctgtgagaagcagacaatcaccaagtggcctggagacatcctggcttacaaggagcacctcaagtccaagctggtggatgaggagccccagctcaccaagaggacccacaacgtgtgcaccctgacattggcatctctgccaaggccatgagcatcatgaactcgtttgtaaacgacgtgtttgagcagctggcgtgtgaggctgcccggctggcccagtactcgggccggaccaccctgacatcccgagaagtccagacggctgtgcgtctgctgctgcctggggagctggccaagcacgctgtgtctgagggcaccaaggctgtcaccaagtacaccagctccaagtgacccagggcctgacaaaaataaagggtgaactgttaaaaaaaaaaaa

SEQ ID NO: 655 - protein, 634 aa, Homo sapien
MPSDLAKKKAAKKKEAAKARQRPRKGHEENGDVVTEPQVAEKNEANGRETTEVDLLTKELEDFEMKKAAARAVTGVLASHPNSTDVHIINLSLTFHGQELLSDTKLELNSGRRYGLIGLNGIGKSMLLSAIGKREVPIPEHIDIYHLTREMPPSDKTPLHCVMEVDTERAMLEKEAERLAHEDAECEKLMELYERLEELDADKAEMRASRILHGLGFTPAMQRKKLKDFSGGWRMRVALARALFIRPFMLLLDEPTNHLDLDACVWLEEELKTFKRILVLVSHSQDFLNGVCTNIIHMHNKKLKYYTGNYDQYVKTRLELEENQMKRFHWEQDQIAHMKNYIARFGHGSAKLARQAQSKEKTLQKMMASGLTERVVSDKTLSFYFPPCGKIPPPVIMVQNVSFKYTKDGPCIYNNLEFGIDLDTRVALVGPNGAGKSTLLKLLTGELLPTDGMIRKHSHVKIGRYHQHLQEQLDLDLSPLEYMMKCYPEIKEKEEMRKIIGRYGLTGKQQVSPIRNLSDGQKCRVCLAWLAWQNPHMLFLDEPTNHLDIETIDALADAINEFEGGMMLVSHDFRLIQQVAQEIWVCEKQTITKWPGDILAYKEHLKSKLVDEEPQLTKRTHNVCTLTLASLPRP

SEQ ID NO: 656 - DNA, 6406 bp, Homo sapien
caccaggtgaatggctaaagaatctggaataagcttgaaagaaatacaggtcctggcaaggcaatggaaagttggtcctgagaaaagggtgccagcgatgcctggatcgcctgtggaagtgaagatacagtccagatcctcacctcccaccatgccacccctcccaccaataaatcctggaggaccgaggccagtgtccttcactcctactgcattaagcaatggcatcaaccattctcctcctaccctgaatggtgccccatcaccgccacagagattcagcaatggtcctgcctcctccacatcatctgcactcacaaatcagcaattgccagccacttgtggtgctcgacaactcagcaagttgaaacgctttcttaccactctgcaacagtttggcaatgacatctcccctgagattggggagaaggtgcggactcttgttcttgcactggtgaactcaacagtgacaattgaggaattccactgtaagctccaagaagccacaaactttccccttcgtccttttgtgattccatttctcaaggccaacctgcccctgctgcagcgggaactgctgcactgcgctcgggcggccaagcagaccccatcccagtacctggctcagcacgaacaccttctgctcaacacaagcattgcatcgcctgctgactcgtcagagttgctcatggaggtgcacggaaatgggaagaggcccagtccagagaggagagaagagaatagttttgatagagacacaattgctcctgagcctcctgccaagagagtatgtaccatcagccctgctcctcggcacagtcctgctctcactgtgcccctcatgaatcccgggggccaattccatcctacccctccacctcttcagcattacaccttagaggatattgcaacttctcacctgtatcgggaacccaacaagatgctagagcatcgagaagttcgtgatagacaccacagtcttggtctaaatggaggctatcaagatgagttggtagatcatcgtttgacagaaagggaatgggctgatgaatggaaacatcttgaccatgcgctgaattgcattatggaaatggtagagaaaacaaggcgctctatggcagttctgcggcgctgtcaggaatcagatcgtgaagaactcaactactggaaaagacggtacaatgaaaacacagagctgaggaaaacggggaccgagttggtctccaggcagcacagccctgggagtgcagattctctcagcaatgattctcagagagagttcaacagcaggccaggtacaggatacgtacctgtggagttttggaaaaaaacagaagaagctgtgaataaggtgaaaattcaggccatgtcagaagtacagaaggccgtcgctgaggcagagcagaaagcctttgaagtgattgcaacagagagagcacgaatggagcaaaccatagcggatgtcaagcggcaggccgcagaggatgctttcctcgtcatcaatgagcaagaggagtccacggagaactgctggaactgtggccgcaaagccagcgagacatgcagtggctgcaatatcgcgcgatactgtggctctttctgccagcacaaggactgggagcggcaccaccgcctctgtggtcagaacctgcatggccagagcccccacggccagggccggccgctgcttcctgtaggcaggggctcctctgccaggtccgccgactgcagcgtgcccagcccagccctcgacaagacctcggcaaccacatcgcgttcctcaacacctgcttctgtgacagctatcgacaccaacggactctgagccccggactctgcttaccctgatggctgctcagcaccacagagtgcttgggctgagggactgactgttggaacccgtgcatgtagctgccgggtcatcagcaagaaatgaattggaggcaggaagagtccaagcctgaataataacaccccacagcctctctgtgcacttgctgtctgcggagccagtgtgccattctctgcacatgggcagccagcctgagctgcctcctccatggctttcctggtttgttcctctctccactgaagctgacttagccggccccttttcagtgtagaccaccagctcccctccccatctccttgagtcagcagactgtccaatgtgctcagccaggctggaggcggcaggcggcaggcagcaggctgtggaggaggcccctcggtcagggagcggcctgcctcacccctgaatagctccttcggccccatctccatcctcagcagatgacactgattggcctcacggggacttgggtaagcaacaggcggcattcaggactcttctcaaccctgctgttcagacttgataagatctcagagtccacaggaaagaagtcactgttgcaataaaagcacccgtagtagcaaaaacataaacaaataaaacttcccccacatcacagatgattttggacaagattttccaaccttgctggctactttagtttgggacctgttttttttctcatttgattttgcttgtgcagaaaatagtttccagcacatggattgatctgagagagaatgaggctcagttgtggatagtctgttttctctgagcatgttggccaactagtatcgtcaaattattgagtggatcatctcttggaaatgcagaacttctgccaccacttggctatttgcacagtcatcttgttctgtgtccttttatctctcagaccacacacatctggaacgctgtgggcatcttctgcccatgggctccatttggcacctgctgagccacagttgtcctgctggatgtgctgtgcaggttggtaggacttgcccccactgtcaaggcctggtctcatctgaaaagccctcctggacctcaaagaattcttcagacctcatagttacaggtcattatatctactatgttgatttatcatcaggcacacaacttctgtttccttctcttgtgttatctgatagcgtccctccttgagctcatcagaaaggttttatgaaatgtgaaccattttgggaaaagctgatcaatttttcttcctagcttcccattttcaaatgggacatcactcatatccctttcagaatgttaggaactgcctcccacattcttccctgtctttttgggttttgttttttgttgttgttgtggttttttaacacaaagcctgggcaacagagcaaaactctgtctcaaaaaaaaaaaaaaaaaggcaaaattaaagaatttcaagtccctaatttactctaaccaagcattttcagtcttacaaagaaatctagtgcacgacacctttaaaatgcctagatttccattgcctaaagtaaggtgtgaccagtgaaacaacagcagagaatcatgttcctttgctgtggaacacataagccccacagttttccagtcagcctaatacatgggtatcccccgaccccatctgcctccttaagccacagtccttggtggggaactctaagggggacggagtcagtaccccggacagggccacatttgcatgagacatggctgtctcacaggtcacagagccattacaacagcttactagtttttcatggatttgttggattaacaccttaagcaggttttttattgttattttgtttgtttgtttgttttgagacgggagtttctctcttgtctcccaggctggagtgcaatcgcgcaatctcggctcacggtaacctctgcctcccaggttcgggcgagtctcctgcctcagccttctgagtagctgggattgcaggcatgcgccaccacgcccaactgattttgtatttttagtggagacggggtttctccttgttggtcaggctggtctcaaaccccggacctcaggtgatccccccaccttggcctcccaaagtgccaggattacaggcatgagccactgtgtccggtcttgagcaggtttttaaaatctccagtggccataaaactagccagggtagctcatgcttttactggttggaataaggagccaaaaccaacaaaataatatttattagggttggatgcccatttctgtggttaaggcttaggtttggtgtgcagagcctggcctgctcttgtgggctgtggttgctgtgacagtttcgttttctgaatctttgtaatgctcttccaccctgctcgtgctgcccagaggctgatctgcaaacctgggcagtattccacactgaagctcagtttgcaaaccttctgctgtgttaattctggtcagtttcacacagaagtcacgagggcctctgcccaggaccttctattcacatttcaagaatccctttctgaaattctccaactctctggtcaggaggaggagcaccattggggcggggtaggcagctagaggcgcaggagcgaatccaggttccttgcgtggttcccagcctctgctgacagcacctcagctaccaggtggggagtggaaattcagcctgcttagaggactgacctctacagttcatatttgcagtgacataaaaggcaaagaggagctggcatggtggtacagaaggtatcagtcaagcgcaggctcttcagaaacctagaaactaaaaagagatgcaacatgtgactggccatcagccagacatgtctagggtgagaccagtgctcagcaccacccgccaaggaacactgatgagttgtgggacattatggtcggccaagtgaggaatgattgcagggaccagagaagaccaaagatgccagatgtccccagagtttcttgagggctgggtttcacgtctttgcttgtcctttttgtccccacttgcctgcaccgtgcctgactcatccagtggggaaggtgactcaagaagttgtttaagcctaggcctaggcagtccacttcgggaggtgggggcactccacactggggggccctgcagctccagggctggtgctctagcagatccgctcaggcacggttgggtgaccgtggggtcaccgattgcgtagattatttctagggcagtgctgggttagaaatgtctgtctggaaacaggacacatcttgccaccacaagtccacacctggccttggctgctgcccgctctctgcagcgtggatttcctttgcccatttgggccagaaggtcaccaggagttcatcactgcttagtgtcaacttgacatcttcagcttccagacagaaaacccatgctttactttgtacagccctgtcccagagttagtaagcctcggcttgtcacctgcttgcaaagggtatagacatcattctgggtagttctagaggatatcgcaacaagtgcgtttgaaggttcagcacagctggaattgtacggtagtgagctcttcaaaatgaaaacagaatgaccggatggccatctgtcctggaaactgtagaattgaataaatcactgaaaatagaacacttcttggaggctttcttcagaactgaactagaaacaaggtttccaggctcccaggtcagtagaccaaaccaacttccttagatttttttttttaagctgtttgcagaaaactgggtggtagcgtgtctgaaccaaacggaagaatagccagcggagcatggactgttccagcacgggccagatggccagctgtcgagagcagccctgcccagattgcggtgggggctgtgccagcggctccgcagggcccttccaactctggagtgtctgtagttcttgtgaaaccaaaacgttgactacctgcctctttcctcgggcatcgacgtgctcatttccaaagatgatggtgcaggtgaccttttccatcgtgagctaagagaaggttaggaggcctgaggggcgggccttgtgtcccctcctccccctccacagcccctgaggtggagcttccctcacagaccccatctggtcgagcctacggctgcccagtgtacactcagtgatgcttataccaaatagggcatgtgcgctggtgtctgttggggacagccccatccctaccttggagtcggcagagaagcagcaataagcattaggcgaatgattgaaagggctgctgcgccaagaggccttcagtccccttaacgtggctttccaacttcctgacgaggctacaaaggctccgctcacaaaagaaagccaataatgtaaataaatagaaaacgaagcctccacgcgtggtttttaaagggggatgatgaatgtgacaccacccacagaatgcattagaatctggtttttctgtgctttgtcattttactctgataggaatttttgttacctaactctgtgcataacttatttaatgtactgtataaatgaaccaaaactgttaaatatgtatttagtttgttctacttaaagtagtcaataaaaaggctatattcct

SEQ ID NO: 657 - protein, 604 aa, Homo sapien
MAKESGISLKEIQVLARQWKVGPEKRVPAMPGSPVEVKIQSRSSPPTMPPLPPINPGGPRPVSFTPTALSNGINHSPPTLNGAPSPPQRFSNGPASSTSSALTNQQLPATCGARQLSKLKRFLTTLQQFGNDISPEIGEKVRTLVLALVNSTVTIEEFHCKLQEATNFPLRPFVIPFLKANLPLLQRELLHCARAAKQTPSQYLAQHEHLLLNTSIASPADSSELLMEVHGNGKRPSPERREENSFDRDTIAPEPPAKRVCTISPAPRHSPALTVPLMNPGGQFHPTPPPLQHYTLEDIATSHLYREPNKMLEHREVRDRHHSLGLNGGYQDELVDHRLTEREWADEWKHLDHALNCIMEMVEKTRRSMAVLRRCQESDREELNYWKRRYNENTELRKTGTELVSRQHSPGSADSLSNDSQREFNSRPGTGYVPVEFWKKTEEAVNKVKIQAMSEVQKAVAEAEQKAFEVIATERARMEQTIADVKRQAAEDAFLVINEQEESTENCWNCGRKASETCSGCNIARYCGSFCQHKDWERHHRLCGQNLHGQSPHGQGRPLLPVGRGSSARSADCSVPSPALDKTSATTSRSSTPASVTAIDTNGL

SEQ ID NO: 658 - DNA, 1272 bp, Homo sapien
gaattcggccaaagaggcctatgcttctctgaagacttgcagcaaggcttgctgaggctcacagaagatagccccagtgttttggagtggttttgaatgtgattctgagatcagactgactgagctggaatcctggctttatatcttaccagctacacaaccttggagtcttagaaattttttcttttcaataagcagtcatccttactttccctcaagatgacaaacagttcgttcttctgcccagtttataaagatctggagccattcacgtattttttttatttagttttccttgttggaattattggaagttgttttgcaacctgggcttttatacagaagaatacgaatcacaggtgtgtgagcatctacttaattaatttgcttacagccgatttcctgcttactctggcattaccagtgaaaattgttgttgacttgggtgtggcaccttggaagctgaagatattccactgccaagtaacagcctgcctcatctatatcaatatgtatttatcaattatcttcttagcatttgtcagcattgaccgctgtcttcagctgacacacagctgcaagatctaccgaatacaagaacccggatttgccaaaatgatatcaaccgttgtgtggctaatggtccttcttataatggtgccaaatatgatgattcccatcaaagacatcaaggaaaagtcaaatgtgggttgtatggagtttaaaaaggaatttggaagaaattggcatttgctgacaaatttcatatgtgtagcaatatttttaaatttctcagccatcattttaatatccaattgccttgtaattcgacagctctacagaaacaaagataatgaaaattacccaaatgtgaaaaaggctctcatcaacatacttttagtgaccacgggctacatcatatgctttgttccttaccacattgtccgaatcccgtataccctcagccagacagaagtcataactgattgctcaaccaggatttcactcttcaaagccaaagaggctacactgctcctggctgtgtcgaacctgtgctttgatcctatcctgtactatcacctctcaaaagcattccgctcaaaggtcactgagacttttgcctcacctaaagagaccaaggctcagaaagaaaaattaagatgtgaaaataatgcataaaagacaggattttttgtgctaccaattctggccttactggaccataaagttaattatagctttgaaagataaaaaaaaaaaaaaagcggccgc

SEQ ID NO: 659 - protein, 319 aa, Homo sapien
MTNSSFFCPVYKDLEPFTYFFYLVFLVGIIGSCFATWAFIQKNTNHRCVSIYLINLLTADFLLTLALPVKIVVDLGVAPWKLKIFHCQVTACLIYINMYLSIIFLAFVSIDRCLQLTHSCKIYRIQEPGFAKMISTVVWLMVLLIMVPNMMIPIKDIKEKSNVGCMEFKKEFGRNWHLLTNFICVAIFLNFSAIILISNCLVIRQLYRNKDNENYPNVKKALINILLVTTGYIICFVPYHIVRIPYTLSQTEVITDCSTRISLFKAKEATLLLAVSNLCFDPILYYHLSKAFRSKVTETFASPKETKAQKEKLRCENNA

SEQ ID NO: 660 - DNA, 5360 bp, Homo sapien
ttgaggtgcattgaaatgttccaagctgttacttaccttaacatgttcttgaggtaccatggcatggattaaaaggaaatttggtaagtggcctccacttaaacgacttactagggaagctatgtgaaattatttaaaagggcgaggggatcaaatagtacttatccttcatgcaaaagttgtacagaagtcatatggaatgaaaaaggttttttgccctcccccttgtgtatatcttatgggcagtggatggaagaaaataaaattacaaatgaaatgcgatggttgttctgaacaaggctctcatccatgtgcatttattgggataggaaatagtgaccaagaaatgcagcagctaaacttggaaggaaagaactattgcacagccaaaacattgtacatatctgattcagacaagcaaaagcacttcatgttgtctgtaaaggtgttctatggcaacggtgatgacattggtgtgttcctcagcaagtcgtccaaaccttccaaaaagaagcagtcattgaaaaatgctgacttatgcattggctcaggaacaaaggtggctctgtttaatcgactacgatcccagacagttagtaccagatacttgcatgtagaaggagggaattttcatgccagttcacagcagtggggagcatttacattattcttggatgatgatggatcagaaggagaagaattcacagtcagagatggctacattcattatggacaaacagtcaagcttgtgtgctcagttactggcatggcactcccaagattgataattaggaaagttgataagcagaccacattattggatgcagatgatcctgtgtcacaactccataaatgtgcatttgaccttgaggatacagaaagaatgtacttatgcctttctcaagaaagaataattcaatttcaggccactccatgcccaacagaaccaaataaagagatgataaatgatggtgcttcctgggcaatcattagcacacataaggcgaagtatacattttatgagagaatgggccctgtccttgccctggtcatgcctatgcctgtcgtagagagccttaagttgaatggcggtggggacgaagcaatgcttgaacttacaggacagaatttcactccaaatttacgagtgtggtttggggatgtagaagctgaaactatgtacaggtgtggagagagtatgctccgtgttgtcccagacgttctgcattctgagaaggttggagatagttcccagcaaccagtccaggtttcagtaactttggtccgaaatgatggaatcatatattccaccagccttacctttacctacacaccagaagcagggccgcggccacattgcagtgtagcaggcgcaatccttaaggccagttcaagccacgtgccccctaatgaattaaacacaaacagcgatggaagttacacaaatgccagcacaaattcaaccagtgtcacatcatctacaccaacagtggtatcctgaactaccgtctttttgctaagactcaaacggcttgagtgcagcaaaaagttgacaaaaaaggaaaaaaaaatgaacagtcttttgtggtttattgggaaacttttcataccaggtgatactattctaaaaccccgttgtctccctgcaagtgctgatttgaaatgcagaagccacagtaaaaaaaaaaaaaaaaaaaaaaaaaaaagaaaaaaaaatcaaaatgtataaatattggaaatcaagtttttcagctgttttgttggttggttggttggtttttgtttggttttgtttaaagggacaagaagtaaataatgtggctggaatacaagttgaacaaactagaagacacaaatctaacatagtttttatggaccaaggaacttgtatattgtataagctttagtaaaaggtacattttcaccatacctttttttatatcacggtattatagtacaccttgttaccaataggttgttctcttccccaccctcctttgagctttgctctaaaatacattctggttccaagcctgaccatccttgtttaatctatcatactcttccaggtttttttttttggtctaaggctggaacttttttctttttttttcagctgaagtcttatgactttttcatgagtcaaaattgtttggatttcacgaagtcaaatcttgcaaaggcctgcatattttttttaagattatatgaagtctgtgcaaaaagctttaaaaaattgcctctgccttgcctgcatacatgcaatgtatgtaacttagtctctcttctcagacactgttgggtagttatttctgtgttttctttttttaaaaaaaaatatggacttattgtggtttatctgagaggttctaacattcacatgcaatttggtgtggcatttagctattatgagttattggcgcgaacttgtttgatatttgaagtgtctctccccttttcccatgacgtaatacataggtgtgttccaggatttgttcaggtttttccccccctcctaatcttgtacataacttgtattttgtgtaagttaaacattttatttgaacttggaatgttcccagtgatttcattcagcagggtattttctgccttgttggcaagtagcaaaaaatatgggaagtatttgctaccagttgttagatggtgccccttattggtagaatcaggaaaatgtccgcaaaagcatgttttattatctttacttttttggggggttggagggggtagcctagccagacatcatgtaatcttaaaacataagatgcttttattagatgatcaactaaaaatagctggaagacagtactttagaaacaaaatagttagtaagatatataatgcaaatgtaacttatgttttcatttttttctctgccttttttttttgttttttttctttttttccagtactgagcatctccacaaatgtctcctactcagaaaatgtttcttttctttcagttgagatttggtgcattcagggttgtaggttggccttgcttgctaacccgccggttttaccgtgctttattcctgaactttgtttatgcctttgtttggttcttctgaaattgcagcagactcattgggctacatttagtacaggaaccacgtgtgtaatgttatacaacacagtcagtaatacaatcatccctcttagagtaaaaactacctctagattgtgtaagctttttactgtccataaaacaggagccacagtaccttatgaatgcaaaactgtaacttcctacagtgtttccccacagaacattgtctttctggtgtctgggctgtttttgaaaaagtttccattaatagactttttagaaattattattagtagcattttttttccagctttgcgtcttcatcactcactcaagtgtcagactatgcactgtaaatatcttcctaacatctttaaatcgccttttcctcagttttcaaggggaaggtcatttgtaaagcacgttaggtggttaaatcagttattgcggttttctcttacagcaagcctttttaatcacccccaggctgcattttattctatatcgccttttttcttcaaatctgctccaatcatccacttctctcttataagctattcctgcctcacacctaaatctgtttcagtgatcaagggcagaactcattgtggccttatctttctttgttgtaattgttcactgtctctttcttacagaccacttattctgagtagtagttattcctccctatggagtcatggcaggaatcattacacagtgcttttgttcagagcatggacatgttccaggtgctgctttgctttaacggccacaagtttcctccacttctcaggtttggtatttagtaaggaatcaattaaattaaccaataacaaaagagatacttttgaagaacaaactattctttacccattttgtagctcaaaaataatttttcaagttcatgaccttattaaaatgaacttgtgtttttttaacaaacgtctattttattttgatagtttctttccgaagataattgaaatattatactgtaacccttttcttttcttttttgaaaagtccaagaatgtacttatacaggatttttccccacctatttttggccattctcataccacagacaaaagagtgaatgattgtcattgtagcttattgtttatcagtagttcttttgtagctgcttacattttttctttcatggtttgtgaatcatttcagtatgtaatttataggaaccttgtcctctggtatagtagactgtgtgccctcctccaggatggcattattagacatgctggtcatttaccctcagaaagactctcttatagaatggtgagtgcttcagttatagtatgtttgaattttaaaaaattcctgtttagaatgtatctatgctctcatgactatgcagtttctaacatacacatagaagctgagtctctgatccaatatgtttttatttgttccattaatttatcacatagattgggaaggcaagctaaaagccttaaaaatgccctttatattttgagtgatttcagcgttgaacacagtatactatctaaatttgctgctcactttcttaaactgttgcaattaaaggcatgtttatacatgactaatcgtgaaatgtttgtcactcttactgcacagacttatctgcaatcaaactggttagtttttttgttttgttttgttttattgtttttaatgaatctggtaccatctgtgctttcacaaaaaacttccaatgccatttttgagaactaacctaacagtcatgctaaccagaaaatccactggggaggaggttcctttgaaacaaaatgctgttcagttagtaaccaagttactttgattgcaaaagcagctgtgtttctgataagtactgaacaaatgtgtgtaattttctgtgccagacttatgactttgttttcaagcactgtaatgtgggatggatggttagaaacaataatatatagggtttctgttaaccctttcaggactcaactgtatctccttttgttaattttcccctgtgttgtgataaattgtttgccagcattcagtactgtgttggtgcagatgaggtttatatctcattttagcttatttcttgtacctttcagcatgcctacgcattcagtccttaaggggtttattttacaaactgtgcgcctgaagtttattagcaataagatagaaaatgagcaagtttataccataattttgagaaaaaaagaatctgctcagttccatatttcatccgtgaaaaacttgcaatacgagcagtttcaaggaataaataaaaaggaaatgaaaccattgt

SEQ ID NO: 661 - protein, 420 aa, Homo sapien
MGSGWKKIKLQMKCDGCSEQGSHPCAFIGIGNSDQEMQQLNLEGKNYCTAKTLYISDSDKQKHFMLSVKVFYGNGDDIGVFLSKSSKPSKKKQSLKNADLCIGSGTKVALFNRLRSQTVSTRYLHVEGGNFHASSQQWGAFTLFLDDDGSEGEEFTVRDGYIHYGQTVKLVCSVTGMALPRLIIRKVDKQTTLLDADDPVSQLHKCAFDLEDTERMYLCLSQERIIQFQATPCPTEPNKEMINDGASWAIISTHKAKYTFYERMGPVLALVMPMPVVESLKLNGGGDEAMLELTGQNFTPNLRVWFGDVEAETMYRCGESMLRVVPDVLHSEKVGDSSQQPVQVSVTLVRNDGIIYSTSLTFTYTPEAGPRPHCSVAGAILKASSSHVPPNELNTNSDGSYTNASTNSTSVTSSTPTVVS

SEQ ID NO: 662 - DNA, 723 bp, Homo sapien
gggcggcggtcggcagcaaggcggcggtgcgccgccgcagctgcagtgacatgtccagcatgaatcccgaatatgattatttattcaagttacttctgattggcgactcaggggttggaaagtcttgccttcttcttaggtttgcagatgatacatatacagaaagctacatcagcacaattggtgtggatttcaaaataagaactatagagttagacgggaaaacaatcaagcttcaaatatgggacacagcaggccaggaaagatttcgaacaatcacctccagttattacagaggagcccatggcatcatagttgtgtatgatgtgacagatcaggagtccttcaataatgttaaacagtggctgcaggaaatagatcgttatgccagtgaaaatgtcaacaaattgttggtagggaacaaatgtgatctgaccacaaagaaagtagtagactacacaacagcgaaggaatttgctgattcccttggaattccgtttttggaaaccagtgctaagaatgcaacgaacgtagaacagtctttcatgacgatggcagctgagattaaaaagcgaatgggtcccggagcaacagctggtggtgctgagaagtccaatgttaaaattcagagcactccagtcaagcagtcaggtggaggttgctgctaaatttgcctccatccttttctcacagcaatgaatttgcaatctgaacccaagtgaa

SEQ ID NO: 663 - protein, 205 aa, Homo sapien
MSSMNPEYDYLFKLLLIGDSGVGKSCLLLRFADDTYTESYISTIGVDFKIRTIELDGKTIKLQIWDTAGQERFRTITSSYYRGAHGIIVVYDVTDQESFNNVKQWLQEIDRYASENVNKLLVGNKCDLTTKKVVDYTTAKEFADSLGIPFLETSAKNATNVEQSFMTMAAEIKKRMGPGATAGGAEKSNVKIQSTPVKQSGGGCC

SEQ ID NO: 664 - DNA, 2867 bp, Homo sapien
tcccgtggagcagaggggcaaagtggcaggaacctcttaaagggcgagacgggcggcgaccgagaacgcggtcggcccggtccccgccgcacccagcccagagaagagtttagtgactgaggccgaaaattcacagcaccaacagaaggaagagggtgaggaagccataaactcaggccaacaagaacctcagcaggaggaatcttgtcaaacagcagctgaaggagataattggtgtgaacacaaggtgaaagcttctaatggagacactcctacacatgaagacttgaccaagaacaaggagcggacatcagaaagcagaggactttcacgactattctcctcgtttctcaaaaggcccaaatctcaggtgtccgaggaagaaggcaaagaagtagagtcagataaagaaaaaggtgaaggaggtcagaaagagatagaatttggaaccagtcttgatgaagagatcattttaaaggccccaattgcagctcctgaaccggaactcaaaacagacccatctttggatcttcattcattaagcagtgcagaaacacagcctcaccattacaattaagaattatttttagagtcttcttatttctgaagcatgtgaatattatctcgatcgttaaaagtcctgctcaggaagaactcagagaagatccagattctgaaattaaggaaggagaaggacttgaagagtgctccaaaatagaagtaaaagaagaaagccctcaatcaaaagcagaaacagaattaaaagcttcccaaaaaccaatcagaaaacacaggaacatgcactgcaaggtttctttgttggatgacacagtttatgaatgtgttgtggagaaacatgctaagggacaagatttgcttaaacgagtatgtgagcatctcaatcttttggaagaagactattttggtctagccatttgggataacgcaacctctaagacatggctggattccgccaaagaaataaaaaagcaggttcgtggtgtcccttggaattttacatttaatgtaaagttttatccacctgacccagcacagttaacagaagacataacaagatattatttatgtcttcagcttcggcaggacatagttgcaggacgtctgccctgttcctttgcaaccttagcattattaggttcttacaccatccagtctgaactgggagactacgacccagaactccatggcgtggattatgttagtgattttaaactggccccgaatcagaccaaggaacttgaagagaaggtcatggaactgcataagtcatacaggtccatgactccagctcaggctgacttggagtttcttgagaatgccaaaaagttgtctatgtatggagttgatcttcataaagcaaaggacttggaaggagtagatatcatcctaggtgtctgctctagtggccttctggtttacaaagataagctgagaattaaccgcttcccttggcccaaagtgctgaagatttcttataaacgtagtagctttttcatcaagattcggcctggagagcaagagcagtatgaaagtaccatcggattcaaacttcccagttaccgagcagctaagaaattatggaaagtctgtgtagaacatcacacgtttttcagattgacatctacagacaccattcccaaaagcaaatttcttgcgctaggatccaaatttcgatacagtggccggactcaagctcagaccaggcaagctagtgctctaattgacaggcctgccccacacttcgagcgtacagcaagtaaacgggcgtcccggagcctcgatggagcagcagctgtcgattcggcagaccgaagtcctcggcccacttctgcacctgccattactcagggtcaggttgcagaaggtggcgtcctagatgcctctgctaaaaaaacagtggtccctaaagcacagaaggaaacagtgaaggctgaagtgaaaaaggaagacgagccacctgagcaagctgagccagagcccacagaagcatggaagaaaaagagagaaagactagatggtgaaaacatttatatcagacatagcaatttaatgttggaggatttagacaagagtcaagaggagatcaaaaaacatcatgccagcatcagtgagctgaaaaagaacttcatggagtctgtaccagaaccacggcctagtgaatgggataaacgcttatccactcactcacccttccgaactcttaacatcaatgggcaaatccccacaggagaaggacctcccctggtgaagacacaaactgtcaccatctcagataatgccaatgctgtgaaaagtgaaatcccaaccaaagacgtccctattgtccacactgagaccaagaccatcacttatgaggctgcccagactgtaaaaggtgggatttcagagacacgtattgaaaagagaattgtgatcacaggagatgctgatattgaccatgatcaggtccttgtacaagccatcaaggaggcaaaggagcagcacccagacatgtcagtgaccaaggtggtcgtccaccaggagaccgagattgctgatgagtgagctcaggaactaacctaccccaactctgcccttctcccatccaagagaaaccacgaaaatgataaagaagctaacctgccatagtcagacttcagactttcaagattattctaaatcaccagaaaattaatttcagtttctattgggagtttataccaagagattcttctagatctcattgatccttttgaagagctttttctatattaggatatcagaattgttcaacttttcactctatagactgttttaagagttttggggggtttttaattgggtggtttgtaaccccttcagcctag

SEQ ID NO: 665 - protein, 588 aa, Homo sapien
MHCKVSLLDDTVYECVVEKHAKGQDLLKRVCEHLNLLEEDYFGLAIWDNATSKTWLDSAKEIKKQVRGVPWNFTFNVKFYPPDPAQLTEDITRYYLCLQLRQDIVAGRLPCSFATLALLGSYTIQSELGDYDPELHGVDYVSDFKLAPNQTKELEEKVMELHKSYRSMTPAQADLEFLENAKKLSMYGVDLHKAKDLEGVDIILGVCSSGLLVYKDKLRINRFPWPKVLKISYKRSSFFIKIRPGEQEQYESTIGFKLPSYRAAKKLWKVCVEHHTFFRLTSTDTIPKSKFLALGSKFRYSGRTQAQTRQASALIDRPAPHFERTASKRASRSLDGAAAVDSADRSPRPTSAPAITQGQVAEGGVLDASAKKTVVPKAQKETVKAEVKKEDEPPEQAEPEPTEAWKKKRERLDGENIYIRHSNLMLEDLDKSQEEIKKHHASISELKKNFMESVPEPRPSEWDKRLSTHSPFRTLNINGQIPTGEGPPLVKTQTVTISDNANAVKSEIPTKDVPIVHTETKTITYEAAQTVKGGISETRIEKRIVITGDADIDHDQVLVQAIKEAKEQHPDMSVTKVVVHQETEIADE

SEQ ID NO: 666 - DNA, 1271 bp, Homo sapien
ctgtattgtggttcctggaacactttagaggcttgtgattctactgcttcttattcacactataatacatgtctcaccaatagatgattcaagaacatcatttaaatacacaatttttcattctctatttttgctaaatttcttcatactcaactttcagattctttaatctccagctcagcttcaacaattcaacgctgttctttctgaaaaagtacacatcgtgccttctctacttcgctcttggaacataatttctcatggcagcttttactaaactgagtattgagccagcatttactccaggacccaacatagaactccagaaagactctgactgctgttcttgccaagaaaaatgggttgggtaccggtgcaactgttacttcatttccagtgaacagaaaacttggaacgaaagtcggcatctctgtgcttctcagaaatccagcctgcttcagcttcaaaacacagatgaactggattttatgagctccagtcaacaattttactggattggactctcttacagtgaggagcacaccgcctggttgtgggagaatggctctgcactctcccagtatctatttccatcatttgaaacttttaatacaaagaactgcatagcgtataatccaaatggaaatgctttagatgaatcctgtgaagataaaaatcgttatatctgtaagcaacagctcatttaaatgtttcttggggcagagaaggtggagagtaaagacccaacattactaacaatgatacagttgcatgttatattattactaattgtctacttctggagtctataaaatgtttttaaacagtgtcatatacaattgtcatgtatgtgaaacaatgtgttttaaaattgatgaaattcgttcacctacatttgagaattataaaattaacataaagaattttgtattttcatttaatgtatataatgttaaattcaatgtagttttattacacatttatgtaattttatttacattcttgctaattctcagcagaaatttaaataagatttaattcacatcaaataaaatttagaaaataaaatttaactcacactgcccaggctggagcatagtggcaagatcatagctcattgcaagctcaagtgatcctcctgactcagcctcccaagtagctaggactgcaggcaccatgtcactatgcccgactaatttttaatttttaattttttgtcaagacaaggtcttgctatgttgcccaggctggtcttgaactcctggcctcaa

SEQ ID NO: 667 - protein, 148 aa, Homo sapien
MAAFTKLSIEPAFTPGPNIELQKDSDCCSCQEKWVGYRCNCYFISSEQKTWNESRHLCASQKSSLLQLQNTDELDFMSSSQQFYWIGLSYSEEHTAWLWENGSALSQYLFPSFETFNTKNCIAYNPNGNALDESCEDKNRYICKQQLI

SEQ ID NO: 668 - DNA, 3213 bp, Homo sapien
gaccgaagcaagagctggttcaggtggcagccacagcagcctcagggacctcagcaactatggcctcctgcccagactctgataatagctgggtgcttgctggctccgagagcctgccagtggagacactgggcccggcatccaggatggacccagaatctgagagagccctgcaggcccctcacagcccctccaagacagatgggaaagaattagctgggaccatggatggagaagggacgctcttccagactgaaagccctcagtctggcagcattctaacagaggagactgaggtcaagggcaccctggaaggtgatgtttgtggtgtggagcctcctggcccaggagacacagtagtccagggagacctgcaggagaccaccgtggtgacaggcctgggaccagacacacaggacctggaaggccagagccctccacagagcctgccttcaacccccaaagcagcttggatcagggaggagggccgctgctccagcagtgacgatgacaccgacgtggacatggagggtctgcggagacggcggggccgggaggccggcccacctcagcccatggtgcccctggctgtggagaaccaggctgggggtgagggtgcaggcggggagctgggcatctccctcaacatgtgcctccttggggccctggttctgcttggcctgggggtcctcctcttctcaggtggcctctcagagtctgagactgggcccatggaggaagtggagcggcaggtcctcccagaccccgaggtgctggaagctgtgggggacaggcaggatgggctaagggaacagctgcaggccccagtgcctcctgacagtgtccccagcctgcaaaacatgggtcttctgctggacaagctggccaaggagaaccaggacatccggctgctgcaggcccagctgcaggcccaaaaggaagagcttcagagcctgatgcaccagcccaaagggctagaggaggagaatgcccagctccggggggctctgcagcagggcgaagccttccagcgggctctggagtcagagctgcagcagctgcgggcccggctccaggggctggaggccgactgtgtccggggcccagatggggtgtgcctcagtgggggtagaggcccacagggtgacaaggccatcagggagcaaggccccagggagcaggagccagaactcagcttcctgaagcagaaggaacagctggaggctgaggcacaggcattaaggcaagagttagagaggcagcgacggctgctggggtctgtacagcaggatctggagaggagcttgcaggatgccagccgcggggacccagctcatgctggcttggctgagctgggccacagattggcccagaaactgcagggcctggagaactggggccaggaccctggggtctctgccaatgcctcaaaggcctggcaccagaagtcccacttccagaattctagggagtggagtggaaaggaaaagtggtgggatgggcagagagaccggaaggctgagcactggaaacataagaaggaagaatctggccgggaaaggaagaagaactggggaggtcaggaggacagggagccagcaggaaggtggaaggagggcaggccaagggtggaggagtcggggagcaagaaggagggcaagcgacagggcccgaaggaacccccaaggaaaagtggtagcttccactcctctggagaaaagcagaagcaacctcggtggagggaagggactaaggacagccatgaccccctgccatcctgggcagagctgttgaggcccaagtaccgggcaccccagggctgctcaggtgtggacgagtgtgcccggcaggagggcctgactttctttggcacagagctagccccagtgcggcaacaggagctggcctctctgctaagaacatacttggcacggctgccctgggctgggcagctgaccaaggagctacccctctcacctgctttctttggtgaggatggcatcttccgtcatgaccgcctccgcttccgggattttgtggatgccctggaggacagcttggaggaggtggctgtgcaacagacaggtgatgatgatgaagtagatgactttgaggacttcatcttcagccacttctttggagacaaagcactgaagaagaggtcagggaagaaggacaagcactcacagagcccaagagctgcggggcccagggaggggcacagccatagccaccaccaccaccaccggggctgacaccctgccccacagggaatggccttggcctggcccagcccaagatcccagcgttatctaactcctggagggtggactctgtcctggcttgtttggtgtcctcagatatctttcacacagtagagcaaaatcaccagccctgcactgatgtcactttatgtagaaaaaggccttagctggacctgcgttgccgtctatgcaaatgcatgcaaatactccaggccctgggatgtgggcttgtgttttgtcactgtgaagggggagatgggagaggagcctgttttggggtggggtctggggaaggcaatctgattctgaagctaaagagctttcatcctcttgagtgtatgtccccatagtgggccccttgacccacatgctgaccggtgccttgggatttgactagagttgctggctcgaggcccagcacgaggacttaccctggggttttgttaggtttggaagcagctgtccctagggggtgaagtcccccccctttttttttttacccctgcttctcccacggcttcacctccctatgtgaactgtagactcagatcccaataaagtgctgttgcagctatgatgctaggtggtttctaagcacaggggacaccccacaccccctgcctgaatggatgggtccatcccaggcactggtacttgcccccttgttctgtatccccctttgcccttgccttgcccttccaacaaaccctaggcccttgagaagctgatacttctccttttgctcacagctgccttggccccacccctgggagatgtagcaaattgagtgtgggttttggagtctgagcctcaggctcaaatccaggccaagtgatcttgggcaagttaatctctgggaactttgggtttcttatcctcaaaaaaggcgatggaagggctggggaagtgattaaataaaagcaacgcaagaaaaaaaaaaaaaaaaaaa

SEQ ID NO: 669 - protein, 731 aa, Homo sapien
MASCPDSDNSWVLAGSESLPVETLGPASRMDPESERALQAPHSPSKTDGKELAGTMDGEGTLFQTESPQSGSILTEETEVKGTLEGDVCGVEPPGPGDTVVQGDLQETTVVTGLGPDTQDLEGQSPPQSLPSTPKAAWIREEGRCSSSDDDTDVDMEGLRRRRGREAGPPQPMVPLAVENQAGGEGAGGELGISLNMCLLGALVLLGLGVLLFSGGLSESETGPMEEVERQVLPDPEVLEAVGDRQDGLREQLQAPVPPDSVPSLQNMGLLLDKLAKENQDIRLLQAQLQAQKEELQSLMHQPKGLEEENAQLRGALQQGEAFQRALESELQQLRARLQGLEADCVRGPDGVCLSGGRGPQGDKAIREQGPREQEPELSFLKQKEQLEAEAQALRQELERQRRLLGSVQQDLERSLQDASRGDPAHAGLAELGHRLAQKLQGLENWGQDPGVSANASKAWHQKSHFQNSREWSGKEKWWDGQRDRKAEHWKHKKEESGRERKKNWGGQEDREPAGRWKEGRPRVEESGSKKEGKRQGPKEPPRKSGSFHSSGEKQKQPRWREGTKDSHDPLPSWAELLRPKYRAPQGCSGVDECARQEGLTFFGTELAPVRQQELASLLRTYLARLPWAGQLTKELPLSPAFFGEDGIFRHDRLRFRDFVDALEDSLEEVAVQQTGDDDEVDDFEDFIFSHFFGDKALKKRSGKKDKHSQSPRAAGPREGHSHSHHHHHRG

SEQ ID NO: 670 - DNA, 1283 bp, Homo sapien
aagccacccagcctatgcatccgctcctcaatcctctcctgttggcactgggcctcatggcgcttttgttgaccacggtcattgctctcacttgccttggcggctttgcctccccaggccctgtgcctccctctacagccctcagggagctcattgaggagctggtcaacatcacccagaaccagaaggctccgctctgcaatggcagcatggtatggagcatcaacctgacagctggcatgtactgtgcagccctggaatccctgatcaacgtgtcaggctgcagtgccatcgagaagacccagaggatgctgagcggattctgcccgcacaaggtctcagctgggcagttttccagcttgcatgtccgagacaccaaaatcgaggtggcccagtttgtaaaggacctgctcttacatttaaagaaactttttcgcgagggacggttcaactgaaacttcgaaagcatcattatttgcagagacaggacctgactattgaagttgcagattcatttttctttctgatgtcaaaaatgtcttgggtaggcgggaaggagggttagggaggggtaaaattccttagcttagacctcagcctgtgctgcccgtcttcagcctagccgacctcagccttccccttgcccagggctcagcctggtgggcctcctctgtccagggccctgagctcggtggacccagggatgacatgtccctacacccctcccctgccctagagcacactgtagcattacagtgggtgccccccttgccagacatgtggtgggacagggacccacttcacacacaggcaactgaggcagacagcagctcaggcacacttcttcttggtcttatttattattgtgtgttatttaaatgagtgtgtttgtcaccgttggggattggggaagactgtggctgctggcacttggagccaagggttcagagactcagggccccagcactaaagcagtggaccccaggagtccctggtaataagtactgtgtacagaattctgctacctcactggggtcctggggcctcggagcctcatccgaggcagggtcaggagaggggcagaacagccgctcctgtctgccagccagcagccagctctcagccaacgagtaatttattgtttttcctcgtatttaaatattaaatatgttagcaaagagttaatatatagaagggtaccttgaacactgggggaggggacattgaacaagttgtttcattgactatcaaactgaagccagaaataaagttggtgacagata

SEQ ID NO: 671 - protein, 132 aa, Homo sapien
MALLLTTVIALTCLGGFASPGPVPPSTALRELIEELVNITQNQKAPLCNGSMVWSINLTAGMYCAALESLINVSGCSAIEKTQRMLSGFCPHKVSAGQFSSLHVRDTKIEVAQFVKDLLLHLKKLFREGRFN

SEQ ID NO: 672 - DNA, 825 bp, Homo sapien
atcactctctttaatcactactcacattaacctcaactcctgccacaatgtacaggatgcaactcctgtcttgcattgcactaattcttgcacttgtcacaaacagtgcacctacttcaagttcgacaaagaaaacaaagaaaacacagctacaactggagcatttactgctggatttacagatgattttgaatggaattaataattacaagaatcccaaactcaccaggatgctcacatttaagttttacatgcccaagaaggccacagaactgaaacagcttcagtgtctagaagaagaactcaaacctctggaggaagtgctgaatttagctcaaagcaaaaactttcacttaagacccagggacttaatcagcaatatcaacgtaatagttctggaactaaagggatctgaaacaacattcatgtgtgaatatgcagatgagacagcaaccattgtagaatttctgaacagatggattaccttttgtcaaagcatcatctcaacactaacttgataattaagtgcttcccacttaaaacatatcaggccttctatttatttatttaaatatttaaattttatatttattgttgaatgtatggttgctacctattgtaactattattcttaatcttaaaactataaatatggatcttttatgattctttttgtaagccctaggggctctaaaatggtttaccttatttatcccaaaaatatttattattatgttgaatgttaaatatagtatctatgtagattggttagtaaaactatttaataaatttgataaatataaaaaaaaaaaacaaaaaaaaaaa

SEQ ID NO: 673 - protein, 156 aa, Homo sapien
MYRMQLLSCIALILALVTNSAPTSSSTKKTKKTQLQLEHLLLDLQMILNGINNYKNPKLTRMLTFKFYMPKKATELKQLQCLEEELKPLEEVLNLAQSKNFHLRPRDLISNINVIVLELKGSETTFMCEYADETATIVEFLNRWITFCQSIISTLT

SEQ ID NO: 674 - DNA, 673 bp, Homo sapien
gatccaaacatgagccgcctgcccgtcctgctcctgctccaactcctggtccgccccggactccaagctcccatgacccagacaacgtccttgaagacaagctgggttaactgctctaacatgatcgatgaaattataacacacttaaagcagccacctttgcctttgctggacttcaacaacctcaatggggaagaccaagacattctgatggaaaataaccttcgaaggccaaacctggaggcattcaacagggctgtcaagagtttacagaacgcatcagcaattgagagcattcttaaaaatctcctgccatgtctgcccctggccacggccgcacccacgcgacatccaatccatatcaaggacggtgactggaatgaattccggaggaaactgacgttctatctgaaaacccttgagaatgcgcaggctcaacagacgactttgagcctcgcgatcttttagtccaacgtccagctcgttctctgggccttctcaccacagcgcctcgggacatcaaaaacagcagaacttctgaaacctctgggtcatctctcacacattccaggaccagaagcatttcaccttttcctgcggcatcagatgaattgttaattatctaatttctgaaatgtgcagctcccatttggccttgtgcggttgtgttctc

SEQ ID NO: 675 - protein, 152 aa, Homo sapien
MSRLPVLLLLQLLVRPGLQAPMTQTTSLKTSWVNCSNMIDEIITHLKQPPLPLLDFNNLNGEDQDILMENNLRRPNLEAFNRAVKSLQNASAIESILKNLLPCLPLATAAPTRHPIHIKDGDWNEFRRKLTFYLKTLENAQAQQTTLSLAIF

SEQ ID NO: 676 - DNA, 1169 bp, Homo sapien
gaggttgaaggacccaggcgtgtcagccctgctccagagaccttgggcatggaggagagtgtcgtacggccctcagtgtttgtggtggatggacagaccgacatcccattcacgaggctgggacgaagccaccggagacagtcgtgcagtgtggcccgggtgggtctgggtctcttgctgttgctgatgggggctgggctggccgtccaaggctggttcctcctgcagctgcactggcgtctaggagagatggtcacccgcctgcctgacggacctgcaggctcctgggagcagctgatacaagagcgaaggtctcacgaggtcaacccagcagcgcatctcacaggggccaactccagcttgaccggcagcggggggccgctgttatgggagactcagctgggcctggccttcctgaggggcctcagctaccacgatggggcccttgtggtcaccaaagctggctactactacatctactccaaggtgcagctgggcggtgtgggctgcccgctgggcctggccagcaccatcacccacggcctctacaagcgcacaccccgctaccccgaggagctggagctgttggtcagccagcagtcaccctgcggacgggccaccagcagctcccgggtctggtgggacagcagcttcctgggtggtgtggtacacctggaggctggggaggaggtggtcgtccgtgtgctggatgaacgcctggttcgactgcgtgatggtacccggtcttacttcggggctttcatggtgtgaaggaaggagcgtggtgcattggacatgggtctgacacgtggagaactcagagggtgcctcaggggaaagaaaactcacgaagcagaggctgggcgtggtggctctcgcctgtaatcccagcactttgggaggccaaggcaggcggatcacctgaggtcaggagttcgagaccagcctggctaacatggcaaaaccccatctctactaaaaatacaaaaattagccggacgtggtggtgcctgcctgtaatccagctactcaggaggctgaggcaggataattttgcttaaacccgggaggcggaggttgcagtgagccgagatcacaccactgcactccaacctgggaaacgcagtgagactgtgcctcaaaaaaaaaaaaaaaaaaaaaaaaaaaaa

SEQ ID NO: 677 - protein, 240 aa, Homo sapien
MEESVVRPSVFVVDGQTDIPFTRLGRSHRRQSCSVARVGLGLLLLLMGAGLAVQGWFLLQLHWRLGEMVTRLPDGPAGSWEQLIQERRSHEVNPAAHLTGANSSLTGSGGPLLWETQLGLAFLRGLSYHDGALVVTKAGYYYIYSKVQLGGVGCPLGLASTITHGLYKRTPRYPEELELLVSQQSPCGRATSSSRVWWDSSFLGGVVHLEAGEEVVVRVLDERLVRLRDGTRSYFGAFMV

SEQ ID NO: 678 - DNA, 3909 bp, Homo sapien
ggcacgaggctcgccgcggactcaagatggcggcgtgtggacgtgtacggaggatgttccgcttgtcggcggcgctgcatctgctgctgctattcgcggccgggggcagaaactccccggccagggcgtcccacagccagggccagggtcccggggccaactttgtgtccttcgtagggcaggccggaggcggcggcccggcgggtcagcagctgccccagctgcctcagtcatcgcagcttcagcagcaacagcagcagcagcaacagcaacagcagcctcagccgccgcagccgcctttcccggcgggtgggcctccgcggcggggaggagcgggggctggtgggggctggaagctggcggaggaagagtcctgcagggaggacgtgacccgcgtgtgccctaagcacacctggagcaacaacctggcggtgctcgagtgcctgcaggatgtgagggagcctgaaaatgaaatttcttcagactgcaatcatttgttgtggaattataagctgaacctaactacagatcccaaatttgaatctgtggccagagaggtttgcaaatctactataacagagattaaagaatgtgctgatgaaccggttggaaaaggttacatggtttcctgcttagtggatcaccgaggcaacatcactgagtatcagtgtcaccagtacattaccaagatgacggccatcatttttagtgattaccgtttaatctgtggcttcatggatgactgcaaaaatgacatcaacattctgaaatgtggcagtattcggcttggagaaaaggatgcacattcacaaggtgaggtggtatcatgcttggagaaaggcctggtgaaagaagcagaagaaagagaacccaagattcaagtttctgaactctgcaagaaagccattctccgggtggctgagctgtcatcggatgactttcacttagaccggcatttatattttgcttgccgagatgatcgggagcgtttttgtgaaaatacacaagctggtgagggcagagtgtataagtgcctctttaaccataaatttgaagaatccatgagtgaaaagtgtcgagaagcacttacaacccgccaaaagctgattgcccaggattataaagtcagttattcattggccaaatcctgtaaaagtgacttgaagaaataccggtgcaatgtggaaaaccttccgcgatcgcgtgaagccaggctctcctacttgttaatgtgcctggagtcagctgtacacagagggcgacaagtcagcagtgagtgccagggggagatgctggattaccgacgcatgttgatggaagacttttctctgagccctgagatcatcctaagctgtcggggggagattgaacaccattgttccggattacatcgaaaaggacggaccctacactgtctgatgaaggtagttcgaggggagaaggggaaccttggaatgaactgccagcaggcgcttcaaacactgattcaggagactgaccctggtgcagattaccgcattgatcgagctttgaatgaagcttgtgaatctgtaatccagacagcctgcaaacatataagatctggagacccaatgatctcgtcgtgcctgatggaacatttatacacagagaagatggtagaagactgtgaacaccgtctcttagagctgcagtatttcatctcccgggattggaagctggaccctgtcctgtaccgcaagtgccagggagacgcttctcgtctttgccacacccacggttggaatgagaccagtgaatttatgcctcagggagctgtgttctcttgtttatacagacacgcctaccgcactgaagaacagggaaggaggctctcacgggagtgccgagctgaagtccaaaggatcctacaccagcgtgccatggatgtcaagctggatcctgccctccaggataagtgcctgattgatctgggaaaatggtgcagtgagaaaacagagactggacaggagctggagtgccttcaggaccatctggatgacttggtggtggagtgtagagatatagttggcaacctcactgagttagaatcagaggatatccaaatagaagccttgctgatgagagcctgtgagcccataattcagacattctgccacgatgcggataaccagatagactctggggacctgatggagtgtctgatacagaacaaacaccagaaggacatgaacgagaagtgtgccatcggagttacccacttccagctggtgcagatgaaggattttcggttttcttacaagtttaaaatggcctgcaaggaggacgtgttgaagctttgcccaaacataaaaaagaaggtggacgtggtgatctgcctgagcacgaccgtgcgcaatgacactctgcaggaagccaaggagcacagggtgtccctgaagtgccgcaggcagctccgtgtggaggagctggagatgacggaggacatccgcttggagccagatctatacgaagcctgcaagagtgacatcaaaaacttctgttccgctgtgcaatatggcaacgctcagattatcgaatgtctgaaagaaaacaagaagcagctaagcacccgctgccaccaaaaagtatttaagctgcaggagacagagatgatggacccagagctagactacaccctcatgagggtctgcaagcagatgataaagaggttctgtccggaagcagattctaaaaccatgttgcagtgcttgaagcaaaataaaaacagtgaattgatggatcccaaatgcaaacagatgataaccaagcgccagatcacccagaacacagattaccgcttaaaccccatgttaagaaaagcctgtaaagctgacattcctaaattctgtcacggtatcctgactaaggccaaggatgattcagaattagaaggacaagtcatctcttgcctgaagctgagatatgctgaccagcgcctgtcttcagactgtgaagaccagatccgaatcattatccaggagtccgccctggactaccgcctggatcctcagctccagctgcactgctcagacgagatctccagtctatgtgctgaagaagcagcagcccaagagcagacaggtcaggtggaggagtgcctcaaggtcaacctgctcaagatcaaaacagaattgtgtaaaaaggaagtgctaaacatgctgaaggaaagcaaagcagacatctttgttgacccggtacttcatactgcttgtgccctggacattaaacaccactgcgcagcactcacccctggccgcgggcgtcaaatgtcctgtctcatggaagcactggaggataagcgggtgaggttacagcccgagtgcaaaaagcgcctcaatgaccggattgagatgtggagttacgcagcaaaggtggccccagcagatggcttctctgatcttgccatgcaagtaatgacgtctccatctaagaactacattctctctgtgatcagtgggagcatctgtatattgttcctgattggcctgatgtgtggacggatcaccaagcgagtgacacgagagctcaaggacaggtagagccaccttgaccaccaaaggaactacctatccagtgcccagtttgtacagccctcttgtatagcatccccactcacctcgctcttctcagaagtgacaccaaccccgtgttagagcattagcagatgtccactgcgttgtcccatccagcctccactcgtgtccatggtgtcctcctcctcctcaccgtgcagcagcagcagctggtcgctggggttactgcctttgtttggcaaacttgggtttacctgcctgtagacaagtctctctcataccaacagaacttccggtacttccagaaccaactcacctgacctgcaactcaaaggcttttttaagaaaaccacca

SEQ ID NO: 679 - protein, 1177 aa, Homo sapien
MAACGRVRRMFRLSAALHLLLLFAAGGRNSPARASHSQGQGPGANFVSFVGQAGGGGPAGQQLPQLPQSSQLQQQQQQQQQQQQPQPPQPPFPAGGPPRRGGAGAGGGWKLAEEESCREDVTRVCPKHTWSNNLAVLECLQDVREPENEISSDCNHLLWNYKLNLTTDPKFESVAREVCKSTITEIKECADEPVGKGYMVSCLVDHRGNITEYQCHQYITKMTAIIFSDYRLICGFMDDCKNDINILKCGSIRLGEKDAHSQGEVVSCLEKGLVKEAEEREPKIQVSELCKKAILRVAELSSDDFHLDRHLYFACRDDRERFCENTQAGEGRVYKCLFNHKFEESMSEKCREALTTRQKLIAQDYKVSYSLAKSCKSDLKKYRCNVENLPRSREARLSYLLMCLESAVHRGRQVSSECQGEMLDYRRMLMEDFSLSPEIILSCRGEIEHHCSGLHRKGRTLHCLMKVVRGEKGNLGMNCQQALQTLIQETDPGADYRIDRALNEACESVIQTACKHIRSGDPMISSCLMEHLYTEKMVEDCEHRLLELQYFISRDWKLDPVLYRKCQGDASRLCHTHGWNETSEFMPQGAVFSCLYRHAYRTEEQGRRLSRECRAEVQRILHQRAMDVKLDPALQDKCLIDLGKWCSEKTETGQELECLQDHLDDLVVECRDIVGNLTELESEDIQIEALLMRACEPIIQTFCHDADNQIDSGDLMECLIQNKHQKDMNEKCAIGVTHFQLVQMKDFRFSYKFKMACKEDVLKLCPNIKKKVDVVICLSTTVRNDTLQEAKEHRVSLKCRRQLRVEELEMTEDIRLEPDLYEACKSDIKNFCSAVQYGNAQIIECLKENKKQLSTRCHQKVFKLQETEMMDPELDYTLMRVCKQMIKRFCPEADSKTMLQCLKQNKNSELMDPKCKQMITKRQITQNTDYRLNPMLRKACKADIPKFCHGILTKAKDDSELEGQVISCLKLRYADQRLSSDCEDQIRIIIQESALDYRLDPQLQLHCSDEISSLCAEEAAAQEQTGQVEECLKVNLLKIKTELCKKEVLNMLKESKADIFVDPVLHTACALDIKHHCAALTPGRGRQMSCLMEALEDKRVRLQPECKKRLNDRIEMWSYAAKVAPADGFSDLAMQVMTSPSKNYILSVISGSICILFLIGLMCGRITKRVTRELKDR

SEQ ID NO: 680 - DNA, 2195 bp, Homo sapien
tcggggccagcgcatggggctgctgagaccgctccggacgtgcgaagcgttcgcggtgcggtaggaagctgaagtcttcagcagaaccctgacctaggtagggagtctcaatggccctgggtgaagaaaaggcagaagcggaagcatctgaagacacaaaggcccagtcctatgggagagggagctgcagggagcgggagctggacatcccagggcccatgagtggggagcagcccccacgcctggaagctgagggagggctcatctcccctgtatggggggcagaagggatacctgcccctacttgctggattgggactgaccctggcagcccctctagagcccaccagccacaggccagtgatgccaacagagagcccgtagctgagaggtctgagcctgcactcagtggcctgcctcctgccaccatggggtctggagaccttctgctctccggggaaagccaggtggagaagaccaagctttcttcctccgaggagttccctcagactctgagccttcccagaacaacaactatttgctcaggacatgatgctgataccgaagatgatccatccctagcagatttgccccaggcactggacctcagccagcagcctcacagctcaggtctctcttgcctgtcacagtggaagtccgtgctgagcccaggttccgcagctcagccttccagctgcagcatctctgcttcctccacgggcagcagtctccagggtcaccaggagagggcggagcctcgtggtggttctctggccaaggtctcctcctccctggagccggtcgtcccccaggaaccttcctctgtggtggggctaggacctcggccccagtggtcaccacagcctgtgttctctgggggtgatgcttctgggctaggcaggagacgcctctccttccaggctgagtactgggcctgtgtgctgccagattccctgcctccatcacccgaccgccactcccctctctggaacccaaataaagagtatgaagatctgcttgactatacttacccactgaggcccgggcctcagctcccaaagcaccttgatagccgtgtgccagctgaccctgtcctgcaggactccggggtagacctggatagcttctctgtctctccagcaagcaccctcaaatcacctactaatgtctcccccaactgcccaccagcagaggccactgccctgccattttctgggcccagagagccaagccttaagcagtggccctccagagtaccccagaaacagggtggcatgggcttggcatcttggagccaacttgcatctacccccagagccccaggcagtagggatgctcgttgggagcgcagagagccagccctgaggggtgcgaaggaccggctgactataggcaagcaccttgatatgggctctccccagctaaggacacgggacagagggtggccctcgcccaggccagagagggagaagaggaccagccagagtgcccggcgccctacctgcacagagtctaggtggaaatcagaagaggaagtggaaagtgatgacgagtatcttgccctccccgctcggctgacacagacattttgctgtcagctggaagagctgatctgctggctgtataatgttgcagatgttactgaccacgggactgcagccaggtccaatcttacaagtctcaagtcttctctgcagctttaccggcaatttaagaaagatatagatgaacatcagtctctgacggagagtgtcttacagaagggggagattcttcttcagtgcctgttggagaacaccccagttttagaggatgtccttgggaggatcgcaaagcagtctggtgagctggagagccacgcagatcgcctgtatgactctatcttggcctctctggacatgctggctggctgcacccttatccctgacaaaaagcccatggcggcaatggagcacccatgtgaaggggtttaacctggcatcttctcaggcagaggtgcaacctgtcggccaaacactggctagtgagaaaaaaaaccttcaagaagtccttgcaagagccattcaacactgaagtcaagggggaaaccttcaatatactagctttaaaatgcctttctcctccctgaatggagggctgagttactatttttatttacaatgaatccttccaaactaaaaaaaaaaaaaaaaaaa

SEQ ID NO: 681 - protein, 620 aa, Homo sapien
MALGEEKAEAEASEDTKAQSYGRGSCRERELDIPGPMSGEQPPRLEAEGGLISPVWGAEGIPAPTCWIGTDPGSPSRAHQPQASDANREPVAERSEPALSGLPPATMGSGDLLLSGESQVEKTKLSSSEEFPQTLSLPRTTTICSGHDADTEDDPSLADLPQALDLSQQPHSSGLSCLSQWKSVLSPGSAAQPSSCSISASSTGSSLQGHQERAEPRGGSLAKVSSSLEPVVPQEPSSVVGLGPRPQWSPQPVFSGGDASGLGRRRLSFQAEYWACVLPDSLPPSPDRHSPLWNPNKEYEDLLDYTYPLRPGPQLPKHLDSRVPADPVLQDSGVDLDSFSVSPASTLKSPTNVSPNCPPAEATALPFSGPREPSLKQWPSRVPQKQGGMGLASWSQLASTPRAPGSRDARWERREPALRGAKDRLTIGKHLDMGSPQLRTRDRGWPSPRPEREKRTSQSARRPTCTESRWKSEEEVESDDEYLALPARLTQTFCCQLEELICWLYNVADVTDHGTAARSNLTSLKSSLQLYRQFKKDIDEHQSLTESVLQKGEILLQCLLENTPVLEDVLGRIAKQSGELESHADRLYDSILASLDMLAGCTLIPDKKPMAAMEHPCEGV

SEQ ID NO: 682 - DNA, 1903 bp, Homo sapien
gggcaacggaggggaaataaaagggaacggctccgaatctgccccagcggccgctgcgagacctcggcgccgacatcgcgacagcgaagcgctttgcacgccaggaaggtcccctctatgtgctgctgagccggtcctggacgcgacgagcccgccctcggtcttcggagcagaattcgcaaaaacggaaggactggaaatggcagaccatatgatggcaatgaaccacgggcgcttccccgacggcaccaatgggctgcaccatcaccctgcccaccgcatgggcatggggcagttcccgagcccccatcaccaccagcagcagcagccccagcacgccttcaacgccctaatgggcgagcacatacactacggcgcgggcaacatgaatgccacgagcggcatcaggcatgcgatggggccggggactgtgaacggagggcaccccccgagcgcgctggcccccgcggccaggtttaacaactcccagttcatgggtcccccggtggccagccagggaggctccctgccggccagcatgcagctgcagaagctcaacaaccagtatttcaaccatcacccctacccccacaaccactacatgccggatttgcaccctgctgcaggccaccagatgaacgggacaaaccagcacttccgagattgcaaccccaagcacagcggcggcagcagcacccccggcggctcgggcggcagcagcacccccggcggctctggcagcagctcgggcggcggcgcgggcagcagcaacagcggcggcggcagcggcagcggcaacatgcccgcctccgtggcccacgtccccgctgcaatgctgccgcccaatgtcatagacactgatttcatcgacgaggaagttcttatgtccttggtgatagaaatgggtttggaccgcatcaaggagctgcccgaactctggctggggcaaaacgagtttgattttatgacggacttcgtgtgcaaacagcagcccagcagagtgagctgttgactcgatcgaaaccccggcgaaagaaatcaaacccccaacttcttcggcgtgaattaaaagaaacattcccttagacacagtatctcacttttcagatcttgaaaggtttgagaacttggaaacaaagtaaactataaacttgtacaaattggttttaaaaaaaattgctgccactttttttcctgtttttgtttcgtttttgtagccttgacattcacccacctcccttatgtagttgaaatatctagctaacttggtctttttcgttgtttgtttttactcctttccctcactttctccagtgctcaactgttagatattaatcttggcaaactgcttaatcttgtggattttgtagatggtttcaaatgactgaactgcattcagatttacgagtgaaaggaaaaattgcattagttggttgcatgaacttcgaagggcagatattactgcacaaactgccatctcgcttcatttttttaactatgcatttgagtacagactaatttttaaaatatgctaaactggaagattaaacagatgtgggccaaactgttctggatcaggaaagtcatactgttcactttcaagttggctgtcccccccgccgccccccccacccccatatgtacagatgataatagggtgtggaatgtcgtcagtggcaaacatttcacagatttttattttgtttctgtcttcaacatttttgacactgtgctaatagttatattcagtacatgaaaagatactactgtgttgaaagctttttaggaaattttgacagtatttttgtacaaaacatttttttgaaaaaatacttgttaatttattctattttaatttgccaatgtcaataaaaagttaagaaaaaaaaaaaaaaaaaaaaaa

SEQ ID NO: 683 - protein, 270 aa, Homo sapien
MADHMMAMNHGRFPDGTNGLHHHPAHRMGMGQFPSPHHHQQQQPQHAFNALMGEHIHYGAGNMNATSGIRHAMGPGTVNGGHPPSALAPAARFNNSQFMGPPVASQGGSLPASMQLQKLNNQYFNHHPYPHNHYMPDLHPAAGHQMNGTNQHFRDCNPKHSGGSSTPGGSGGSSTPGGSGSSSGGGAGSSNSGGGSGSGNMPASVAHVPAAMLPPNVIDTDFIDEEVLMSLVIEMGLDRIKELPELWLGQNEFDFMTDFVCKQQPSRVSC

SEQ ID NO: 684 - DNA, 2186 bp, Homo sapien
acacggaccaaggagtctaacacgtgcgcgagtcgggggctcgcacgaaagccgccgtggcgcaatgaaggtgaaggccggcgcgctcgccggccgaggtgggatcccgaggcctctccagtccgccgagggcgcaccaccggcccgtctcgcccgccgcgccggggaggtggagcacgagcgcacgtgttaggacccgaaagatggtgaactatgcctgggcagggcgaagccagaggaaactctggtggaggtccgtagcggtcctgacgtgcaaatcggtcgtccgacctgggtataggggcgggctccaggcgaggcggtcgacgctcctgaaaacttgcgcgcgcgctcgcgccactgcgcccggagcgatgaagatggtcgcgccctggacgcggttctactccaacagctgctgcttgtgctgccatgtccgcaccggcaccatcctgctcggcgtctggtatctgatcatcaatgctgtggtactgttgattttattgagtgccctggctgatccggatcagtataacttttcaagttctgaactgggaggtgactttgagttcatggatgatgccaacatgtgcattgccattgcgatttctcttctcatgatcctgatatgtgctatggctacttacggagcgtacaagcaacgcgcagcctggatcatcccattcttctgttaccagatctttgactttgccctgaacatgttggttgcaatcactgtgcttatttatccaaactccattcaggaatacatacggcaactgcctcctaattttccctacagagatgatgtcatgtcagtgaatcctacctgtttggtccttattattcttctgtttattagcattatcttgacttttaagggttacttgattagctgtgtttggaactgctaccgatacatcaatggtaggaactcctctgatgtcctggtttatgttaccagcaatgacactacggtgctgctacccccgtatgatgatgccactgtgaatggtgctgccaaggagccaccgccaccttacgtgtctgcctaagccttcaagtgggcggagctgagggcagcagcttgactttgcagacatctgagcaatagttctgttatttcacttttgccatgagcctctctgagcttgtttgttgctgaaatgctactttttaaaatttagatgttagattgaaaactgtagttttcaacatatgctttgctagaacactgtgatagattaactgtagaattcttcctgtacgattggggatataatgggcttcactaaccttccctaggcattgaaacttcccccaaatctgatggacctagaagtctgcttttgtacctgctgggccccaaagttgggcatttttctctctgttccctctcttttgaaaatgtaaaataaaaccaaaaatagacaactttttcttcagccattccagcatagagaacaaaaccttatggaaacaggaatgtcaattgtgtaatcattgttctaattaggtaaatagaagtccttatgtatgtgttacaagaatttcccccacaacatcctttatgactgaagttcaatgacagtttgtgtttgggtggtaaaggattttctccatggcctgaattaagaccattagaaagcaccaggccgtgggagcagtgaccatctgctgactgttcttgtggatcttgtgtccagggacatggggtgacatgcctcgtatgtgttagagggtggaatggatgtgtttggcgctgcatgggatctggtgcccctcttctcctggattcacatccccacccagggcccgcttttactaagtgttctgccctagattggttcaaggaggtcatccaactgactttatcaagtggaattgggatatatttgatatacttctgcctaacaacatggaaaagggttttcttttccctgcaagctacatcctactgctttgaacttccaagtatgtctagtcaccttttaaaatgtaaacattttcagaaaaatgaggattgccttccttgtatgcgctttttaccttgactacctgaattgcaagggatttttatatattcatatgttacaaagtcagcaactctcctgttggttcattattgaatgtgctgtaaattaagttgtttgcaattaaaacaaggtttgcccacaaaaaaaaaa

SEQ ID NO: 685 - protein, 283 aa, Homo sapien
MVNYAWAGRSQRKLWWRSVAVLTCKSVVRPGYRGGLQARRSTLLKTCARARATAPGAMKMVAPWTRFYSNSCCLCCHVRTGTILLGVWYLIINAVVLLILLSALADPDQYNFSSSELGGDFEFMDDANMCIAIAISLLMILICAMATYGAYKQRAAWIIPFFCYQIFDFALNMLVAITVLIYPNSIQEYIRQLPPNFPYRDDVMSVNPTCLVLIILLFISIILTFKGYLISCVWNCYRYINGRNSSDVLVYVTSNDTTVLLPPYDDATVNGAAKEPPPPYVSA

SEQ ID NO: 686 - DNA, 972 bp, Homo sapien
  Unsure 603: Unknown base
tccacggtggcatccatgatgcatcgtcaggagactgtggagtgtttgcgcaagttcaatgcccggagaaaactgaagggtgccatcctcacgaccatgcttgtctccaggaacttctcagctgccaaaaacctattgaacaagaagtcggatggcggtgtcaagccaagaaacaactacaagctatagaatttaacaaagctttacttgctatgtacacaaaccaggctgaacaatgccgcaaaatatctgccagtttacagtcccaaagtcccgagcatctcttacctgtgttaatccaagctgcccagctctgccgtgaaaagcagcacacaaaagcaatagagctgcttcaggaattttcagatcagcatccagaaaatgcagctgaaattaagctgaccatggcacagttgaaaatttctcaaggtaatatttctaaagcatgtttaatattgagaagcatagaggagttaaagcataaaccaggcatggtatctgcattagttaccatgtatagccatgaagaagatattgatagtgccattgaggtcttcacacaagctatccagtggtatcaaaaccatcagccaaaatctcctnctcatttgtccttgataagagaagctgcaaacttcaaactcaaatatgggcggaagaaggaggcaattagtgacctacaacagctgtggaaacaaaatccaaaagatattcacaccctggcacagcttatttctgcttactcacttgtagatccagagaaagccaaagctcttagtaaacacttgccatcgtcagatagtatgtcactaaaagtagatgttgaggctcttgaaaattctgctggtgctacatacattcggaagaagggtggaaaagttactggagatagtcaaccaaaggaacaaggacagggagatttgaaaaagtagcaaaaaaaaaaaaaaaaaaacttaaagctatcgattctgg

SEQ ID NO: 687 - protein, 239 aa, Homo sapien
  unsure 131: unknown amino acid
MYTNQAEQCRKISASLQSQSPEHLLPVLIQAAQLCREKQHTKAIELLQEFSDQHPENAAEIKLTMAQLKISQGNISKACLILRSIEELKHKPGMVSALVTMYSHEEDIDSAIEVFTQAIQWYQNHQPKSPXHLSLIREAANFKLKYGRKKEAISDLQQLWKQNPKDIHTLAQLISAYSLVDPEKAKALSKHLPSSDSMSLKVDVEALENSAGATYIRKKGGKVTGDSQPKEQGQGDLKK

SEQ ID NO: 688 - DNA, 1328 bp, Homo sapien
gtcccaactcttggactccatttgctattctcttctttctcccccacacctatctggtggtggtagtgggcgtttatatttgcgttccttttcattcatttctaaatctcttaaaaattttgggttgggggtattggggaaggcaggaaagggaaaaggagagtagtagctgaagagcaagaggaggacatggagatgaagaagaagattaacctggagttaaggaacagatccccggaggaggtgacagagttagtccttgataattgcctgtgtgtcaatggggaaattgaaggcctgaatgatactttcaaagaactagaatttctgagtatggctaatgtggaactaagttcgctggcccggcttcccagcttaaataaacttcgaaaattggagcttagtgataatataatttctggaggcttggaagtcctggcagagaaatgtccaaatcttacctacctcaatctgagtggaaacaaaataaaagatctcagtacagtagaagctctgcaaaatcttaaaaatttgaaaagtcttgacctgtttaactgtgagatcacaaacctggaagattatagagaaagtatttttgaactactgcagcaaatcacatacttagatggatttgatcaggaggataatgaagcgccggactctgaagaggaggatgatgaggatggagatgaagatgatgaagaggaagaggaaaatgaagctggtccaccggaaggatatgaggaagaggaggaggaagaggaagaggaggatgaggatgaggatgaagatgaagatgaagcaggttcagagttgggagagggagaagaggaagtgggcctctcatacttaatgaaagaagaaattcaggatgaagaagatgatgatgactatgttgaagaaggggaagaagaggaagaagaggaagaaggaggtcttcgaggggagaagaggaaacgagatgctgaagacgatggagaggaagaagatgactagatcattctaagaccagattctctaatgtttctgggtgtgcaatagagtgatcacatctttgtttcttcatgtacgatagctatccctacagaagataatgtgtaactttttataggaaaagtgtggttttactatttttgccttatcattccaaataagaactagtctgttaatgatcatattgtatgtagagaaaaattttcattgactcccattgtggaattccctagcaatttatttagacttaattttttaaattcaagcttactgtattagtcatttttagcccataattaaaacatgatcacttttaaaaaaaaaaaaaaaaaaaa

SEQ ID NO: 689 - protein, 268 aa, Homo sapien
MEMKKKINLELRNRSPEEVTELVLDNCLCVNGEIEGLNDTFKELEFLSMANVELSSLARLPSLNKLRKLELSDNIISGGLEVLAEKCPNLTYLNLSGNKIKDLSTVEALQNLKNLKSLDLFNCEITNLEDYRESIFELLQQITYLDGFDQEDNEAPDSEEEDDEDGDEDDEEEEENEAGPPEGYEEEEEEEEEEDEDEDEDEDEAGSELGEGEEEVGLSYLMKEEIQDEEDDDDYVEEGEEEEEEEEGGLRGEKRKRDAEDDGEEEDD

SEQ ID NO: 690 - DNA, 5153 bp, Homo sapien
gggcgcagaggaggaaagggagcaggcgcagggggactggaaaggcagcatgcgctcgccaggagcaacctcggcgcccagggtctgaggctgcagccccagttcgccattgtgagccgccgccgggggagtccgctagcgcagccgtgcccccgagtccccgtccgcgcagcgatggggcacctgcccacggggatacacggcgcccgccgcctcctgcctctgctctggctctttgtgctgttcaagaatgctacagctttccatgtaactgtccaagatgataataacatcgttgtctcattagaagcttcagacgtcatcagtccagcatctgtgtatgttgtgaagataactggtgaatccaaaaattatttcttcgaatttgaggaattcaacagcactttgcctcctcctgttattttcaaggccagttatcatggcctttattatataatcactctggtagtggtaaatggaaatgtggtgaccaagccatccagatcaatcactgtgttaacaaaacctctacctgtaaccagtgtttccatatatgactataaaccttctcctgaaacaggagtcctgtttgaaatacattatccagaaaaatataacgttttcacaagagtgaacattagctactgggaaggtaaagacttccggacaatgctatataaagatttctttaagggaaaaacagtatttaatcactggctgccaggaatgtgttatagtaatatcacctttcagctggtatctgaggcaacttttaataaaagtacccttgttgagtacagtggtgtcagtcacgaacccaaacagcacagaactgccccttatccacctcaaaatatttccgttcgtatcgtaaacttgaacaaaaacaactgggaagaacagagtggcaatttcccagaagaatccttcatgagatcacaagatacaataggaaaagaaaaactcttccattttacagaagaaacccctgaaattccctcgggcaacatttcttccggttggcctgattttaatagcagtgactatgaaactacgtctcagccatattggtgggacagtgcatctgcagctcctgaaagtgaagatgaatttgtcagcgtacttcccatggaatacgaaaataacagtacactcagtgagacagagaagtcaacatcaggctctttctcctttttccctgtgcaaatgatattgacctggttaccacccaaaccacccactgcttttgatgggttccatatccatattgaacgagaagagaactttactgaatatttgatggtggatgaagaagcacatgaatttgttgcagaactgaaggaacctgggaaatataagttatctgtgacaacctttagttcctcaggatcttgtgaaactcgaaaaagtcagtcagcaaaatcactcagcttttatatcagtccttcaggagagtggattgaagaactgaccgagaagccgcagcacgtgagtgtccacgttttaagctcaaccactgccttgatgtcctggacatcttcccaagagaactacaacagcaccattgtgtctgtggtgtcgctgacctgccagaaacaaaaggagagccagaggcttgaaaagcagtactgcactcaggtgaactcaagcaaacctattattgaaaatctggttcctggtgcccagtaccaggttgtaatatacctaaggaaaggccctttgattggaccaccttcagatcctgtgacatttgctattgttcccacaggaataaaggatttaatgctctatcctttgggtcctacggccgtggttctgagctggaccagaccttatttaggcgtgttcagaaaatacgtggttgaaatgttttatttcaaccctgctacaatgacatcagagtggaccacctactatgaaatagcagcaactgtttccttaactgcatccgtgagaatagctaatctgctgccagcatggtactacaacttccgggttaccatggtgacgtggggagatccagaattgagctgctgtgacagctctaccatcagcttcataacagccccagtggctccggaaatcacttctgtggaatatttcaacagtctgttatatatcagttggacatatggggatgatacaacggacttgtcccattctagaatgcttcactggatggtggttgcagaaggaaaaaagaaaattaaaaagagtgtaacacgcaatgtcatgactgcaattctcagcttgcctccaggcgacatctataacctctcagtaactgcttgtactgaaagaggaagtaatacctccatgctccgccttgtcaagctagaaccagctccacccaaatcactcttcgcagtgaacaaaacccagacttcagtgactttgctgtgggtggaagagggagtagctgatttctttgaagttttctgtcaacaagttggctccagtcagaaaaccaaacttcaggaaccagttgctgtttcttcccatgtcgtgaccatctccagccttcttcctgccactgcctacaattgtagtgtcaccagctttagccatgacagccccagtgtccctacgttcatagccgtctcaacaatggttacagagatgaatcccaatgtggtagtgatctccgtgctggccatccttagcacacttttaattggactgttgcttgttaccctcattattcttaggaaaaagcatctgcagatggctagggagtgtggagctggtacatttgtcaattttgcatccttagagagggatggaaagcttccatacaactggcgtaggagtatatttgctttcttaaccctgctaccctcatgtctttggactgattatcttttggcattttatattaatccttggagtaaaaatggtttaaagaagaggaaactgacaaacccggttcaactggatgactttgatgcctatattaaggatatggccaaagactctgactataaattttctcttcagtttgaggagttgaaattgattggactggatatcccacactttgctgcagatcttccactgaatcgatgtaaaaaccgttacacaaacatcctaccatatgacttcagccgtgtgagattagtctccatgaatgaagaggaaggtgcagactacatcaatgccaactatattcctggatacaactcaccccaggagtatattgccacccaggggccactgcctgaaaccagaaatgacttctggaagatggtcctgcaacaaaagtctcagattattgtcatgctcactcagtgtaatgagaaaaggagggtgaaatgtgaccattactggccattcacggaagaacctatagcctatggagacatcactgtggagatgatttcagaggaagagcaggacgactgggcctgtagacacttccggatcaactatgctgacgagatgcaggatgtgatgcattttaactacactgcatggcctgatcatggtgtgcccacagcaaatgctgcagaaagtatcctgcagtttgtacacatggtccgacagcaagctaccaagagcaaaggtcccatgatcattcactgcagtgctggcgtgggacggacaggaacattcattgccctggacaggctcttgcagcacattcgggatcatgagtttgttgacatcttagggctggtgtcagaaatgaggtcataccggatgtctatggtacagacagaggagcagtacatttttatccatcagtgtgtgcaactgatgtggatgaagaagaagcagcagttctgcatcagtgatgtcatatacgagaatgttagcaagtcctagttcagaatccggagcagagaggacatgatgtgcgcccatcctcccttgcttccagattgttttagtgggccctgatggtcatttttctaaacagaggccctgctttgtaatatgtggccaaggagataatttatctcacagaagcaccgggaagacttagccttaaagagcctacagtgtccttttggactctttcacttcgggacatttaataatggaccaaattcaacagaacaccaggaaggtcaagacgctctccaaagggcaggaagtacagcacttccgaagagtttagttggccctttgctggttgggctgagttttttatttttaagtgtttgtttttcagtgcaataatttttgtgtgtgtgtgattcttatcagaaagttgaattgttttctgcctacaccgttcatcagccccataacccaggaaggaacaggcattgttagcatcagattatacctcattattaaaaggaggcatggccacacatgaagaaatggtcattctacttcaaagaaattgagccagcactatctgtactccaacattaccggatctggattggggaggttggtcagggaagagaggggttctacccacagatcaactgtgtaatcttttactattcaagctataattcagcttcaaagtagagtagaaaaaaaattgtcttaactgttctagttcttgatggttttcttccttattaacagttggtgtttcttccttggcccttttggactaatgttactgtccaagttctttctcaagaaaccacatctggttcagaagagtgtcaagttggactctttgaactctgttgctgtctgagcaatcgtggtgcctagactttgcattccttgttctgttgacctgcatacatgtgagagctatttctttaagaactatataggctgtgaaaacgcactttctttcccccaaagagctgggaatttatgaagttatggcaatgaactgcagcatgctgggacaattatttgactacttttttttgtaatattgtcaaatgtctctatggattctgacagagatttctttttgttttgttattcttttggttgtcagtttcattttaacgagtgtaactagtaacattttattctttggattttgtataattacagtacatgattgtgtattgtgacatgaatgctgtcaaaatgacattgatggcattgtgaagcctgttactttgtgtcacttcctgataaataagaggtgatgacatggatatacaacagaaaacactttgagttgaaagtaaacacaagctggctgcttccctgtggcaactgtggct

SEQ ID NO: 691 - protein, 1216 aa, Homo sapien
MGHLPTGIHGARRLLPLLWLFVLFKNATAFHVTVQDDNNIVVSLEASDVISPASVYVVKITGESKNYFFEFEEFNSTLPPPVIFKASYHGLYYIITLVVVNGNVVTKPSRSITVLTKPLPVTSVSIYDYKPSPETGVLFEIHYPEKYNVFTRVNISYWEGKDFRTMLYKDFFKGKTVFNHWLPGMCYSNITFQLVSEATFNKSTLVEYSGVSHEPKQHRTAPYPPQNISVRIVNLNKNNWEEQSGNFPEESFMRSQDTIGKEKLFHFTEETPEIPSGNISSGWPDFNSSDYETTSQPYWWDSASAAPESEDEFVSVLPMEYENNSTLSETEKSTSGSFSFFPVQMILTWLPPKPPTAFDGFHIHIEREENFTEYLMVDEEAHEFVAELKEPGKYKLSVTTFSSSGSCETRKSQSAKSLSFYISPSGEWIEELTEKPQHVSVHVLSSTTALMSWTSSQENYNSTIVSVVSLTCQKQKESQRLEKQYCTQVNSSKPIIENLVPGAQYQVVIYLRKGPLIGPPSDPVTFAIVPTGIKDLMLYPLGPTAVVLSWTRPYLGVFRKYVVEMFYFNPATMTSEWTTYYEIAATVSLTASVRIANLLPAWYYNFRVTMVTWGDPELSCCDSSTISFITAPVAPEITSVEYFNSLLYISWTYGDDTTDLSHSRMLHWMVVAEGKKKIKKSVTRNVMTAILSLPPGDIYNLSVTACTERGSNTSMLRLVKLEPAPPKSLFAVNKTQTSVTLLWVEEGVADFFEVFCQQVGSSQKTKLQEPVAVSSHVVTISSLLPATAYNCSVTSFSHDSPSVPTFIAVSTMVTEMNPNVVVISVLAILSTLLIGLLLVTLIILRKKHLQMARECGAGTFVNFASLERDGKLPYNWRRSIFAFLTLLPSCLWTDYLLAFYINPWSKNGLKKRKLTNPVQLDDFDAYIKDMAKDSDYKFSLQFEELKLIGLDIPHFAADLPLNRCKNRYTNILPYDFSRVRLVSMNEEEGADYINANYIPGYNSPQEYIATQGPLPETRNDFWKMVLQQKSQIIVMLTQCNEKRRVKCDHYWPFTEEPIAYGDITVEMISEEEQDDWACRHFRINYADEMQDVMHFNYTAWPDHGVPTANAAESILQFVHMVRQQATKSKGPMIIHCSAGVGRTGTFIALDRLLQHIRDHEFVDILGLVSEMRSYRMSMVQTEEQYIFIHQCVQLMWMKKKQQFCISDVIYENVSKS

SEQ ID NO: 692 - DNA, 3319 bp, Homo sapien
ctacctcttcctctccacgcggttgagaagaccggtcggcctgggcaacctgcgctgaagatgccgggaaaactccgtagtgacgctggtttggaatcagacaccgcaatgaaaaaaggggagacactgcgaaagcaaaccgaggagaaagagaaaaaaagagaagccaaaatctgataagactgaagagatagcagaagaggaagaaactgttttccccaaagctaaacaagttaaaaagaaagcagagccttctgaagttgacatgaattctcctaaatccaaaaaggcaaaaaagaaagaggagccatctcaaaatgacatttctcctaaaaccaaaagtttgagaaagaaaaaggagcccattgaaaagaaagtggtttcttctaaaaccaaaaaagtgacaaaaaatgaggagccttctgaggaagaaatagatgctcctaagcccaagaagatgaagaaagaaaaggaaatgaatggagaaactagagagaaaagccccaaactgaagaatggatttcctcatcctgaaccggactgtaaccccagtgaagctgccagtgaagaaagtaacagtgagatagagcaggaaatacctgtggaacaaaaagaaggcgctttctctaattttcccatatctgaagaaactattaaacttctcaaaggccgaggagtgaccttcctatttcctatacaagcaaagacattccatcatgtttacagcgggaaggacttaattgcacaggcacggacaggaactgggaagacattctcctttgccatccctttgattgagaaacttcatggggaactgcaagacaggaagagaggccgtgcccctcaggtactggttcttgcacctacaagagagttggcaaatcaagtaagcaaagacttcagtgacatcacaaaaaagctgtcagtggcttgtttttatggtggaactccctatggaggtcaatttgaacgcatgaggaatgggattgatatcctggttggaacaccaggtcgtatcaaagaccacatacagaatggcaaactagatctcaccaaacttaagcatgttgtcctggatgaagtggaccagatgttggatatgggatttgctgatcaagtggaagagattttaagtgtggcatacaagaaagattctgaagacaatccccaaacattgcttttttctgcaacttgccctcattgggtatttaatgttgccaagaaatacatgaaatctacatatgaacaggtggacctgattggtaaaaagactcagaaaacggcaataactgtggagcatctggctattaagtgccactggactcagagggcagcagttattggggatgtcatccgagtatatagtggtcatcaaggacgcactatcatcttttgtgaaaccaagaaagaagcccaggagctgtcccagaattcagctataaagcaggatgctcagtccttgcatggagacattccacagaagcaaagggaaatcaccctgaaaggttttagaaatggtagttttggagttttggtggcaaccaatgttgctgcacgtgggttagacatccctgaggttgatttggttatacaaagctctccaccaaaggatgtagagtcctacattcatcgatccgggcggacaggcagagctggaaggacgggggtgtgcatctgcttttatcagcacaaggaagaatatcagttagtacaagtggagcaaaaagcgggaattaagttcaaacgaataggtgttccttctgcaacagaaataataaaagcttccagcaaagatgccatcaggcttttggattccgtgcctcccactgccattagtcacttcaaacaatcagctgagaagctgatagaggagaagggagctgtggaagctctggcagcagcactggcccatatttcaggtgccacgtccgtagaccagcgctccttgatcaactcaaatgtgggttttgtgaccatgatcttgcagtgctcaattgaaatgccaaatattagttatgcttggaaagaacttaaagagcagctgggcgaggagattgattccaaagtgaagggaatggtttttctcaaaggaaagctgggtgtttgctttgatgtacctaccgcatcagtaacagaaatacaggagaaatggcatgattcacgacgctggcagctctctgtggccacagagcaaccagaactggaaggaccacgggaaggatatggaggcttcaggggacagcgggaaggcagtcgaggcttcaggggacagcgggacggaaacagaagattcagaggacagcgggaaggcagtagaggcccgagaggacagcgatcaggaggtggcaacaaaagtaacagatcccaaaacaaaggccagaagcggagtttcagtaaagcatttggtcaataattagaaatagaagatttatatagcaaaaagagaatgatgtttggcaatatagaactgaacattatttttcatgcaaagttaaaagcacattgtgcctccttttgaccacttgccaagtccctgtctctttcagacacagacaagcttcatttaaattatttcatctgatcattatcatttataactttattgttacttcatcagtttttccttttgaaaggtgtatgaattcattacatttttattctaatgtattatctgtagattagaagataaaatcaagcatgtatctgcctatactttgtgagttcacctgtctttatactcaaaagtgtcccttaatagtgtccttccctgaaataaatacctaagggagtgtaacagtctctggaggaccactttgagcctttggaagttaaggtttcctcagccacctgccgaacagtttctcatgtggtcctattatttgtctactgagacttaatactgagcaatgttttgaaacaagatttcaaactaatctgggttgtaatacagtttataccagtgtatgctctagacttggaagatgtagtatgtttgatgtggattacctatacttatgttcgttttgatacatttttagcttctcattataaggtgattcatgctttagtgaattcttcatagatagtatatataaaagtacattttaatagaaagccagggttttaaggaatttcacatgtataaggtggctccatagctttatttgtaagtaggctggataaatggtgcttaaatggtaatgtactccacttcttcctattggaagattaacattatttaccaagaaggacttaagggagtaaggggcgcagattagcattgctcaagagtatgtaaaaaaaaaaaaaaaaaaaaaaa

SEQ ID NO: 693 - protein, 715 aa, Homo sapien
MNSPKSKKAKKKEEPSQNDISPKTKSLRKKKEPIEKKVVSSKTKKVTKNEEPSEEEIDAPKPKKMKKEKEMNGETREKSPKLKNGFPHPEPDCNPSEAASEESNSEIEQEIPVEQKEGAFSNFPISEETIKLLKGRGVTFLFPIQAKTFHHVYSGKDLIAQARTGTGKTFSFAIPLIEKLHGELQDRKRGRAPQVLVLAPTRELANQVSKDFSDITKKLSVACFYGGTPYGGQFERMRNGIDILVGTPGRIKDHIQNGKLDLTKLKHVVLDEVDQMLDMGFADQVEEILSVAYKKDSEDNPQTLLFSATCPHWVFNVAKKYMKSTYEQVDLIGKKTQKTAITVEHLAIKCHWTQRAAVIGDVIRVYSGHQGRTIIFCETKKEAQELSQNSAIKQDAQSLHGDIPQKQREITLKGFRNGSFGVLVATNVAARGLDIPEVDLVIQSSPPKDVESYIHRSGRTGRAGRTGVCICFYQHKEEYQLVQVEQKAGIKFKRIGVPSATEIIKASSKDAIRLLDSVPPTAISHFKQSAEKLIEEKGAVEALAAALAHISGATSVDQRSLINSNVGFVTMILQCSIEMPNISYAWKELKEQLGEEIDSKVKGMVFLKGKLGVCFDVPTASVTEIQEKWHDSRRWQLSVATEQPELEGPREGYGGFRGQREGSRGFRGQRDGNRRFRGQREGSRGPRGQRSGGGNKSNRSQNKGQKRSFSKAFGQ

SEQ ID NO: 694 - DNA, 591 bp, Homo sapien
ccgctgtcaagatgcttctggccatggtccttacctctgccctgctcctgtgctccgtggcaggccaggggtgtccaaccttggcggggatcctggacatcaacttcctcatcaacaagatgcaggaagatccagcttccaagtgccactgcagtgctaatgtgaccagttgtctctgtttgggcattccctctgacaactgcaccagaccatgcttcagtgagagactgtctcagatgaccaataccaccatgcaaacaagatacccactgattttcagtcgggtgaaaaaatcagttgaagtactaaagaacaacaagtgtccatatttttcctgtgaacagccatgcaaccaaaccacggcaggcaacgcgctgacatttctgaagagtcttctggaaattttccagaaagaaaagatgagagggatgagaggcaagatatgaagatgaaatattatttatcctatttattaaatttaaaaagctttctctttaagttgctacaatttaaaaatcaagtaagctactctaaatcagtatcagttgtgattatttgtttaacattgtatgtctttattttgaaataaat

SEQ ID NO: 695 - protein, 144 aa, Homo sapien
MLLAMVLTSALLLCSVAGQGCPTLAGILDINFLINKMQEDPASKCHCSANVTSCLCLGIPSDNCTRPCFSERLSQMTNTTMQTRYPLIFSRVKKSVEVLKNNKCPYFSCEQPCNQTTAGNALTFLKSLLEIFQKEKMRGMRGKI

SEQ ID NO: 696 - DNA, 2416 bp, Homo sapien
cgatttcattcctcgctccccacaggtccctctccccaaaatattcccatcttgtcctagcccatcccccagactatctcaaggaccagctgtccccacgcccccgacctccactaggcctgtgccacccgctgcctgcaggaagacgcccggtcccgggccgggttagccccatgggaacgcagcgcctgtgtggccgcgggactcaaggctggcctggctcaagtgaacagcacgtccaggaggcgacctcgtccgcgggtttgcattctggggtggacgagctgggggttcggtccgagcccggtgggaggctcccggagcgcagcctgggcccagcccaccccgcgccggcggccatggcaggcaccctggacctggacaagggctgcacggtggaggagctgctccgcgggtgcatcgaagccttcgatgactccgggaaggtgcgggacccgcagctggtgcgcatgttcctcatgatgcacccctggtacatcccctcctctcagctggcggccaagctgctccacatctaccaacaatcccggaaggacaactccaattccctgcaggtgaaaacgtgccacctggtcaggtactggatctccgccttcccagcggagtttgacttgaacccggagttggctgagcagatcaaggagctgaaggctctgctagaccaagaagggaaccgacggcacagcagcctaatcgacatagacagcgtccctacctacaagtggaagcggcaggtgactcagcggaaccctgtgggacagaaaaagcgcaagatgtccctgttgtttgaccacctggagcccatggagctggcggagcatctcacctacttggagtatcgctccttctgcaagatcctgtttcaggactatcacagtttcgtgactcatggctgcactgtggacaaccccgtcctggagcggttcatctccctcttcaacagcgtctcacagtgggtgcagctcatgatcctcagcaaacccacagccccgcagcgggccctggtcatcacacactttgtccacgtggcggagaagctgctacagctgcagaacttcaacacgctgatggcagtggtcgggggcctgagccacagctccatctcccgcctcaaggagacccacagccacgttagccctgagaccatcaagctctgggagggtctcacggaactagtgacggcgacaggcaactatggcaactaccggcgtcggctggcagcctgtgtgggcttccgcttcccgatcctgggtgtgcacctcaaggacctggtggccctgcagctggcactgcctgactggctggacccagcccggacccggctcaacggggccaagatgaagcagctctttagcatcctggaggagctggccatggtgaccagcctgcggccaccagtacaggccaaccccgacctgctgagcctgctcacggtgtctctggatcagtatcagacggaggatgagctgtaccagctgtccctgcagcgggagccgcgctccaagtcctcgccaaccagccccacgagttgcaccccaccaccccggcccccggtactggaggagtggacctcggctgccaaacccaagctggatcaggccctcgtggtggagcacatcgagaagatggtggagtctgtgttccggaactttgacgtcgatggggatggccacatctcacaggaagaattccagatcatccgtgggaacttcccttacctcagcgcctttggggacctcgaccagaaccaggatggctgcatcagcagggaggagatggtttcctatttcctgcgctccagctctgtgttgggggggcgcatgggcttcgtacacaacttccaggagagcaactccttgcgccccgtcgcctgccgccactgcaaagccctgatcctgggcatctacaagcagggcctcaaatgccgagcctgtggagtgaactgccacaagcagtgcaaggatcgcctgtcagttgagtgtcggcgcagggcccagagtgtgagcctggaggggtctgcaccctcaccctcacccatgcacagccaccatcaccgcgccttcagcttctctctgccccgccctggcaggcgaggctccaggcctccagagatccgtgaggaggaggtacagacggtggaggatggggtgtttgacatccacttgtaatagatgctgtggttggatcaaggactcattcctgccttggagaaaatacttcaaccagagcagggagcctgggggtgtcggggcaggaggctggggatgggggtgggatatgagggtggcatgcagctgagggcagggccagggctggtgtccctaaggttgtacagactcttgtgaatatttgtattttccagatggaataaaaaggcccgtgtaattaaccttca

SEQ ID NO: 697 - protein, 671 aa, Homo sapien
MGTQRLCGRGTQGWPGSSEQHVQEATSSAGLHSGVDELGVRSEPGGRLPERSLGPAHPAPAAMAGTLDLDKGCTVEELLRGCIEAFDDSGKVRDPQLVRMFLMMHPWYIPSSQLAAKLLHIYQQSRKDNSNSLQVKTCHLVRYWISAFPAEFDLNPELAEQIKELKALLDQEGNRRHSSLIDIDSVPTYKWKRQVTQRNPVGQKKRKMSLLFDHLEPMELAEHLTYLEYRSFCKILFQDYHSFVTHGCTVDNPVLERFISLFNSVSQWVQLMILSKPTAPQRALVITHFVHVAEKLLQLQNFNTLMAVVGGLSHSSISRLKETHSHVSPETIKLWEGLTELVTATGNYGNYRRRLAACVGFRFPILGVHLKDLVALQLALPDWLDPARTRLNGAKMKQLFSILEELAMVTSLRPPVQANPDLLSLLTVSLDQYQTEDELYQLSLQREPRSKSSPTSPTSCTPPPRPPVLEEWTSAAKPKLDQALVVEHIEKMVESVFRNFDVDGDGHISQEEFQIIRGNFPYLSAFGDLDQNQDGCISREEMVSYFLRSSSVLGGRMGFVHNFQESNSLRPVACRHCKALILGIYKQGLKCRACGVNCHKQCKDRLSVECRRRAQSVSLEGSAPSPSPMHSHHHRAFSFSLPRPGRRGSRPPEIREEEVQTVEDGVFDIHL

SEQ ID NO: 698 - DNA, 3899 bp, Homo sapien
agcttgagcgcggcggcggcgttgttcagtcagagcgagaacattccagaggtcgcccagctccggcgctgacgggtgtggaccgcggacgtcgctgggacagcccctccccgctgctcggcggcggcatctggcccggccgctcctcgctgcgcttcgcctccgcctcctcggactcggactcgggtttatatcgcgcctcacttcatcccagtcccgggcgagcagcgttgggtttatgtctttatttgacgaaaacgagctgttgcgcagccattggtacctgtattggggaaacatagcatacaagcaagaagcttacagcctcagtggcgaaaattttttcatgtcagagaccgagaactcttgcagtcgtttatgtcatcccttcttctccagacagaagataccaaaaagttgcaatcaaagatctcttcatcttattgataaagccactaataagccaaaatgtctgtcaatgtcaaccgcagcgtgtcagaccagttctatcgctacaagatgccccgtctgattgccaaggttgagggcaaaggcaatggaatcaagacagttatagtcaacatggttgacgttgcaaaggcgcttaatcggcctccaacgtatcccaccaaatattttggttgtgagctgggagcacagacccagtttgatgttaagaatgaccgttacattgtcaatggatctcatgaggcgaataagctgcaagacatgttggatggattcattaaaaaatttgttctctgtcctgaatgtgagaatcctgaaacagatttgcatgtcaatccaaagaagcaaacaataggtaattcttgtaaagcctgtggctatcgaggcatgcttgacacacatcataaactctgcacattcattctcaaaaacccacctgagaatagtgacagtggtacaggaaagaaagaaaaagaaaagaaaaacagaaagggcaaagacaaggaaaatggctccgtatccagcagtgagacaccaccaccaccaccaccaccaaatgaaattaatcctcctccacatacaatggaagaagaggaggatgatgactggggagaagatacaactgaggaagctcaaaggcgtcgaatggatgaaatcagtgaccatgcaaaagttctgacactcagtgatgatttggaaagaacaattgaggagagggtcaatatcctctttgattttgttaagaaaaagaaagaagagggtgttattgattcatctgacaaagaaatcgttgctgaagcagaaagactggatgtaaaagccatgggccctcttgttctaactgaagttctttttaatgagaagattagagaacagattaagaaatacaggcgccatttcctacgattttgtcacaacaacaaaaaagcccaacggtaccttcttcatggtttggagtgtgtggtagcaatgcatcaagctcagcttatctccaagattccacatatcttgaaggagatgtacgatgcagaccttttagaagaagaggtcatcatcagctggtcggaaaaggcctctaagaaatatgtctccaaagaacttgccaaagagattcgtgtcaaagcagaaccatttataaaatggttgaaggaggcagaggaagaatcttctggtggcgaagaagaagatgaagatgagaacattgaggtggtgtattcgaaggctgccagtgtaccgaaagttgagactgtaaagtcagacaacaaggatgacgacatcgatattgatgccatttaaagggatggatgcaacctagcttaacagtataatgctgcaaattttcctccattatcagccagaagtgcaacatgtatgtgcaaaagctaaaatggcttaacatcatgctacactttacactaaaaatctattactgtgagtggtctgttattaagcccaatgagacatctagggagtccatacacatcagtgagcagatgtagtttgcttatttatagcatgtttctttttgaaaaactagtggtggacacatttggatcacatttatacagttataaaaataaaggtttgattttggtcgttcttcagatgtttggctctgaatgacttaagctgaagtaactggctccttactttaaatgttctgccatcatttcacctgatgagcattcttggagcctgccagatattgttaggtcctggggctgcaaagaggtcctcaacaggatgtaaagcaaacttaattgtaattaatttattcagcccattaagaaagtactaaagttttatctctgtagttcctcaaattggcatctggtaatgtacattgtgaggtagactgataatgaaatgacagtgcaacatcttaaccaagaagtaaatatgacctcagtgtcctataaataatgtaagagcaggatttgaaacttggagagctgttttctcatttcatgtacacttgccccaaattgtctttgaagtcgtgtgcattgcacgttggatgagccagggaaattattacattaacaagcattttgtgtgtgcgtagtagttactttgtactgagagaacttgctttggggtgcaattaaacaataaactgattttatttgggagaaacaaggaagggtgcacttaactagcaacctaagcatgatttttcagcttttgcccttagggtttaaattacaattccaaaatgttagacatactgtattttttcgttcagtgtggctttaattttcccctcttgcagtttgttctgtaatgccttttacatttggacacatagtttatgctttttagattttggttgctttcttgccaaaataagtgttaactgtgtttcaaacttgattttctttcttttttctttttttttcttccagaatgtcttatttaaaaagaaagctaaaagcatacttctaagtcagagcctctattttggtgtaagacttgggatattttttacttcacattgaatatagccaggcacccaagaagtctgatggccacctgagtgcaggtgacaaggacctgacagagcccatgcagggctttagatttggacacacaagagttgataacttcctcatgaactccttgcctgatctaaactcatattatgggttctgactgtttgagtaatcgtcttcaaggttaaacctcttggcagttacccttttcacaaagtgcacagtgggaatcgagaatcgatagggttaattttggagcagtggcttataccattcacctctgtttttttgtgattatttcacagataatgagaccttaataacaaataggcgtaaaaaaattttcacattgaaatgatagaaacatttgatgtaataaaacttggttggcttgatattttaaggaattgaaacctagcaatcttattggagagacaagaattggtctccagctgcctttgatcaagattcgggtgcaagtggagcaggagccatatacctggagggaatgtgctttgtcacaccaaagaggattttttttttcttcaaacttgtatgttgcctaggtttcaaattctttgccgcaaggctgatctgctttcattaactggaattctgtaggagatactggtgacctaagctaagttgcactcagcatactcagtgtcaagctaatgaggttctattataaaggttctacttttaatctgagggaaaacatgttcagggcttctagaacactaaaaaatttggcttaaaccagtgttcagtctggtgccaaacttcgaatggaatacaaattcacataatctgaactttgttcacaggttatcctaatagagtaattcttcactttgctctattgaactgtcttaaggatttgtttaaacagctaagttacttgattaaaataatgataaaattgtaaaaaaaaaaaaa

SEQ ID NO: 699 - protein, 431 aa, Homo sapien
MSVNVNRSVSDQFYRYKMPRLIAKVEGKGNGIKTVIVNMVDVAKALNRPPTYPTKYFGCELGAQTQFDVKNDRYIVNGSHEANKLQDMLDGFIKKFVLCPECENPETDLHVNPKKQTIGNSCKACGYRGMLDTHHKLCTFILKNPPENSDSGTGKKEKEKKNRKGKDKENGSVSSSETPPPPPPPNEINPPPHTMEEEEDDDWGEDTTEEAQRRRMDEISDHAKVLTLSDDLERTIEERVNILFDFVKKKKEEGVIDSSDKEIVAEAERLDVKAMGPLVLTEVLFNEKIREQIKKYRRHFLRFCHNNKKAQRYLLHGLECVVAMHQAQLISKIPHILKEMYDADLLEEEVIISWSEKASKKYVSKELAKEIRVKAEPFIKWLKEAEEESSGGEEEDEDENIEVVYSKAASVPKVETVKSDNKDDDIDIDAI

SEQ ID NO: 700 - DNA, 2828 bp, Homo sapien
ggggcggggagcggacttcctcctctgagggccgtgccgcgctgccagatttgttcttccgcccctgcctccgcggctcggaggcgagcggaaggtgccccggggccgaggcccgtgacggggcgggcgggagccccggcagtccggggtcgccggcgagggccatgtcgctgttgggggacccgctacaggccctgccgccctcggccgcccccacggggccgctgctcgcccctccggccggcgcgaccctcaaccgcctgcgggagccgctgctgcggaggctcagcgagctcctggatcaggcgcccgagggccggggctggaggagactggcggagctggcggggagtcgcgggcgcctccgcctcagttgcctagacctggagcagtgttctcttaaggtactggagcctgaaggaagccccagcctgtgtctgctgaagttaatgggtgaaaaaggttgcacagtcacagaattgagtgatttcctgcaggctatggaacacactgaagttcttcagcttctcagccccccaggaataaagattactgtaaacccagagtcaaaggcagtcttggctggacagtttgtgaaactgtgttgccgggcaactggacatccttttgttcaatatcagtggttcaaaatgaataaagagattccaaatggaaatacatcagagcttatttttaatgcagtgcatgtaaaagatgcaggcttttatgtctgtcgagttaataacaatttcacctttgaattcagccagtggtcacagctggatgtttgcgacatcccagagagcttccagagaagtgttgatggcgtctctgaatccaagttgcaaatctgtgttgaaccaacttcccaaaagctgatgccaggcagcacattggttttacagtgtgttgctgttggaagccctattcctcactaccagtggttcaaaaatgaattaccattaacacatgagaccaaaaagctatacatggtgccttatgtggatttggaacaccaaggaacctactggtgtcatgtatataatgatcgagacagtcaagatagcaagaaggtagaaatcatcataggaagaacagatgaggcagtggagtgcactgaagatgaattaaataatcttggtcatcctgataataaagagcaaacaactgaccagcctttggcgaaggacaaggttgcccttttgataggaaatatgaattaccgggagcaccccaagctcaaagctcctttggtggatgtgtacgaattgactaacttactgagacagctggacttcaaagtggtttcactgttggatcttactgaatatgagatgcgtaatgctgtggatgagtttttactccttttagacaagggagtatatgggttattatattatgcaggacatggttatgaaaattttgggaacagcttcatggtccccgttgatgctccaaatccatataggtctgaaaattgtctgtgtgtacaaaatatactgaaattgatgcaagaaaaagaaactggacttaatgtgttcttattggatatgtgtaggaaaagaaatgactacgatgataccattccaatcttggatgcactaaaagtcaccgccaatattgtgtttggatatgccacgtgtcaaggagcagaagcttttgaaatccagcattctggattggcaaatggaatctttatgaaatttttaaaagacagattattagaagataagaaaatcactgtgttactggatgaagttgcagaagatatgggtaagtgtcaccttaccaaaggcaaacaggctctagagattcgaagtagtttatctgagaagagagcacttactgatccaatacagggaacagaatattctgctgaatctcttgtgcggaatctacagtgggccaaggctcatgaacttccagaaagtatgtgtcttaagtttgactgtggtgttcagattcaattaggatttgcagctgagttttccaatgtcatgatcatctatacaagtatagtttacaaaccaccggagataataatgtgtgatgcctacgttactgattttccacttgatctagatattgatccaaaagatgcaaataaaggcacacctgaagaaactggcagctacttggtatcaaaggatcttcccaagcattgcctctataccagactcagttcactgcaaaaattaaaggaacatctagtcttcacagtatgtttatcatatcagtactcaggattggaagatactgtagaggacaagcaggaagtgaatgttgggaaacctctcattgctaaattagacatgcatcgaggtttgggaaggaagacttgctttcaaacttgtcttatgtctaatggtccttaccagagttctgcagccacctcaggaggagcagggcattatcactcattgcaagacccattccatggtgtttaccattcacatcctggtaatccaagtaatgttacaccagcagatagctgtcattgcagccggactccagatgcatttatttcaagtttcgctcaccatgcttcatgtcattttagtagaagtaatgtgccagtagagacaactgatgaaataccatttagtttctctgacaggctcagaatttctgaaaaatgacctccttgtttttgaaagttagcataattttagatgcctgtgaaatagtactgcacttacataaagtgagacattgtgaaaaggcaaatttgtatatgtagagaaagaatagtagtaactgtttcatagcaaacttcaggactttgagatgttgaaattacattatttaattacagacttcctctttct

SEQ ID NO: 701 - protein, 824 aa, Homo sapien
MSLLGDPLQALPPSAAPTGPLLAPPAGATLNRLREPLLRRLSELLDQAPEGRGWRRLAELAGSRGRLRLSCLDLEQCSLKVLEPEGSPSLCLLKLMGEKGCTVTELSDFLQAMEHTEVLQLLSPPGIKITVNPESKAVLAGQFVKLCCRATGHPFVQYQWFKMNKEIPNGNTSELIFNAVHVKDAGFYVCRVNNNFTFEFSQWSQLDVCDIPESFQRSVDGVSESKLQICVEPTSQKLMPGSTLVLQCVAVGSPIPHYQWFKNELPLTHETKKLYMVPYVDLEHQGTYWCHVYNDRDSQDSKKVEIIIGRTDEAVECTEDELNNLGHPDNKEQTTDQPLAKDKVALLIGNMNYREHPKLKAPLVDVYELTNLLRQLDFKVVSLLDLTEYEMRNAVDEFLLLLDKGVYGLLYYAGHGYENFGNSFMVPVDAPNPYRSENCLCVQNILKLMQEKETGLNVFLLDMCRKRNDYDDTIPILDALKVTANIVFGYATCQGAEAFEIQHSGLANGIFMKFLKDRLLEDKKITVLLDEVAEDMGKCHLTKGKQALEIRSSLSEKRALTDPIQGTEYSAESLVRNLQWAKAHELPESMCLKFDCGVQIQLGFAAEFSNVMIIYTSIVYKPPEIIMCDAYVTDFPLDLDIDPKDANKGTPEETGSYLVSKDLPKHCLYTRLSSLQKLKEHLVFTVCLSYQYSGLEDTVEDKQEVNVGKPLIAKLDMHRGLGRKTCFQTCLMSNGPYQSSAATSGGAGHYHSLQDPFHGVYHSHPGNPSNVTPADSCHCSRTPDAFISSFAHHASCHFSRSNVPVETTDEIPFSFSDRLRISEK

SEQ ID NO: 702 - DNA, 3339 bp, Homo sapien
atgaggagggacgagcgagacgccaaagccatgcggtccctgcagccgccggatggggccggctcgccccccgagagtctgaggaacggctacgtgaagagctgcgtgagccccttgcggcaggaccctccgcgcggcttcttcttccacctctgccgcttctgcaacgtggagctgcggccgccgccggcctctccccagcagccgcggcgctgctcccccttctgccgggcgcgcctctcgctgggcgacctggctgcctttgtcctcgccctgctgctgggagcggaacccgagagctgggctgccggggccgcctggctgcggacgctgctgagcgtgtgttcgcacagcttgagccccctcttcagcatcgcctgtgccttcttcttcctcacctgcttcctcacccggaccaagcggggacccggcccgggccggagctgcggctcctggtggctgctggcgctgcccgcctgctgttacctgggggacttcttggtgtggcagtggtggtcttggccttggggggatggcgacgcagggtccgcggccccgcacacgcccccggaggcggcagcgggcaggttgctgctggtgctgagctgcgtagggctgctgctgacgctcgcgcacccgctgcggctccggcactgcgttctggtgctgctcctggccagcttcgtctggtgggtctccttcaccagcctcgggtcgctgccctccgccctcaggccgctgctctccggcctggtggggggcgctggctgcctgctggccctggggttggatcacttctttcaaatcagggaagcgcctcttcatcctcgactgtccagtgccgccgaagaaaaagtgcctgtgatccgaccccggaggaggtccagctgcgtgtcgttaggagaaactgcagccagttactatggcagttgcaaaatattcaggagaccgtcgttgccttgtatttccagagaacagatgattctttgggattgggacttaaaacaatggtataagcctcattatcaaaattctggaggtggaaatggagttgatctttcagtgctaaatgaggctcgcaatatggtgtcagatcttctgactgatccaagccttccaccacaagtcatttcctctctacggagtattagtagcttaatgggtgctttctcaggttcctgtaggccaaagattaatcctctcacaccatttcctggattttacccctgttctgaaatagaggacccagctgagaaaggggatagaaaacttaacaagggactaaataggaatagtttgccaactccacagctgaggagaagctcaggaacttcaggattgctacctgttgaacagtcttcaaggtgggatcgtaataatggcaaaaggcctcaccaagaatttggcatttcaagtcaaggatgctatctaaatgggccttttaattcaaatctactgactatcccgaagcaaaggtcatcttctgtatcactgactcaccatgtaggtctcagaagagctggtgttttgtccagtctgagtcctgtgaattcttccaaccatggaccagtgtctactggctctctaactaatcgatcacccatagaatttcctgatactgctgattttcttaataagccaagcgttatcttgcagagatctctgggcaatgcacctaatactccagatttttatcagcaacttagaaattctgatagcaatctgtgtaacagctgtggacatcaaatgctgaaatatgtttcaacatctgaatcagatggtacagattgctgcagtggaaaatcaggtgaagaagaaaacattttctcgaaagaatcattcaaacttatggaaactcaacaagaagaggaaacagagaagaaagacagcagaaaattatttcaggaaggtgataagtggctaacagaagaggcacagagtgaacagcaaacaaatattgaacaggaagtatcactggacctgattttagtagaagagtatgactcattaatagaaaagatgagcaactggaattttccaatttttgaacttgtagaaaagatgggagagaaatcaggaaggattctcagtcaggttatgtataccttatttcaagacactggtttattggaaatatttaaaattcccactcaacaatttatgaactattttcgtgcattagaaaatggctatcgagacattccttatcacaatcgtatacatgccacagatgtgctacatgcagtttggtatctgacaacacggccagttcctggcttacagcagatccacaatggttgtggaacaggaaatgaaacagattctgatggtagaattaaccatgggcgaattgcttatatttcttcgaagagctgctctaatcctgatgagagttatggctgcctgtcttcaaacattcctgcattagaattgatggctctatacgtggcagctgccatgcatgattatgatcacccagggaggacaaatgcatttctagtggctacaaatgcccctcaggcagttttatacaatgacagatctgttctggaaaatcatcatgctgcgtcagcttggaatctatatctttctcgcccagaatacaacttccttcttcatcttgatcatgtggaattcaagcgctttcgttttttagtcattgaagcaatccttgctacggatcttaaaaagcattttgattttctcgcagaattcaatgccaaggcaaatgatgtaaatagtaatggcatagaatggagtaatgaaaatgatcgcctcttggtatgccaggtgtgcatcaaactggcagatataaatggcccagcaaaagttcgagacttgcatttgaaatggacagaaggcattgtcaatgaattttatgagcagggagatgaagaagcaaatcttggtctgcccatcagtccattcatggatcgttcttctcctcaactagcaaaactccaagaatcttttatcacccacatagtgggtcccctgtgtaactcctatgatgctgctggtttgctaccaggtcagtggttagaagcagaagaggataatgatactgaaagtggtgatgatgaagacggtgaagaattagatacagaagatgaagaaatggaaaacaatctaaatccaaaaccaccaagaaggaaaagcagacggcgaatattttgtcagctaatgcaccacctcactgaaaaccacaagatatggaaggaaatcgtagaggaagaagaaaaatgtaaagctgatgggaataaactgcaggtggagaattcctccttacctcaagcagatgagattcaggtaattgaagaggcagatgaagaggaatag

SEQ ID NO: 703 - protein, 1112 aa, Homo sapien
MRRDERDAKAMRSLQPPDGAGSPPESLRNGYVKSCVSPLRQDPPRGFFFHLCRFCNVELRPPPASPQQPRRCSPFCRARLSLGDLAAFVLALLLGAEPESWAAGAAWLRTLLSVCSHSLSPLFSIACAFFFLTCFLTRTKRGPGPGRSCGSWWLLALPACCYLGDFLVWQWWSWPWGDGDAGSAAPHTPPEAAAGRLLLVLSCVGLLLTLAHPLRLRHCVLVLLLASFVWWVSFTSLGSLPSALRPLLSGLVGGAGCLLALGLDHFFQIREAPLHPRLSSAAEEKVPVIRPRRRSSCVSLGETAASYYGSCKIFRRPSLPCISREQMILWDWDLKQWYKPHYQNSGGGNGVDLSVLNEARNMVSDLLTDPSLPPQVISSLRSISSLMGAFSGSCRPKINPLTPFPGFYPCSEIEDPAEKGDRKLNKGLNRNSLPTPQLRRSSGTSGLLPVEQSSRWDRNNGKRPHQEFGISSQGCYLNGPFNSNLLTIPKQRSSSVSLTHHVGLRRAGVLSSLSPVNSSNHGPVSTGSLTNRSPIEFPDTADFLNKPSVILQRSLGNAPNTPDFYQQLRNSDSNLCNSCGHQMLKYVSTSESDGTDCCSGKSGEEENIFSKESFKLMETQQEEETEKKDSRKLFQEGDKWLTEEAQSEQQTNIEQEVSLDLILVEEYDSLIEKMSNWNFPIFELVEKMGEKSGRILSQVMYTLFQDTGLLEIFKIPTQQFMNYFRALENGYRDIPYHNRIHATDVLHAVWYLTTRPVPGLQQIHNGCGTGNETDSDGRINHGRIAYISSKSCSNPDESYGCLSSNIPALELMALYVAAAMHDYDHPGRTNAFLVATNAPQAVLYNDRSVLENHHAASAWNLYLSRPEYNFLLHLDHVEFKRFRFLVIEAILATDLKKHFDFLAEFNAKANDVNSNGIEWSNENDRLLVCQVCIKLADINGPAKVRDLHLKWTEGIVNEFYEQGDEEANLGLPISPFMDRSSPQLAKLQESFITHIVGPLCNSYDAAGLLPGQWLEAEEDNDTESGDDEDGEELDTEDEEMENNLNPKPPRRKSRRRIFCQLMHHLTENHKIWKEIVEEEEKCKADGNKLQVENSSLPQADEIQVIEEADEEE

SEQ ID NO: 704 - DNA, 1857 bp, Homo sapien
ccattcttctcccgggagccctcatctatgcacatctcctcaagcctgccccctgacacacagaagttccttcgctttgcagagactcaccgcactgtgttaaaccagatcctacggcagtccacgacccaccttgctgatgggccttttgctgtcctggtagactacattcgtgtcctcgactttgatgtcaagcgcaaatatttccgccaagagctggagcgtttagatgaggggctccggaaagaagacatggctgtgcatgtccttcgtgaccatgtgtttgaagactcctatcgtgagctgcatcgcaaatcccccgaagaaatgaagaatcgattgtatatagtatttgaaggagaagaagggcaggatgctggcgggctcctgcgggagtggtatatgatcatctctcgagagatgtttaaccctatgtatgccttgttccgtacctcacctggtgatcgagtcacctacaccatcaatccatcttcccactgcaaccccaaccacctcagctacttcaagtttgtcggacgcattgtggccaaagctgtatatgacaaccgtcttctggagtgctactttactcgatccttttacaaacacatcttgggcaagtcagtcagatatacagatatggagagtgaagattaccacttctaccaaggtctggtttatctgctggaaaatgatgtctccacactaggctatgacctcaccttcagcactgaggtccaagagtttggagtttgtgaagttcgtgacctcaaacccaatggggccaacatcttggtaacagaggagaataagaaggagtatgtacacctggtatgccagatgagaatgacaggagccatccgcaagcagttggcggctttcttagaaggcttctatgagatcattccaaagcgcctcatttccatcttcactgagcaggagttagagctgcttatatcaggactgcccaccattgacatcgatgatctgaaatccaacactgaataccacaagtaccagtccaactctattcagatccagtggttctggagagcattgcgttctttcgatcaagctgaccgtgccaagttcctccagtttgtcacgggtacttccaaggtacccctgcaaggctttgctgccctcgaaggcatgaatggcattcagaagtttcagatccatcgagatgacaggtccacagatcgcctgccttcagctcacacatgttttaatcagctggatctgcctgcctatgagagctttgagaagctccgccacatgctactgttggctatccaggagtgctctgaaggctttgggctggcctaataaggccctgcccaactccgtggggttttttttaccattgttggacctggggaggggggagttaaaaaaagaaccagaaagaaattgtcaaaaaccaataaatgaaatccaccaactcaccgtgtgtgtcccagctgccccatcttccccagcgcatacctgttcctcttctcattctctccccgccgcctgtttcctcaccttctctcccctttccatgccgtccatgatccccaccccatgtgttttaaaaaggcagtagcctttgcagggacctgtctgtcccaactgtttgaacagtgtgctcctcagattctgtgttcagaaggatttgctgcattgagacttgaaacctttggataggggaaaaaattatatatatatatatttttttgttctgtttgcatttcttaatttgtgcttggaatgtgttgatgtgcacagctaatgattcaatgcgagacaagattggcgtctgtgttgtggaggtttcaaataaagagcactcttcataactcaaaaaaaaaa

SEQ ID NO: 705 - protein, 308 aa, Homo sapien
MIISREMFNPMYALFRTSPGDRVTYTINPSSHCNPNHLSYFKFVGRIVAKAVYDNRLLECYFTRSFYKHILGKSVRYTDMESEDYHFYQGLVYLLENDVSTLGYDLTFSTEVQEFGVCEVRDLKPNGANILVTEENKKEYVHLVCQMRMTGAIRKQLAAFLEGFYEIIPKRLISIFTEQELELLISGLPTIDIDDLKSNTEYHKYQSNSIQIQWFWRALRSFDQADRAKFLQFVTGTSKVPLQGFAALEGMNGIQKFQIHRDDRSTDRLPSAHTCFNQLDLPAYESFEKLRHMLLLAIQECSEGFGLA

SEQ ID NO: 706 - DNA, 5018 bp, Homo sapien
tctagatgggggtcctgggccccagggtgtgcagccactgacttggggactgctggtggggtagggatgagggagggaggggcattgtgatgtacagggctgctctgtgagatcaagggtctcttaagggtgggagctggggcagggactacgagagcagccagatgggctgaaagtggaactcaaggggtttctggcacctacctacctgcttcccgctggggggtggggagttggcccagagtcttaagattggggcagggtggagaggtgggctcttcctgcttcccactcatcttatagctttctttccccagatccgaattcgagatccaaaccaaggaggaaaggatatcacagaggagatcatgtctggggcccgcactgcctccacacccacccctccccagacgggaggcagtctggagcctcaagctaatggggagacgccccaggttgctgtcattgtccggccagatgaccggtcacagggagcaatcattgctgaccggccagggctgcctggcccagagcatagcccttcagaatcccagccttcgtcgccttctccgaccccatcaccatccccagtcttggaaccggggtctgagcctaatctcgcagtcctctctattcctggggacactatgacaactatacaaatgtctgtagaagaatcaacccccatctcccgtgaaactggggagccatatcgcctctctccagaacccactcctctcgccgaacccatactggaagtagaagtgacacttagcaaaccggttccagaatctgagttttcttccagtcctctccaggctcccacccctttggcatctcacacagtggaaattcatgagcctaatggcatggtcccatctgaagatctggaaccagaggtggagtcaagcccagagcttgctcctcccccagcttgcccctccgaatcccctgtgcccattgctccaactgcccaacctgaggaactgctcaacggagccccctcgccaccagctgtggacttaagcccagtcagtgagccagaggagcaggccaaggaggtgacagcatcagtggcgccccccaccatcccctctgctactccagctacggctccttcagctacttccccagctcaggaggaggaaatggaagaagaagaagatgaggaagaaggagaagtaggggaagcaggggaaggtgagagtgagaagagaggagaggaactgctccccccagagagtacccctattccagccaacttgtctcagaatttggaggcagcagcagccactcaagtggcagtatctgtgccaaagaggagacggaaaattaaggagctaaataagaaggaggctgttggagaccttctggatgccttcaaggaggcgaacccggcagtaccagaggtggaaaatcagcctcctgcaggcagcaatccaggcccagagtctgagggcagtggtgtgcccccacgtcctgaggaagcagatgagacctgggactcaaaggaagacaaaattcacaatgctgagaacatccagcccggggaacagaagtatgaatataagtcagatcagtggaagcctccaaacctagaggagaaaaaacgttacgaccgtgagttcctgcttggttttcagttcatcttttgccagatgcagaagccagagggattgccacatatcagtgacgtggtgctggacaaggccaataaaacaccactgcggccactggatcccactagactacaaggcataaattgtggcccagacttcactccatcctttgccaaccttggccggacaacccttagcacccgtgggcccccaaggggtgggccaggtggggagctcgcccgtggcgcgcaggctggcctgggaccccggcgctctcagcagggaccccgaaaagaaccacgcaagatcattgccacagtgttaatgaccgaagatataaaactgaacaaagcagagaaagcctggaaacccagcagcaagcggacagcggctgataaggatcgaggggaagaagatgctgatggcagcaaaacccaggacctattccgcaggtggcgctccatcctgaataaactgacaccccagatgttccagcagctgatgaagcaagtgacgcagctggccatcgacaccgaggacgcctcaaaggggtcattgacctcatttttgagaaggccatttcagagcccaacttctctgtggcctatccaacatgtgccgctgcctcatggcgctgaaagtgcccactacggaaagccaacagtgactgtgaacttccgaaagctgttgttgaatcgatgtcagaaggagtttgagaaagacaaagatgatgatgaggtttttgagaagaagcaaaaagagatggatgaagctgctacggcagaggaacgagaacgcctgaaggaggagctggaagaggctcgggacatagcccggcgctgctctttagggaatatcaagtttattggagagttgttcaaactgaagatgttaacagaggcaataatgcatgactgtgtggtcaaactgcttaagaaccatgatgaagagtcccttgagtgcctttgtcgtctgctcaccaccattggcaaagacctggactttgaaaaagccaagccccgaatggatcagtatttcaaccagatggaaaaaatcattaaagaaaagaagacgtcatcccgcatccgctttatgctgcaggacgtgctggatctgcgagggagcaattgggtgccacgccgaggggatcagggtccaagaccattgaccagatccataaggaggctgagatggaagacatcgagagcacatcaaagtgcagcagctcatgcaagggcagtgacaagcgtcggggcggtcctccaggccctcccatcagccgtggacttccccttgtggatgatggtggctgacacagttcccatcagcaaaggtagccgccccattgacacctcacgactcaccaagatcaccaagcctggctccatcgattctaacaaccagctctttgcacctggagggcgactgagctggggcaagggcagcagcggagggtcaggagcccagccctcagacgcagcatcagaagctgctcgcccagctactagtactttgattcgcttctcagcccttcaacaagcggtacccacagaaagcacagataatagacgtgtggtgcagaggagtagcttgagccgagaacgaggcgagaaagctggagaccgaggagaccgcctagagcgagtgaacggggaggggaccgtggggaccggcttgatcgtgtcgcggacacctgctaccaagcggacgttcagcaaggaagtggaggagcggagtagagaacggccctcccagcctgaggggctgcgcaaggcagctagcctcacggaggatcgggaccgtgggcgggatgccgtgaagcgagaagctgccctacccccagtgagccccctgaaggcggctctctctgaggaggagttagagaagaaatccaaggctatcattgaggaatatctccatctcaatgacatgaaagaggcagtccagtgcgtgcaggagctggcctcaccctccttgctcttcatctttgtacggcatggtgtcgagtctacgctggagcgcagtgccattgctcgtgagcatatggggcagctgctgcaccagctgctctgtgctgggcatctgtctactgctcagtactaccaagggttgtatgaaatcttggaattggctgaggacatggaaattgacatcccccacgtgtggctctacctagcggaactggtaacacccattctgcaggaaggtggggtgcccatgggggagctgttcagggagattacaaagcctctgagaccgttgggcaaagctgcttccctgttgctggagatcctgggcctcctgtgcaaaagcatgggtcctaaaaaggtggggacgctgtggcgagaagccgggcttagctggaaggaatttctacctgaaggccaggacattggtgcattcgtcgctgaacagaaggtggagtataccctgggagaggagtcggaagcccctggccagagggcactcccctccgaggagctgaacaggcagctggagaagctgctgaaggagggcagcagtaaccagcgggtgttcgactggatagaggccaacctgagtgagcagatagtatccaacacgttagttcgagccctcatgacggctgtctgctattctgcaattatttttgagactcccctccgagtggacgttgcagtgctgaaaggcgacatagtgctgcagaaatacctgtgtgacgaagcagaaggagctacaggcgctctacgcctccaggcccttgtagtgaccttagaacagcctcccaacctgctgcggatgttctttgacgcactgtatgacgaggacgtggtgaaggaggatgccttctacagttgggagagtagcaaggaccccgctgagcagcagggcaagggtgtggcccttaaatctgtcacagccttcttcaagtggctccgtgaagtcagaggaggagtctgaccacaactgagggctggtggggccggggacctggagccccatggacacacagatggctccggctagccgcctggactgcaggggggcggcagcagcggcggtggcagtgggtgcctgtagtgtgatgtgtctgaactaataaagtggctgaagaggcaggatggcttggggctgcctgggcccccctccaggatgccgccaggtgtccctctcctcccctggggcacagagatatattatatataaagtcttgaaaattttgaaatttggtgtgtcttggggtggggaggggcaccaacgcctgcccctggggtccttttttttattttctgaaaatcactctcggactgccgtcctcgctgctgggcatatgccccagcccctgtaccacccctgctgttgcctgggcagggggaagggggggcacggtgcctgtaattattaaacatgaattcaatt

SEQ ID NO: 707 - protein, 1396 aa, Homo sapien
MSGARTASTPTPPQTGGSLEPQANGETPQVAVIVRPDDRSQGAIIADRPGLPGPEHSPSESQPSSPSPTPSPSPVLEPGSEPNLAVLSIPGDTMTTIQMSVEESTPISRETGEPYRLSPEPTPLAEPILEVEVTLSKPVPESEFSSSPLQAPTPLASHTVEIHEPNGMVPSEDLEPEVESSPELAPPPACPSESPVPIAPTAQPEELLNGAPSPPAVDLSPVSEPEEQAKEVTASVAPPTIPSATPATAPSATSPAQEEEMEEEEDEEEGEVGEAGEGESEKRGEELLPPESTPIPANLSQNLEAAAATQVAVSVPKRRRKIKELNKKEAVGDLLDAFKEANPAVPEVENQPPAGSNPGPESEGSGVPPRPEEADETWDSKEDKIHNAENIQPGEQKYEYKSDQWKPPNLEEKKRYDREFLLGFQFIFCQMQKPEGLPHISDVVLDKANKTPLRPLDPTRLQGINCGPDFTPSFANLGRTTLSTRGPPRGGPGGELARGAQAGLGPRRSQQGPRKEPRKIIATVLMTEDIKLNKAEKAWKPSSKRTAADKDRGEEDADGSKTQDLFRRWRSILNKLTPQMFQQLMKQVTQLAIDTEDASKGSLTSFLRRPFQSPTSLWPIQHVPLPHGAESAHYGKPTVTVNFRKLLLNRCQKEFEKDKDDDEVFEKKQKEMDEAATAEERERLKEELEEARDIARRCSLGNIKFIGELFKLKMLTEAIMHDCVVKLLKNHDEESLECLCRLLTTIGKDLDFEKAKPRMDQYFNQMEKIIKEKKTSSRIRFMLQDVLDLRGSNWVPRRGDQGPRPLTRSIRRLRWKTSRAHQSAAAHARAVTSVGAVLQALPSAVDFPLWMMVADTVPISKGSRPIDTSRLTKITKPGSIDSNNQLFAPGGRLSWGKGSSGGSGAQPSDAASEAARPATSTLIRFSALQQAVPTESTDNRRVVQRSSLSRERGEKAGDRGDRLERVNGEGTVGTGLIVSRTPATKRTFSKEVEERSRERPSQPEGLRKAASLTEDRDRGRDAVKREAALPPVSPLKAALSEEELEKKSKAIIEEYLHLNDMKEAVQCVQELASPSLLFIFVRHGVESTLERSAIAREHMGQLLHQLLCAGHLSTAQYYQGLYEILELAEDMEIDIPHVWLYLAELVTPILQEGGVPMGELFREITKPLRPLGKAASLLLEILGLLCKSMGPKKVGTLWREAGLSWKEFLPEGQDIGAFVAEQKVEYTLGEESEAPGQRALPSEELNRQLEKLLKEGSSNQRVFDWIEANLSEQIVSNTLVRALMTAVCYSAIIFETPLRVDVAVLKGDIVLQKYLCDEAEGATGALRLQALVVTLEQPPNLLRMFFDALYDEDVVKEDAFYSWESSKDPAEQQGKGVALKSVTAFFKWLREVRGGV

SEQ ID NO: 708 - DNA, 1474 bp, Homo sapien
aaaaagaaatcaagaatgcaattttatttacaatagtcacgccggaaatacctagaaataaatttaactgaggatgtaaaagacctctacaaggagagttcaatgcgtagcgggagcggagagctgaccccagagagccctgggcagccccacctccgccgccggcctagttaccatcacaccccggagagcccgcagctgccgcagccggccccagtcaccatcaccgcaaccatgagcagcgaggccgagacccagcagccgcccgccgccccccccgccgcccccgccctcagcgccgccgacaccaagcccggcactaccggagcggcgcagggagcggtggcccgggcggctcacatcggcggcgctggcgcgggcgacaagaaggtcatcgcaacgaaggttttgggaacagtaaaatggttcaatgtaaggaacggatatggtttcatcaacaggaatgacaccaaggaagatgtatttgtacaccagactgccataaagaagaataaccccaggaagtaccttcgcagtgtaggagatggagagactgtggagtttgatgttgttgaaggagaaaagggtgcggaggcagcaaatgttacaggtcctggtggtgttccagttcaaggcagtaaatatgcagcagaccgtaaccattatagacgctatccacgtcgtaggggtcctccacgcaattaccagcaaaattaccagaatagtgagagtggggaaaagaacgagggatcggagagtgctcccgaagccaggcccaacaacgccggccctacgcaggcgaaggttcccaccttactacatgcggagacctatgggcgtcgaccacagtattccaaccctcctgtgcagggagaagtgatggagggtgctgacaaccagggtgcaggagaacaaggtagaccagtgaggcagatatgtatcggggatatagaccacgattccgcaggggccctcctcgccaaaagacagcctagagaggacggcaatgaagaagataaagaaaatcaaggagatgagacccaaggtcagcagccacctcaagctcggtaccgccgcaacttcaattaccgacgcagacgcccagaaaaccctaaaccacaagatggcaaagagacaaaagcagccgatccaccagctgagaattcgtccgctcccgaggctgagcagggcggggctgagtaaatgccggcttaccatctctaccatcatccggtttagtcatccaacaagaagaaatatgaaattccagcaataagaaatgaacaaaagattggagctgaagacctaaagtgcttgctttttgcccgttgaccagataaatagaactatctgcattatctatgcagcatggggtttttattatgttttacctaaagacgtctctttttggtaataacaaaccgtgttttttaaaaaagcctggtttttctcaatacgcctttaaaggaattcc

SEQ ID NO: 709 - protein, 322 aa, Homo sapien
MSSEAETQQPPAAPPAAPALSAADTKPGTTGAAQGAVARAAHIGGAGAGDKKVIATKVLGTVKWFNVRNGYGFINRNDTKEDVFVHQTAIKKNNPRKYLRSVGDGETVEFDVVEGEKGAEAANVTGPGGVPVQGSKYAADRNHYRRYPRRRGPPRNYQQNYQNSESGEKNEGSESAPEARPNNAGPTQAKVPTLLHAETYGRRPQYSNPPVQGEVMEGADNQGAGEQGRPVRQICIGDIDHDSAGALLAKRQPREDGNEEDKENQGDETQGQQPPQARYRRNFNYRRRRPENPKPQDGKETKAADPPAENSSAPEAEQGGAE

SEQ ID NO: 710 - DNA, 3033 bp, Homo sapien
ggtaagagaagactggaagcatgtcggagttttggttaatttctgcccctggcgataaggaaaatttgcaagctctggagaggatgaatactgtaacctccaagtccaacctgtcttataataccaaattcgctattcctgacttcaaggtggggaccttggattccctggttggcctctctgatgagttggggaaactcgacacctttgctgaaagcctcataaggagaatggctcagagcgtggtggaagtcatggaggactcaaaggggaaggtccaggagcacctcctggcaaacggagttgacttaacatcctttgtgacccactttgaatgggacatggccaaatatcctgtcaagcagccgctcgtgagtgtggtggacacaatagccaagcaactggcgcagatcgagatggacctgaagtcccgaacggccgcctacgacactctgaagacaaacctggagaacctggaaaagaaatccatggggaacctcttcacccggacactgagtgatattgtgagcaaagaggacttcgtgctggattctgaatatctcgtcacacttctggtcatcgtccccaaaccaaactactcacaatggcaaaaaacctacgaatctctctcagacatggtggtccctcgatcaaccaaactcattactgaggacaaggaagggggccttttcactgtgactctgtttcgaaaagtgattgaagatttcaaaaccaaggccaaagaaaacaagttcactgttcgtgaattttactatgatgagaaggaaattgaaagggaaagggaggagatggccagattgctgtctgataagaagcaacagtatggccccctgctgcgctggctcaaggtgaacttcagtgaagccttcattgcctggatccacatcaaggccctgagagtgtttgtggagtccgtgctcaggtatggactaccagtgaacttccaggcagtgctcctgcagccgcataagaagtcatccaccaagcgtttaagagaggttctaaactctgtcttccgacatctggatgaagtagccgctacaagtatactggatgcatctgtggagatcccgggactgcaactcaataaccaagactattttccttatgtctacttccatattgaccttagtcttcttgactagaaaggccagctggcacctctgtctcatgttcgtgcagattattacagacacctctttcctttagccagagaatggttcaaatgtcttacagaactaagatctttttcagagaaattgctcacaaaagttagtgacagttgtatttatttttttaagttacaataaaatgctctcaagtcctttgaatgttccaacaaattcaaaacttcattttctgaatgttttacataaatgcgaactacctgttcgcattggtaacctgctgctgtatttcatgtcttaacggctattttgaggttcattaacaacatagaaagccttgaactgtataaccagctagattccttaataattagtcactagagacagcccaaagacaaatattgggcaggaaatcagttctcactgagcccggtttccatgtaaaatctctgttgtggtgggcataggtggcaccatctaaagaaaagaggtcttgttttttgtttaaaaaagtttgtggggaggaaagacatctgtgtatcacttcaaaatattgatttactgctaaacatcactctgaatttatgatgtggatactaacttcatacatttatcggcattgtccaaaatattttattctttaatggaaaaagccattaatattcaaatgaagggatcacattaaaaaaaacccatacataagaaacagcctccaagaacattcaagcagcagtcagagagaaaaatgtttcgacagccaagttttcttcaaaatattatgtgacagaatacgactcaattcaccggctacaacaattcatagaatttttcaatgttttcttgagatgcaaaagttcactgttgcagtgttttcaaatgaccaatcaagtactacttcttggttaaaaggccactggtagagtcatctgagtgtagagaatgtcccttcactgctggaaaaatccactggctcccaagaaaagaaaatggtctgaagcctctgttgtggctctcacaactcatctttccctaagtcatcaagctccacatcactgaggtcaatgtcatcctccacgggaagctgggagacgacagaaagccactgttagatctgcagaaggggacaccctggaaggtcaacatctcattttatggaagagcgactctctggagctactcctgctacaatccaggttctcctcagtctgactcctaccctgaccttcgtacctatgattatacggatggaaaagctcagaactcaggtgaaacatttcaacatcacatcactcaccattttaacactggaagccacttgaacgtgtccttttgaggagggtgggacacaacagtacagaaataagtgctaatttcaaagctatcattttctatttttctaagataaagtaaatgaattccaggttaaatgttcactttaaggtaataatcaggaaagcaaccttactactgaaatgtatcttggctgtcaagagtatcaaatgccatgcagcacttaaacttgtgataaggaagatgaagggtcttcagagaagaacctcttaaaaggcccacgggtgcaccagggctgaggtctgatgggaaggacttgactccaggtgcagagatgcacaggctcaagagagtaaaccaggactgctgcccgcacagcttccctcccgggcactcacctcgccatccctgccgtcccaaggctctctctcaacgatggtagggaaagccccgcctcctacaggtgccgtggagccacgcccaaaagagagctcccttagggaaaaatgaccaaaacacacacacacatttacaatggactgctggtgcagaagaataaacaactttaaaaataaaaaaaaaaaaaaaaaaaaaa

SEQ ID NO: 711 - protein, 381 aa, Homo sapien
MSEFWLISAPGDKENLQALERMNTVTSKSNLSYNTKFAIPDFKVGTLDSLVGLSDELGKLDTFAESLIRRMAQSVVEVMEDSKGKVQEHLLANGVDLTSFVTHFEWDMAKYPVKQPLVSVVDTIAKQLAQIEMDLKSRTAAYDTLKTNLENLEKKSMGNLFTRTLSDIVSKEDFVLDSEYLVTLLVIVPKPNYSQWQKTYESLSDMVVPRSTKLITEDKEGGLFTVTLFRKVIEDFKTKAKENKFTVREFYYDEKEIEREREEMARLLSDKKQQYGPLLRWLKVNFSEAFIAWIHIKALRVFVESVLRYGLPVNFQAVLLQPHKKSSTKRLREVLNSVFRHLDEVAATSILDASVEIPGLQLNNQDYFPYVYFHIDLSLLD

SEQ ID NO: 712 - DNA, 3198 bp, Homo sapien
ctgccactgccacctcgcggatcaggagccagcgttgttcgcccgacgcctcgctgccggtgggaggaagcgagagggaagccgcttgggctcttgtcgccgctgctcgcccaccgcctggaagagccgagccccggccagtcggtcgcttgccaccgctcgtagccgttacccgcgggccgccacagccgccggcgggagaggcgcgcgccatggcttctggagccgattcaaaaggtgatgacctatcaacagccattctcaaacagaagaaccgtcccaatcggttaattgttgatgaagccatcaatgaggacaacagtgtggtgtccttgtcccagcccaagatggatgaattgcagttgttccgaggtgacacagtgttgctgaaaggaaagaagagacgagaagctgtttgcatcgtcctttctgatgatacttgttctgatgagaagattcggatgaatagagttgttcggaataaccttcgtgtacgcctaggggatgtcatcagcatccagccatgccctgatgtgaagtacggcaaacgtatccatgtgctgcccattgatgacacagtggaaggcattactggtaatctcttcgaggtataccttaagccgtacttcctggaagcgtatcgacccatccggaaaggagacatttttcttgtccgtggtgggatgcgtgctgtggagttcaaagtggtggaaacagatcctagcccttattgcattgttgctccagacacagtgatccactgcgaaggggagcctatcaaacgagaggatgaggaagagtccttgaatgaagtagggtatgatgacattggtggctgcaggaagcagctagctcagatcaaagagatggtggaactgcccctgagacatcctgccctctttaaggcaattggtgtgaagcctcctagaggaatcctgctttacggacctcctggaacaggaaagaccctgattgctcgagctgtagcaaatgagactggagccttcttcttcttgatcaatggtcctgagatcatgagcaaattggctggtgagtctgagagcaaccttcgtaaagcctttgaggaggctgagaagaatgctcctgccatcatcttcattgatgagctagatgccatcgctcccaaaagagagaaaactcatggcgaggtggagcggcgcattgtatcacagttgttgaccctcatggatggcctaaagcagagggcacatgtgattgttatggcagcaaccaacagacccaacagcattgacccagctctacggcgatttggtcgctttgacagggaggtagatattggaattcctgatgctacaggacgcttagagattcttcagatccataccaagaacatgaagctggcagatgatgtggacctggaacaggtagccaatgagactcacgggcatgtgggtgctgacttagcagccctgtgctcagaggctgctctgcaagccatccgcaagaagatggatctcattgacctagaggatgagaccattgatgccgaggtcatgaactctctagcagttactatggatgacttccggtgggccttgagccagagtaacccatcagcactgcgggaaaccgtggtagaggtgccacaggtaacctgggaagacatcgggggcctagaggatgtcaaacgtgagctacaggagctggtccagtatcctgtggagcacccagacaaattcctgaagtttggcatgacaccttccaagggagttctgttctatggacctcctggctgtgggaaaactttgttggccaaagccattgctaatgaatgccaggccaacttcatctccatcaagggtcctgagctgctcaccatgtggtttggggagtctgaggccaatgtcagagaaatctttgacaaggcccgccaagctgccccctgtgtgctattctttgatgagctggattcgattgccaaggctcgtggaggtaacattggagatggtggtggggctgctgaccgagtcatcaaccagatcctgacagaaatggatggcatgtccacaaaaaaaaatgtgttcatcattggcgctaccaaccggcctgacatcattgatcctgccatcctcagacctggccgtcttgatcagctcatctacatcccacttcctgatgagaagtcccgtgttgccatcctcaaggctaacctgcgcaagtccccagttgccaaggatgtggacttggagttcctggctaaaatgactaatggcttctctggagctgacctgacagagatttgccagcgtgcttgcaagctggccatccgtgaatccatcgagagtgagattaggcgagaacgagagaggcagacaaacccatcagccatggaggtagaagaggatgatccagtgcctgagatccgtcgagatcactttgaagaagccatgcgctttgcgcgccgttctgtcagtgacaatgacattcggaagtatgagatgtttgcccagacccttcagcagagtcggggctttggcagcttcagattcccttcagggaaccagggtggagctggccccagtcagggcagtggaggcggcacaggtggcagtgtatacacagaagacaatgatgatgacctgtatggctaagtggtggtggccagcgtgcagtgagctggcctgcctggaccttgttccctgggggtggggcgcttgcccaggagagggaccaggggtgcgcccacagcctgctccattctccagtctgaacagttcagctacagtctgactctggacagggggtttctgttgcaaaaatacaaaacaaaagcgataaaataaaagcgattttcatttggtaggcggagagtgaattaccaacagggaattgggccttgggcctatgccatttctgttgtagtttggggcagtgcaggggacctgtgtggggtgtgaaccaaggcactactgccacctgccacagtaaagcatctgcacttgactcaatgctgcccgagccctcccttccccctatccaacctgggtaggtgggtaggggccacagttgctggatgtttatatagagagtaggttgatttattttacatgcttttgagttaatgttggaaaactaatcacaagcagtttctaaaccaaaaaatgacatgttgtaaaaggacaataaacgttgggtcaaaatggaaaaaaaaaaaaa

SEQ ID NO: 713 - protein, 806 aa, Homo sapien
MASGADSKGDDLSTAILKQKNRPNRLIVDEAINEDNSVVSLSQPKMDELQLFRGDTVLLKGKKRREAVCIVLSDDTCSDEKIRMNRVVRNNLRVRLGDVISIQPCPDVKYGKRIHVLPIDDTVEGITGNLFEVYLKPYFLEAYRPIRKGDIFLVRGGMRAVEFKVVETDPSPYCIVAPDTVIHCEGEPIKREDEEESLNEVGYDDIGGCRKQLAQIKEMVELPLRHPALFKAIGVKPPRGILLYGPPGTGKTLIARAVANETGAFFFLINGPEIMSKLAGESESNLRKAFEEAEKNAPAIIFIDELDAIAPKREKTHGEVERRIVSQLLTLMDGLKQRAHVIVMAATNRPNSIDPALRRFGRFDREVDIGIPDATGRLEILQIHTKNMKLADDVDLEQVANETHGHVGADLAALCSEAALQAIRKKMDLIDLEDETIDAEVMNSLAVTMDDFRWALSQSNPSALRETVVEVPQVTWEDIGGLEDVKRELQELVQYPVEHPDKFLKFGMTPSKGVLFYGPPGCGKTLLAKAIANECQANFISIKGPELLTMWFGESEANVREIFDKARQAAPCVLFFDELDSIAKARGGNIGDGGGAADRVINQILTEMDGMSTKKNVFIIGATNRPDIIDPAILRPGRLDQLIYIPLPDEKSRVAILKANLRKSPVAKDVDLEFLAKMTNGFSGADLTEICQRACKLAIRESIESEIRRERERQTNPSAMEVEEDDPVPEIRRDHFEEAMRFARRSVSDNDIRKYEMFAQTLQQSRGFGSFRFPSGNQGGAGPSQGSGGGTGGSVYTEDNDDDLYG

SEQ ID NO: 714 - DNA, 1697 bp, Homo sapien
ggatcgaggggactctgaccacagcctgtggctgggaagggagacagaggcggcggcggctcaggggaaacgaggctgcagtggtggtagtaggaagatgtcgggcgaggacgagcaacaggagcaaactatcgctgaggacctggtcgtgaccaagtataagatggggggcgacatcgccaacagggtacttcggtccttggtggaagcatctagctcaggtgtgtcggtactcagcctgtgtgagaaaggtgatgccatgattatggaagaaacagggaaaatcttcaagaaagaaaaggaaatgaagaaaggtattgcttttcccaccagcatttcggtaaataactgtgtatgtcacttctcccctttgaagagcgaccaggattatattctcaaggaaggtgacttggtaaaaattgaccttggggtccatgtggatggcttcatcgctaatgtagctcacacttttgtggttgatgtagctcaggggacccaagtaacagggaggaaagcagatgttattaaggcagctcacctttgtgctgaagctgccctacgcctggtcaaacctggaaatcagaacacacaagtgacagaagcctggaacaaagttgcccactcatttaactgcacgccaatagaaggtatgctgtcacaccagttgaagcagcatgtcatcgatggagaaaaaaccattatccagaatcccacagaccagcagaagaaggaccatgaaaaagctgaatttgaggtacatgaagtatatgctgtggatgttctcgtcagctcaggagagggcaaggccaaggatgcaggacagagaaccactatttacaaacgagacccctctaaacagtatggactgaaaatgaaaacttcacgtgccttcttcagtgaggtggaaaggcgttttgatgccatgccgtttactttaagagcatttgaagatgagaagaaggctcggatgggtgtggtggagtgcgccaaacatgaactgctgcaaccatttaatgttctctatgagaaggagggtgaatttgttgcccagtttaaatttacagttctgctcatgcccaatggccccatgcggataaccagtggtcccttcgagcctgacctctacaagtctgagatggaggtccaggatgcagagctaaaggccctcctccagagttctgcaagtcgaaaaacccagaaaaagaaaaaaaagaaggcctccaagactgcagagaatcccaccagtggggaaacattagaagaaaatgaagctggggactgaggtgcgtcccatctccccagcttgctgctcctgcctcatccccttcccaccaaaccccagactctgtgaagtgcagttcttctccacctaggaccgccagcagagcggggggatctccctgcccccaccccagttccccaacccactcccttccaacaacaaccagctccaactgactctggtcttgggaggtgaggcttcccaaccacggaagactactttaaacgaaaaaaagaaattgaataataaaatcaggagtcaaaattcatcgtcttcaaggcccctctttctagccttttctactactctctgcttggtcaaggtttgtgccccactacagaacagggctaaattagccaccaccactgaaaactcagccgaatttttttataccactctgacgtcagcatttttt

SEQ ID NO: 715 - protein, 394 aa, Homo sapien
MSGEDEQQEQTIAEDLVVTKYKMGGDIANRVLRSLVEASSSGVSVLSLCEKGDAMIMEETGKIFKKEKEMKKGIAFPTSISVNNCVCHFSPLKSDQDYILKEGDLVKIDLGVHVDGFIANVAHTFVVDVAQGTQVTGRKADVIKAAHLCAEAALRLVKPGNQNTQVTEAWNKVAHSFNCTPIEGMLSHQLKQHVIDGEKTIIQNPTDQQKKDHEKAEFEVHEVYAVDVLVSSGEGKAKDAGQRTTIYKRDPSKQYGLKMKTSRAFFSEVERRFDAMPFTLRAFEDEKKARMGVVECAKHELLQPFNVLYEKEGEFVAQFKFTVLLMPNGPMRITSGPFEPDLYKSEMEVQDAELKALLQSSASRKTQKKKKKKASKTAENPTSGETLEENEAGD

SEQ ID NO: 716 - DNA, 937 bp, Homo sapien
gttcttgcctggtgtcggtggttagtttctgcgacttgtgttgggactgctgataggaagatgtcttcaggaaatgctaaaattgggcaccctgcccccaacttcaaagccacagctgttatgccagatggtcagtttaaagatatcagcctgtctgactacaaaggaaaatatgttgtgttcttcttttaccctcttgacttcacctttgtgtgccccacggagatcattgctttcagtgatagggcagaagaatttaagaaactcaactgccaagtgattggtgcttctgtggattctcacttctgtcatctagcatgggtcaatacacctaagaaacaaggaggactgggacccatgaacattcctttggtatcagacccgaagcgcaccattgctcaggattatggggtcttaaaggctgatgaaggcatctcgttcaggggcctttttatcattgatgataagggtattcttcggcagatcactgtaaatgacctccctgttggccgctctgtggatgagactttgagactagttcaggccttccagttcactgacaaacatggggaagtgtgcccagctggctggaaacctggcagtgataccatcaagcctgatgtccaaaagagcaaagaatatttctccaagcagaagtgagcgctgggctgttttagtgccaggctgcggtgggcagccatgagaacaaaacctcttctgtattttttttttccattagtaaaacacaagacttcagattcagccgaattgtggtgtcttacaaggcaggcctttcctacagggggtggagagaccagcctttcttcctttggtaggaatggcctgagttggcgttgtgggcaggctactggtttgtatgatgtattagtagagcaacccattaatcttttgtagtttgtattaaacttgaactgag

SEQ ID NO: 717 - protein, 199 aa, Homo sapien
MSSGNAKIGHPAPNFKATAVMPDGQFKDISLSDYKGKYVVFFFYPLDFTFVCPTEIIAFSDRAEEFKKLNCQVIGASVDSHFCHLAWVNTPKKQGGLGPMNIPLVSDPKRTIAQDYGVLKADEGISFRGLFIIDDKGILRQITVNDLPVGRSVDETLRLVQAFQFTDKHGEVCPAGWKPGSDTIKPDVQKSKEYFSKQK

SEQ ID NO: 718 - DNA, 5015 bp, Homo sapien
cgggtggcggctcgggacggaggacgcgctagtgttcttctgtgtggcagttcagaatgatggatcaagctagatcagcattctctaacttgtttggtggagaaccattgtcatatacccggttcagcctggctcggcaagtagatggcgataacagtcatgtggagatgaaacttgctgtagatgaagaagaaaatgctgacaataacacaaaggccaatgtcacaaaaccaaaaaggtgtagtggaagtatctgctatgggactattgctgtgatcgtctttttcttgattggatttatgattggctacttgggctattgtaaaggggtagaaccaaaaactgagtgtgagagactggcaggaaccgagtctccagtgagggaggagccaggagaggacttccctgcagcacgtcgcttatattgggatgacctgaagagaaagttgtcggagaaactggacagcacagacttcaccggcaccatcaagctgctgaatgaaaattcatatgtccctcgtgaggctggatctcaaaaagatgaaaatcttgcgttgtatgttgaaaatcaatttcgtgaatttaaactcagcaaagtctggcgtgatcaacattttgttaagattcaggtcaaagacagcgctcaaaactcggtgatcatagttgataagaacggtagacttgtttacctggtggagaatcctgggggttatgtggcgtatagtaaggctgcaacagttactggtaaactggtccatgctaattttggtactaaaaaagattttgaggatttatacactcctgtgaatggatctatagtgattgtcagagcagggaaaatcacctttgcagaaaaggttgcaaatgctgaaagcttaaatgcaattggtgtgttgatatacatggaccagactaaatttcccattgttaacgcagaactttcattctttggacatgctcatctggggacaggtgacccttacacacctggattcccttccttcaatcacactcagtttccaccatctcggtcatcaggattgcctaatatacctgtccagacaatctccagagctgctgcagaaaagctgtttgggaatatggaaggagactgtccctctgactggaaaacagactctacatgtaggatggtaacctcagaaagcaagaatgtgaagctcactgtgagcaatgtgctgaaagagataaaaattcttaacatctttggagttattaaaggctttgtagaaccagatcactatgttgtagttggggcccagagagatgcatggggccctggagctgcaaaatccggtgtaggcacagctctcctattgaaacttgcccagatgttctcagatatggtcttaaaagatgggtttcagcccagcagaagcattatctttgccagttggagtgctggagactttggatcggttggtgccactgaatggctagagggatacctttcgtccctgcatttaaaggctttcacttatattaatctggataaagcggttcttggtaccagcaacttcaaggtttctgccagcccactgttgtatacgcttattgagaaaacaatgcaaaatgtgaagcatccggttactgggcaatttctatatcaggacagcaactgggccagcaaagttgagaaactcactttagacaatgctgctttccctttccttgcatattctggaatcccagcagtttctttctgtttttgcgaggacacagattatccttatttgggtaccaccatggacacctataaggaactgattgagaggattcctgagttgaacaaagtggcacgagcagctgcagaggtcgctggtcagttcgtgattaaactaacccatgatgttgaattgaacctggactatgagaggtacaacagccaactgctttcatttgtgagggatctgaaccaatacagagcagacataaaggaaatgggcctgagtttacagtggctgtattctgctcgtggagacttcttccgtgctacttccagactaacaacagatttcgggaatgctgagaaaacagacagatttgtcatgaagaaactcaatgatcgtgtcatgagagtggagtatcacttcctctctccctacgtatctccaaaagagtctcctttccgacatgtcttctggggctccggctctcacacgctgccagctttactggagaacttgaaactgcgtaaacaaaataacggtgcttttaatgaaacgctgttcagaaaccagttggctctagctacttggactattcagggagctgcaaatgccctctctggtgacgtttgggacattgacaatgagttttaaatgtgatacccatagcttccatgagaacagcagggtagtctggtttctagacttgtgctgatcgtgctaaattttcagtagggctacaaaacctgatgttaaaattccatcccatcatcttggtactactagatgtctttaggcagcagcttttaatacagggtagataacctgtacttcaagttaaagtgaataaccacttaaaaaatgtccatgatggaatattcccctatctctagaattttaagtgctttgtaatgggaactgcctctttcctgttgttgttaatgaaaatgtcagaaaccagttatgtgaatgatctctctgaatcctaagggctggtctctgctgaaggttgtaagtggtcgcttactttgagtgatcctccaacttcatttgatgctaaataggagataccaggttgaaagaccttctccaaatgagatctaagcctttccataaggaatgtagctggtttcctcattcctgaaagaaacagttaactttcagaagagatgggcttgttttcttgccaatgaggtctgaaatggaggtccttctgctggataaaatgaggttcaactgttgattgcaggaataaggccttaatatgttaacctcagtgtcatttatgaaaagaggggaccagaagccaaagacttagtatattttcttttcctctgtcccttcccccataagcctccatttagttctttgttatttttgtttcttccaaagcacattgaaagagaaccagtttcaggtgtttagttgcagactcagtttgtcagactttaaagaataatatgctgccaaattttggccaaagtgttaatcttaggggagagctttctgtccttttggcactgagatatttattgtttatttatcagtgacagagttcactataaatggtgtttttttaatagaatataattatcggaagcagtgccttccataattatgacagttatactgtcggttttttttaaataaaagcagcatctgctaataaaacccaacagatactggaagttttgcatttatggtcaacacttaagggttttagaaaacagccgtcagccaaatgtaattgaataaagttgaagctaagatttagagatgaattaaatttaattaggggttgctaagaagcgagcactgaccagataagaatgctggttttcctaaatgcagtgaattgtgaccaagttataaatcaatgtcacttaaaggctgtggtagtactcctgcaaaattttatagctcagtttatccaaggtgtaactctaattcccattttgcaaaatttccagtacctttgtcacaatcctaacacattatcgggagcagtgtcttccataatgtataaagaacaaggtagtttttacctaccacagtgtctgtatcggagacagtgatctccatatgttacactaagggtgtaagtaattatcgggaacagtgtttcccataattttcttcatgcaatgacatcttcaaagcttgaagatcgttagtatctaacatgtatcccaactcctataattccctatcttttagttttagttgcagaaacattttgtggtcattaagcattgggtgggtaaattcaaccactgtaaaatgaaattactacaaaatttgaaatttagcttgggtttttgttacctttatggtttctccaggtcctctacttaatgagatagtagcatacatttataatgtttgctattgacaagtcattttaactttatcacattatttgcatgttacctcctataaacttagtgcggacaagttttaatccagaattgaccttttgacttaaagcagggggactttgtatagaaggtttgggggctgtggggaaggagagtcccctgaaggtctgacacgtctgcctacccattcgtggtgatcaattaaatgtaggtatgaataagttcgaagctccgtgagtgaaccatcattataaacgtgatgatcagctgtttgtcatagggcagttggaaacggcctcctagggaaaagttcatagggtctcttcaggttcttagtgtcacttacctagatttacagcctcacttgaatgtgtcactactcacagtctctttaatcttcagttttatctttaatctcctcttttatcttggactgacatttagcgtagctaagtgaaaaggtcatagctgagattcctggttcgggtgttacgcacacgtacttaaatgaaagcatgtggcatgttcatcgtataacacaatatgaatacagggcatgcattttgcagcagtgagtctcttcagaaaacccttttctacagttagggttgagttacttcctatcaagccagtacgtgctaacaggctcaatattcctgaatgaaatatcagactagtgacaagctcctggtcttgagatgtcttctcgttaaggagatgggccttttggaggtaaaggataaaatgaatgagttctgtcatgattcactattctagaacttgcatgacctttactgtgttagctctttgaatgttcttgaaattttagactttctttgtaaacaaataatatgtccttatcattgtataaaagctgttatgtgcaacagtgtggagattccttgtctgatttaataaaatacttaaacactgaaaaaaaaaaaaaaaaaaa

SEQ ID NO: 719 - protein, 760 aa, Homo sapien
MMDQARSAFSNLFGGEPLSYTRFSLARQVDGDNSHVEMKLAVDEEENADNNTKANVTKPKRCSGSICYGTIAVIVFFLIGFMIGYLGYCKGVEPKTECERLAGTESPVREEPGEDFPAARRLYWDDLKRKLSEKLDSTDFTGTIKLLNENSYVPREAGSQKDENLALYVENQFREFKLSKVWRDQHFVKIQVKDSAQNSVIIVDKNGRLVYLVENPGGYVAYSKAATVTGKLVHANFGTKKDFEDLYTPVNGSIVIVRAGKITFAEKVANAESLNAIGVLIYMDQTKFPIVNAELSFFGHAHLGTGDPYTPGFPSFNHTQFPPSRSSGLPNIPVQTISRAAAEKLFGNMEGDCPSDWKTDSTCRMVTSESKNVKLTVSNVLKEIKILNIFGVIKGFVEPDHYVVVGAQRDAWGPGAAKSGVGTALLLKLAQMFSDMVLKDGFQPSRSIIFASWSAGDFGSVGATEWLEGYLSSLHLKAFTYINLDKAVLGTSNFKVSASPLLYTLIEKTMQNVKHPVTGQFLYQDSNWASKVEKLTLDNAAFPFLAYSGIPAVSFCFCEDTDYPYLGTTMDTYKELIERIPELNKVARAAAEVAGQFVIKLTHDVELNLDYERYNSQLLSFVRDLNQYRADIKEMGLSLQWLYSARGDFFRATSRLTTDFGNAEKTDRFVMKKLNDRVMRVEYHFLSPYVSPKESPFRHVFWGSGSHTLPALLENLKLRKQNNGAFNETLFRNQLALATWTIQGAANALSGDVWDIDNEF

SEQ ID NO: 720 - DNA, 2742 bp, Homo sapien
gtcactcgtataaaaacctatgctttgaaggttctcgtgtgtctcggcctgcaggtctcgctcagagctgtgtccctgaacatccaccctgctggggtggcttgacgcacttctgtgcaaatctgttcgctcgcaaccctacctacctctctcccgaaccggagaaaaccttcggcggggtccttccgggttttgtgtcgaatctgcggcggcgacccggcgccgcgtcacgcggtggtgaatgtgcggcagtacgcgcgccgcgtcgtttacgcggcgatttcatcatgctccgagccggcggcgcgcgccgcttccgtcgccaccctctctggacagcccagggccgcaggctcatgccctctccgcgtccagtgctgcttagaggtgctcgcgccgctctgctgctgctgctgccgccccggctcttagcccgaccctcgctcctcctccgccggtccctcagcgcggcctcctgcgccccgatctccttgcccgccgccgcctcccggagcagcatggacggcgcgggggctgaggaggtgctggcacctctgaggctagcagtgcgccagcagggagatcttgtgcgaaaactcaaagaagataaagcaccccaagtagacgtagacaaagcagtggctgagctcaaagcccgcaagagggttctggaagcaaaggagctggcgttacagcccaaagatgatattgtagaccgagcaaaaatggaagataccctgaagaggaggtttttctatgatcaagcttttgctatttatggaggtgttagtggtctgtatgactttgggccagttggctgtgctttgaagaacaatattattcagacctggaggcagcactttatccaagaggaacagatcctggagatcgattgcaccatgctcacccctgagccagttttaaagacctctggccatgtagacaaatttgctgacttcatggtgaaagacgtaaaaaatggagaatgttttcgtgctgaccatctattaaaagctcatttacagaaattgatgtctgataagaagtgttctgtcgaaaagaaatcagaaatggaaagtgttttggcccagcttgataactatggacagcaagaacttgcggatctttttgtgaactataatgtaaaatctcccattactggaaatgatctatcccctccagtgtcttttaacttaatgttcaagactttcattgggcctggaggaaacatgcctgggtacttgagaccagaaactgcacaggggattttcttgaatttcaaacgacttttggagttcaaccaaggaaagttgccttttgctgctgcccagattggaaattcttttagaaatgagatctcccctcgatctggactgatcagagtcagagaattcacaatggcagaaattgagcactttgtagatcccagtgagaaagaccaccccaagttccagaatgtggcagaccttcacctttatttgtattcagcaaaagcccaggtcagcggacagtccgctcggaaaatgcgcctgggagatgctgttgaacagggtgtgattaataacacagtattaggctatttcattggccgcatctacctctacctcacgaaggttggaatatctccagataaactccgcttccggcagcacatggagaatgagatggcccattatgcctgtgactgttgggatgcagaatccaaaacatcctacggttggattgagattgttggatgtgctgatcgttcctgttatgacctctcctgtcatgcacgagccaccaaagtcccacttgtagctgagaaacctctgaaagaacccaaaacagtcaatgttgttcagtttgaacccagtaagggagcaattggtaaggcatataagaaggatgcaaaactggtgatggagtatcttgccatttgtgatgagtgctacattacagaaatggagatgctgctgaatgagaaaggggaattcacaattgaaactgaagggaaaacatttcagttaacaaaagacatgatcaatgtgaagagattccagaaaacactatatgtggaagaagttgttccgaatgtaattgaaccttccttcggcctgggtaggatcatgtatacggtatttgaacatacattccatgtacgagaaggagatgaacagagaacattcttcagtttccctgctgtagttgctccattcaaatgttccgtcctcccactgagccaaaaccaggagttcatgccatttgtcaaggaattatcggaagccctgaccaggcatggagtatctcacaaagtagacgattcctctgggtcaatcggaaggcgctatgccaggactgatgagattggcgtggcttttggtgtcaccattgactttgacacagtgaacaagaccccccacactgcaactctgagggaccgtgactcaatgcggcagataagagcagagatctctgagctgcccagcatagtccaagacctagccaatggcaacatcacatgggctgatgtggaggccaggtatcctctgtttgaagggcaagagactggtaaaaaagagacaatcgaggaatgaggacaattttgacaacttttgaccacttgcgctaataaaaaaaaaaaaactactcttatgtccactttacaaaagaaaacagcattgtgattactcccagggaccgtattttatcttcagtggctgcctgattttacccccacaattaaagttgaaggaatcctga

SEQ ID NO: 721 - protein, 685 aa, Homo sapien
MDGAGAEEVLAPLRLAVRQQGDLVRKLKEDKAPQVDVDKAVAELKARKRVLEAKELALQPKDDIVDRAKMEDTLKRRFFYDQAFAIYGGVSGLYDFGPVGCALKNNIIQTWRQHFIQEEQILEIDCTMLTPEPVLKTSGHVDKFADFMVKDVKNGECFRADHLLKAHLQKLMSDKKCSVEKKSEMESVLAQLDNYGQQELADLFVNYNVKSPITGNDLSPPVSFNLMFKTFIGPGGNMPGYLRPETAQGIFLNFKRLLEFNQGKLPFAAAQIGNSFRNEISPRSGLIRVREFTMAEIEHFVDPSEKDHPKFQNVADLHLYLYSAKAQVSGQSARKMRLGDAVEQGVINNTVLGYFIGRIYLYLTKVGISPDKLRFRQHMENEMAHYACDCWDAESKTSYGWIEIVGCADRSCYDLSCHARATKVPLVAEKPLKEPKTVNVVQFEPSKGAIGKAYKKDAKLVMEYLAICDECYITEMEMLLNEKGEFTIETEGKTFQLTKDMINVKRFQKTLYVEEVVPNVIEPSFGLGRIMYTVFEHTFHVREGDEQRTFFSFPAVVAPFKCSVLPLSQNQEFMPFVKELSEALTRHGVSHKVDDSSGSIGRRYARTDEIGVAFGVTIDFDTVNKTPHTATLRDRDSMRQIRAEISELPSIVQDLANGNITWADVEARYPLFEGQETGKKETIEE

SEQ ID NO: 722 - DNA, 1934 bp, Homo sapien
gtccatggggaccctcgccttcgatgaatatgggcgccctttcctcatcatcaaggatcaggaccgcaagtcccgtcttatgggacttgaggccctcaagtctcatataatggcagcaaaggctgtagcaaatacaatgagaacatcacttggaccaaatgggcttgataagatgatggtggataaggatggggatgtgactgtaactaatgatggggccaccatcttaagcatgatggatgttgatcatcagattgccaagctgatggtggaactgtccaagtctcaggatgatgaaattggagatggaaccacaggagtggttgtcctggctggtgccttgttagaagaagcggagcaattgctagaccgaggcattcacccaatcagaatagccgatggctatgagcaggctgctcgcgttgctattgaacacctggacaagatcagcgatagcgtccttgttgacataaaggacaccgaacccctgattcagacagcaaaaaccacgctgggctccaaagtggtcaacagttgtcaccgacagatggctgagattgctgtgaatgccgtcctcactgtagcagatatggagcggagagacgttgactttgagcttatcaaagtagaaggcaaagtgggcggcaggctggaggacactaaactgattaagggcgtgattgtggacaaggatttcagtcacccacagatgccaaaaaaagtggaagatgcgaagattgcaattctcacatgtccatttgaaccacccaaaccaaaaacaaagcataagctggatgtgacctctgtcgaagattataaagcccttcagaaatacgaaaaggagaaatttgaagagatgattcaacaaattaaagagactggtgctaacctagcaatttgtcagtggggctttgatgatgaagcaaatcacttacttcttcagaacaacttgcctgcggttcgctgggtaggaggacctgaaattgagctgattgccatcgcaacaggagggcggatcgtccccaggttctcagagctcacagccgagaagctgggctttgctggtcttgtacaggagatctcatttgggacaactaaggataaaatgctggtcatcgagcagtgtaagaactccagagctgtaaccatttttattagaggaggaaataagatgatcattgaggaggcgaaacgatcccttcacgatgctttgtgtgtcatccggaacctcatccgcgataatcgtgtggtgtatggaggaggggctgctgagatatcctgtgccctggcagttagccaagaggcggataagtgccccaccttagaacagtatgccatgagagcgtttgccgacgcactggaggtcatccccatggccctctctgaaaacagtggcatgaatcccatccagactatgaccgaagtccgagccagacaggtgaaggagatgaaccctgctcttggcatcgactgtttgcacaaggggacaaatgatatgaagcaacagcatgtcatagaaaccttgattggcaaaaagcaacagatatctcttgcaacacaaatggttagaatgattttgaagattgatgacattcgtaagcctggagaatctgaagaatgaagacattgagaaaactatgtagcaagatccacttctgtgattaagtaaatggatgtctcgtgatgcgtctacagttatttattgttacatccttttccagacactgtagatgctataataaaaatagctgtttggtaaccatagtttcacttgttcaaagctgtgtaatcgtgggggtactatctcaactgcttttgtattcattgtattaaaagaatctgtttaaacaacctttatcttctcttcgggtttaagaaacgtttattgtaacagtaattaaatgctgccttaattgaaaaaaaaaaaaaaaaaa

SEQ ID NO: 723 - protein, 539 aa, Homo sapien
SMGTLAFDEYGRPFLIIKDQDRKSRLMGLEALKSHIMAAKAVANTMRTSLGPNGLDKMMVDKDGDVTVTNDGATILSMMDVDHQIAKLMVELSKSQDDEIGDGTTGVVVLAGALLEEAEQLLDRGIHPIRIADGYEQAARVAIEHLDKISDSVLVDIKDTEPLIQTAKTTLGSKVVNSCHRQMAEIAVNAVLTVADMERRDVDFELIKVEGKVGGRLEDTKLIKGVIVDKDFSHPQMPKKVEDAKIAILTCPFEPPKPKTKHKLDVTSVEDYKALQKYEKEKFEEMIQQIKETGANLAICQWGFDDEANHLLLQNNLPAVRWVGGPEIELIAIATGGRIVPRFSELTAEKLGFAGLVQEISFGTTKDKMLVIEQCKNSRAVTIFIRGGNKMIIEEAKRSLHDALCVIRNLIRDNRVVYGGGAAEISCALAVSQEADKCPTLEQYAMRAFADALEVIPMALSENSGMNPIQTMTEVRARQVKEMNPALGIDCLHKGTNDMKQQHVIETLIGKKQQISLATQMVRMILKIDDIRKPGESEE

SEQ ID NO: 724 - DNA, 1416 bp, Homo sapien
cgttgaagacattgtcgggtggtgggagaggtatcggcaggggcagcgctgccgccggggcctggggctgacccgtctgacttcccgtccgtgccgagcccactcgagccgcagccatgtctggggacgagatgatttttgatcctactatgagcaagaagaaaaagaagaagaagaagccttttatgttagatgaggaaggggatacccaaacagaggaaacccagccttcagaaacaaaagaagtggagccagagccaactgaggacaaggatttggaagctgatgaagaggacactaggaaaaaagatgcttctgatgatctagatgacttgaacttctttaatcaaaagaaaaagaagaaaaaaactaaaaagatatttgatattgatgaagctgaagaaggtgtaaaggatcttaagattgaaagtgatgttcaagaaccaactgaaccagaggatgaccttgacattatgcttggcaataaaaagaagaaaaagaagaatgttaagttcccagatgaggatgaaatactagagaaagatgaagctctagaagatgaagacaacaaaaaagatgatggtatctcattcagtaatcagacaggccctgcttgggcaggctcagaaagagactacacatacgaggagctgctgaatcgagtgttcaacatcatgagggaaaagaatccagatatggttgctggggagaaaaggaaatttgtcatgaaacctccacaagtcgtccgagtaggaaccaagaaaacttcttttgtcaactttacagatatctgtaaactattacatcgtcagcccaaacatctccttgcatttttgttggctgaattgggtacaagtggttctatagatggtaataaccaacttgtaatcaaaggaagattccaacagaaacagatagaaaatgtcttgagaagatatatcaaggaatatgtcacttgtcacacatgccgatcaccggacacaatcctgcagaaggacatacgactctatttcctacagtgcgaaacttgtcattctagatgttctgttgccagtatcaaaaccggcttccaggctgtcacgggcaagcgagcacagctccgtgccaaagctaactaatttgctaatcactgattttgcaaagcttgttgtggagatgtggctggacaggtttgccatcagagtggatataccgttgtattaaaaacaagataaaaaagctgccaagatttttggcgagtggttggtctgaagtccttgcaagacgctgatgctcaagctgttgacatactcattgcctactttaacacctgtcagagaaacgtgatatggggtaaggaggtgcttttttaaaatcgttcatagacttctgtaaaatgcaagataaattaaagttattataacagtgattctttca

SEQ ID NO: 725 - protein, 333 aa, Homo sapien [sequence omitted]

SEQ ID NO: 726 - DNA, 1946 bp, Homo sapien
aattcgggggccgtggagtttgtgacatacgaggtgacacccctcgagtcacttcccttcaactccagctggagcgcctgcttggctttgggttcgttctgcagccttcgccccgctcctagcctcagggccggactccagcgcagagcccagcccagcgcagcctgccagcagccacccagccgcccagccgcccagccccgcacgaaacccggccagagcttcctagcagcccgagccatgaacaccgaaatgtatcagacccccatggaggtggcggtctaccagctgcacaatttctccatctccttcttctcttctctgcttggaggggatgtggtttccgttaagctggacaacagtgcctccggagccagcgtggtggccatagacaacaagatcgaacaggccatggatctggtgaagaatcatctgatgtatgctgtgagagaggaggtggagatcctgaaggagcagatccgagagctggtggagaagaactcccagctagagcgtgagaacaccctgttgaagaccctggcaagcccagagcagctggagaagttccagtcctgtctgagccctgaagagccagctcccgaatccccacaagtgcccgaggcccctggtggttctgcggtgtaagtggctctgtcctcagggtgggcagagccactaaacttgttttacctagttctttccagtttgtttttggctccccaagcatcatctcacgaggagaactttacacctagcacagctggtgccaagagatgtcctaaggacatggccacctgggtccactccagcgacagacccctgacaagagcaggtctctggaggctgagttgcatggggcctagtaacaccaagccagtgagcctctaatgctactgcgccctgggggctcccagggcctgggcaacttagctgcaactggcaaaggagaagggtagtttgaggtgtgacaccagtttgctccagaaagtttaaggggtctgtttctcatctccatggacatcttcaacagcttcacctgacaacgactgttcctatgaagaagccacttgtgttttaagcagaggcaacctctctcttctcctctgtttcgtgaaggcaggggacacagatgggagagattgagccaagtcagccttctgttggttaatatggtataatgcatggctttgtgcacagcccagtgtgggattacagctttgggatgaccgcttacaaagttctgtttggttagtattggcatagtttttctatatagccataaatgcgtatatatacccatagggctagatctgtatcttagtgtagcgatgtatacatatacacatccacctacatgttgaagggcctaaccagccttgggagtattgactggtcccttacctcttatggctaagtctttgactgtgttcatttaccaagttgacccagtttgtcttttaggttaagtaagaactcgagagtaaaggcaaggaggggggccagcctctgaatgcggccacggatgccttgctgctgcaaccctttccccagctgtccactgaaacgtgaagtcctgttttgaatgccaaacccaccattcactggtgctgactacatagaatgggttgagagaagatcagtttgggcttcacagtgtcatttgaaaaagcgtttttgttttgttttgaattattgtggaaaactttcaagtgaacagaaggatggtgtcctactgtggatgagggatgaacaaggggatggctttgatccaatggagcctgggaggtgtgcccagaaagcttgtctgtagcgggttttgtgagagtgaacactttccactttttgacaccttatcctgatgtatggttccaggatttggattttgattttccaaatgtagcttgaaatttcaataaactttgctctgtttttctaaaaaataaaaa

SEQ ID NO: 727 - protein, 134 aa, Homo sapien
MNTEMYQTPMEVAVYQLHNFSISFFSSLLGGDVVSVKLDNSASGASVVAIDNKIEQAMDLVKNHLMYAVREEVEILKEQIRELVEKNSQLERENTLLKTLASPEQLEKFQSCLSPEEPAPESPQVPEAPGGSAV

SEQ ID NO: 728 - DNA, 1269 bp, Homo sapien
atggcggcggcggcggtggtggagttccagagagcccagtctctactcagcaccgaccgggaggcctccatcgacatcctccactccatcgtgaagcgtgacattcaggaaaacgatgaagaggcagtgcaagtcaaagagcagagcatcctggaactgggatctctcctggcaaagactggacaagctgcagagcttggaggactcctgaagtatgtacgacccttcttgaattccatcagcaaggctaaagcagctcgcctggtccgatctcttcttgatctgtttcttgatatggaagcagctacagggcaggaggtcgagctgtgtttagagtccatcgaatgggccaagtcagagaaaagaactttcttacgccaagctttggaggcaagactggtgtctttgtactttgataccaagaggtaccaggaagcattgcatttgggttctcagctgctgcgggagttgaaaaagatggacgacaaagctcttttggtggaagtacagcttttagaaagcaaaacataccatgccctgagcaacctgccgaaagcccgagctgccttaacttctgctcgaaccacagcaaatgccatctactgcccccctaaattgcaggccaccttggacatgcagtcgggtattatccatgcagcagaagagaaggactggaaaactgcgtactcatacttctatgaggcatttgagggttatgactccatcgacagccccaaggccatcacatctctgaagtacatgttgctgtgcaaaatcatgctcaacaccccagaagatgtccaggctttggtgagcgggaagcttgcacttcggtatgcagggaggcagacagaagcattaaaatgcgtggctcaggctagcaagaacagatcactggcagattttgaaaaggctctgacagattaccgggcagagctccgggatgacccaatcatcagcacacacttggccaagttgtatgataacttactagaacagaatctgatccgagtcattgagcctttttccagagtacagattgaacacatatctagtctcatcaaactctccaaggccgacgtggaaaggaaattatcacagatgattcttgacaagaaatttcatgggattttggaccagggggagggtgtcctgattattttcgatgaacccccagtagataaaacttacgaagctgctctggaaacaattcagaacatgagcaaagtagtggattccctctacaacaaagccaagaaactgacatag

SEQ ID NO: 729 - protein, 422 aa, Homo sapien [sequence omitted]

SEQ ID NO: 730 - DNA, 2019 bp, Homo sapien
acgtgtatcgctgccgtcaagatggaggggcctttgtccgtgttcggtgaccgcagcactggggaaacgatccgctcccaaaacgttatggctgcagcttcgattgccaatattgtaaaaagttctcttggtccagttggcttggataaaatgttggtggatgatattggtgatgtaaccattactaacgatggtgcaaccatcctgaagttactggaggtagaacatcctgcagctaaagttctttgtgagctggctgatctgcaagacaaagaagttggagatggaactacttcagtggttattattgcagcagaactcctaaaaaatgcagatgaattagtcaaacagaaaattcatcccacatcagttattagtggctatcgacttgcttgcaaggaagcagtgcgttatatcaatgaaaacctaattgttaacacagatgaactgggaagagattgcctgattaatgctgctaagacatccatgtcttccaaaatcattgggataaatggtgatttctttgctaacatggtagtagatgctgtacttgctattaaatacacagacataagaggccagccacgctatccagtcaactctgttaatattttgaaagcccatgggagaagtcaaatggagagtatgctcatcagtggctatgcactcaactgtgtggtgggatcccagggcatgcccaagagaatcgtaaatgcaaaaattgcttgccttgacttcagcctgcaaaaaacaaaaatgaagcttggtgtacaggtggtcattacagaccctgaaaaactggaccaaattagacagagagaatcagatatcaccaaggagagaattcagaagatcctggcaactggtgccaatgttattctaaccactggtggaattgatgatatgtgtctgaagtattttgtggaggctggtgctatggcagttagaagagttttaaaaagggaccttaaacgcattgccaaagcttctggagcaactattctgtcaaccctggccaatttggaaggtgaagaaacttttgaagctgcaatgttgggacaggcagaagaagtggtacaggagagaatttgtgatgatgagctgatcttaatcaaaaatactaaggctcgtacgtctgcatcgattatcttacgtggggcaaatgatttcatgtgtgatgagatggagcgctctttacatgatgcactttgtgtagtgaagagagttttggagtcaaaatctgtggttcccggtgggggtgctgtagaagcagccctttccatataccttgaaaactatgcaaccagcatggggtctcgggaacagcttgcgattgcagagtttgcaagatcacttcttgttattcccaatacactagcagttaatgctgcccaggactccacagatctggttgcaaaattaagagcttttcataatgaggcccaggttaacccagaacgtaaaaatctaaaatggattggtcttgatttgagcaatggtaaacctcgagacaacaaacaagcaggggtgtttgaaccaaccatagttaaagttaagagtttgaaatttgcaacagaagctgcaatcaccattcttcgaattgatgatcttattaaattacatccagaaatccttcggattaaacatggaagttatgaagatgctgttcactctggagcccttaatgattgatctgatgttccttttatttataacaatgttaaatgcaatgtcttgtaccttgagttgagtattacacattaaagtaaagtacaagctgtaaacttgggtttttgtgatgtaggaaatggtttccatctgtactttggtcctctgatttcagatattgcaacctagtactttattagtttaaaaagaaattgaggttgttcaaagtttaagcaattcattctctctgaacacacattgctattcccatcccacccccaatgcacagggctgcaacaccacgacttctgcccattctctccagtgtgtgtaacagggtcacaagaattc

SEQ ID NO: 731 - protein, 556 aa, Homo sapien
MEGPLSVFGDRSTGETIRSQNVMAAASIANIVKSSLGPVGLDKMLVDDIGDVTITNDGATILKLLEVEHPAAKVLCELADLQDKEVGDGTTSVVIIAAELLKNADELVKQKIHPTSVISGYRLACKEAVRYINENLIVNTDELGRDCLINAAKTSMSSKIIGINGDFFANMVVDAVLAIKYTDIRGQPRYPVNSVNILKAHGRSQMESMLISGYALNCVVGSQGMPKRIVNAKIACLDFSLQKTKMKLGVQVVITDPEKLDQIRQRESDITKERIQKILATGANVILTTGGIDDMCLKYFVEAGAMAVRRVLKRDLKRIAKASGATILSTLANLEGEETFEAAMLGQAEEVVQERICDDELILIKNTKARTSASIILRGANDFMCDEMERSLHDALCVVKRVLESKSVVPGGGAVEAALSIYLENYATSMGSREQLAIAEFARSLLVIPNTLAVNAAQDSTDLVAKLRAFHNEAQVNPERKNLKWIGLDLSNGKPRDNKQAGVFEPTIVKVKSLKFATEAAITILRIDDLIKLHPEILRIKHGSYEDAVHSGALND

SEQ ID NO: 732 - DNA, 1750 bp, Homo sapien
gctttctttccgtcgcagagagcatcggccggcgaccgttccggcggccattgcgaaaacttccccacggctactgcgtccacgtggcggtggcgtggggactccctgaaagcagagcggcagggcgcccggaagtcgtgagtcgagtcttcccgggctaatccatgccgggttggaggctgctgacgcaggtcggcgcccaggtgctgggtcgactcggggacggcctgggtgctgccctgggcccggggaacagaacacacatctggctttttgttagaggtcttcatggaaagagtggtacatggtgggatgagcatctttctgaagaaaatgtcccattcattaagcagttggtctctgatgaagataaagcccaattagcaagtaaactgtgtcctctgaaagatgaaccatggcctatacatccttgggaaccaggttcctttagagttggtcttattgccttgaagctgggcatgatgcctttatggaccaaggatggtcaaaagcatgtggtcacattacttcaggtacaagactgtcatgtcttaaaatatacgtcaaaggaaaactgtaatggaaaaatggcaaccctgtctgtaggaggaaaaactgtatcacgttttcgtaaagctacatccatattggaattttaccgggaacttggattgccgccgaaacagacagttaaaatctttaatataacagataatgctgcaattaaaccaggcactcctctttatgctgctcactttcgtccaggacagtatgtggatgtcacagccaaaactattggtaaaggttttcaaggtgtcatgaaaagatggggatttaaaggccagcctgctacgcatggtcaaacgaaaacccacaggagacctggagctgttgcaactggtgatattggcagagtctggcctggaactaaaatgcctggaaaaatgggaaacatatacaggacagaatatggactgaaagtgtggagaataaacacaaagcacaacataatctatgtaaatggctctgtacctggacataaaaattgcttagtaaaggtcaaagattctaaactgcctgcatataaggatctcggtaaaaatctaccattccctacatattttcctgatggagatgaagaggaactgccagaagatttgtatgatgaaaacgtgtgtcagcccggtgcgccttctattacatttgcctaacatctttggacgtggcagaaccttacatattctgtgagcttcgatgagccagagtgatatcataaccaccagaaatcatactctcctttcttagtcacaacaaaatcacacatgtcatctttgtcaagggcataaatatatcattcatacccccattaaattttgttagaaaaattaccacattaaatatatgagttaagtagattggatttgctgaaattggtgttgggcatattagcaaaatattcttaatttgtggactcgattcttttttactacatatttcccaagttatcttaagatgtctgtaaatttaacttttattaaagttttgtcaatctttgtgaaatagtggttgtggaacagtagaaaaccatatggggactatagtgcaacctatttgggtaaagaaaccatttgctaaaatggagaaagtaaatagatttttatttaaattacagaaacatgttaaaggccggacaaaggaaagacaataaaatcataaattatcggtcctgtttaaaaaaaaaaaaaaaaaa

SEQ ID NO: 733 - protein, 348 aa, Homo sapien [sequence omitted]

SEQ ID NO: 734 - DNA, 5681 bp, Homo sapien
cgccgcggtgctgagggggaggggagccggcgagcgcgcgcgcagcgggggcgcgggtggcgcgcgtgtgtgtgaagggggggcggtggccgaggcgggcgggcgcgcgcgcgaggcttcccctcgtttggcggcggcggcggcttctttgtttcgtgaagagaagcgagacgcccattctgcccccggccccgcgcggaggggcgggggaggcgccgggaagtcgacggcgccggcggctcctgcaggaggccactgtctgcagctcccgtgaagatgtccactccagacccacccctgggcggaactcctcggccaggtccttccccgggccctggcccttcccctggagccatgctgggccctagcccgggtccctcgccgggctccgcccacagcatgatggggcccagcccagggccgccctcagcaggacaccccatccccacccaggggcctggagggtaccctcaggacaacatgcaccagatgcacaagcccatggagtccatgcatgagaagggcatgtcggacgacccgcgctacaaccagatgaaaggaatggggatgcggtcagggggccatgctgggatggggcccccgcccagccccatggaccagcactcccaaggttacccctcgcccctgggtggctctgagcatgcctctagtccagttccagccagtggcccgtcttcggggccccagatgtcttccgggccaggaggtgccccgctggatggtgctgacccccaggccttggggcagcagaaccggggcccaaccccatttaaccagaaccagctgcaccagctcagagctcagatcatggcctacaagatgctggccagggggcagcccctccccgaccacctgcagatggcggtgcagggcaagcggccgatgcccgggatgcagcagcagatgccaacgctacctccaccctcggtgtccgcaacaggacccggccctggccctggccctggccccggcccgggtcccggcccggcacctccaaattacagcaggcctcatggtatgggagggcccaacatgcctcccccaggaccctcgggcgtgccccccgggatgccaggccagcctcctggagggcctcccaagccctggcctgaaggacccatggcgaatgctgctgcccccacgagcacccctcagaagctgattcccccgcagccaacgggccgcccttcccccgcgccccctgccgtcccacccgccgcctcgcccgtgatgccaccgcagacccagtcccccgggcagccggcccagcccgcgcccatggtgccactgcaccagaagcagagccgcatcacccccatccagaagccgcggggcctcgaccctgtggagatcctgcaggagcgcgagtacaggctgcaggctcgcatcgcacaccgaattcaggaacttgaaaaccttcccgggtccctggccggggatttgcgaaccaaagcgaccattgagctcaaggccctcaggctgctgaacttccagaggcagctgcgccaggaggtggtggtgtgcatgcggagggacacagcgctggagacagccctcaatgctaaggcctacaagcgcagcaagcgccagtccctgcgcgaggcccgcatcactgagaagctggagaagcagcagaagatcgagcaggagcgcaagcgccggcagaagcaccaggaatacctcaatagcattctccagcatgccaaggatttcaaggaatatcacagatccgtcacaggcaaaatccagaagctgaccaaggcagtggccacgtaccatgccaacacggagcgggagcagaagaaagagaacgagcggatcgagaaggagcgcatgcggaggctcatggctgaagatgaggaggggtaccgcaagctcatcgaccagaagaaggacaagcgcctggcctacctcttgcagcagacagacgagtacgtggctaacctcacggagctggtgcggcagcacaaggctgcccaggtcgccaaggagaaaaagaagaaaaagaaaaagaagaaggcagaaaatgcagaaggacagacgcctgccattgggccggatggcgagcctctggacgagaccagccagatgagcgacctcccggtgaaggtgatccacgtggagagtgggaagatcctcacaggcacagatgcccccaaagccgggcagctggaggcctggctcgagatgaacccggggtatgaagtagctccgaggtctgatagtgaagaaagtggctcagaagaagaggaagaggaggaggaggaagagcagccgcaggcagcacagcctcccaccctgcccgtggaggagaagaagaagattccagatccagacagcgatgacgtctctgaggtggacgcgcggcacatcattgagaatgccaagcaagatgtcgatgatgaatatggcgtgtcccaggcccttgcacgtggcctgcagtcctactatgccgtggcccatgctgtcactgagagagtggacaagcagtcagcgcttatggtcaatggtgtcctcaaacagtaccagatcaaaggtttggagtggctggtgtccctgtacaacaacaacctgaacggcatcctggccgacgagatgggcctggggaagaccatccagaccatcgcgctcatcacgtacctcatggagcacaaacgcatcaatgggcccttcctcatcatcgtgcctctctcaacgctgtccaactgggcgtacgagtttgacaagtgggccccctccgtggtgaaggtgtcttacaagggatccccagcagcaagacgggcctttgtcccccagctccggagtgggaagttcaacgtcttgctgacgacgtacgagtacatcatcaaagacaagcacatcctcgccaagatccgttggaagtacatgattgtggacgaaggtcaccgcatgaagaaccaccactgcaagctgacgcaggtgctcaacacgcactatgtggcaccccgccgcctgctgctgacgggcacaccgctgcagaacaagcttcccgagctctgggcgctgctcaacttcctgctgcccaccatcttcaagagctgcagcaccttcgagcagtggtttaacgcaccctttgccatgaccggggaaaaggtggacctgaatgaggaggaaaccattctcatcatccggcgtctccacaaagtgctgcggcccttcttgctccgacgactcaagaaggaagtcgaggcccagttgcccgaaaaggtggagtacgtcatcaagtgcgacatgtctgcgctgcagcgagtgctctaccgccacatgcaggccaagggcgtgctgctgactgatggctccgagaaggacaagaagggcaaaggcggcaccaagaccctgatgaacaccatcatgcagctgcggaagatctgcaaccacccctacatgttccagcacatcgaggagtccttttccgagcacttggggttcactggcggcattgtccaagggctggacctgtaccgagcctcgggtaaatttgagcttcttgatagaattcttcccaaactccgagcaaccaaccacaaagtgctgctgttctgccaaatgacctccctcatgaccatcatggaagattactttgcgtatcgcggctttaaatacctcaggcttgatggaaccacgaaggcggaggaccggggcatgctgctgaaaaccttcaacgagcccggctctgagtacttcatcttcctgctcagcacccgggctggggggctcggcctgaacctccagtcggcagacactgtgatcatttttgacagcgactggaatcctcaccaggacctgcaagcgcaggaccgagcccaccgcatcgggcagcagaacgaggtgcgtgtgctccgcctctgcaccgtcaacagcgtggaggagaagatcctagctgcagccaagtacaagctcaacgtggaccagaaggtgatccaggccggcatgttcgaccagaagtcctccagccatgagcggcgcgccttcctgcaggccatcctggagcacgaggagcaggatgagagcagacactgcagcacgggcagcggcagtgccagcttcgcccacactgcccctccgccagcgggcgtcaaccccgacttggaggagccacctctaaaggaggaagacgaggtgcccgacgacgagaccgtcaaccagatgatcgcccggcacgaggaggagtttgatctgttcatgcgcatggacctggaccgcaggcgcgaggaggcccgcaaccccaagcggaagccgcgcctcatggaggaggacgagctcccctcgtggatcatcaaggacgacgcggaggtggagcggctgacctgtgaggaggaggaggagaagatgttcggccgtggctcccgccaccgcaaggaggtggactacagcgactcactgacggagaagcagtggctcaaggccatcgaggagggcacgctggaggagatcgaagaggaggtccggcagaagaaatcatcacggaagcgcaagcgagacagcgacgccggctcctccaccccgaccaccagcacccgcagccgcgacaaggacgacgagagcaagaagcagaagaagcgcgggcggccgcctgccgagaaactctcccctaacccacccaacctcaccaagaagatgaagaagattgtggatgccgtgatcaagtacaaggacagcagcagtggacgtcagctcagcgaggtcttcatccagctgccctcgcgaaaggagctgcccgagtactacgagctcatccgcaagcccgtggacttcaagaagataaaggagcgcattcgcaaccacaagtaccgcagcctcaacgacctagagaaggacgtcatgctcctgtgccagaacgcacagaccttcaacctggagggctccctgatctatgaagactccatcgtcttgcagtcggtcttcaccagcgtgcggcagaaaatcgagaaggaggatgacagtgaaggcgaggagagtgaggaggaggaagagggcgaggaggaaggctccgaatccgaatctcggtccgtcaaagtgaagatcaagcttggccggaaggagaaggcacaggaccggctgaagggcggccggcggcggccgagccgagggtcccgagccaagccggtcgtgagtgacgatgacagtgaggaggaacaagaggaggaccgctcaggaagtggcagcgaagaagactgagccccgacattccagtctcgaccccgagcccctcgttccagagctgagatggcataggccttagcagtaacgggtagcagcagatgtagtttcagacttggagtaaaactgtataaacaaaagaatcttccatatttatacagcagagaagctgtaggactgtttgtgactggccctgtcctggcatcagtagcatctgtaacagcattaactgtcttaaagagagagagagagaattccgaattggggaacacacgatacctgtttttcttttccgttgctggcagtactgttgcgccgcagtttggagtcactgtagttaagtgtggatgcatgtgcgtcaccgtccactcctcctactgtattttattggacaggtcagactcgccgggggcccggcgagggtatgtcagtgtcactggatgtcaaacagtaataaattaaaccaacaacaaaacgca

SEQ ID NO: 735 - protein, 1647 aa, Homo sapien
MSTPDPPLGGTPRPGPSPGPGPSPGAMLGPSPGPSPGSAHSMMGPSPGPPSAGHPIPTQGPGGYPQDNMHQMHKPMESMHEKGMSDDPRYNQMKGMGMRSGGHAGMGPPPSPMDQHSQGYPSPLGGSEHASSPVPASGPSSGPQMSSGPGGAPLDGADPQALGQQNRGPTPFNQNQLHQLRAQIMAYKMLARGQPLPDHLQMAVQGKRPMPGMQQQMPTLPPPSVSATGPGPGPGPGPGPGPGPAPPNYSRPHGMGGPNMPPPGPSGVPPGMPGQPPGGPPKPWPEGPMANAAAPTSTPQKLIPPQPTGRPSPAPPAVPPAASPVMPPQTQSPGQPAQPAPMVPLHQKQSRITPIQKPRGLDPVEILQEREYRLQARIAHRIQELENLPGSLAGDLRTKATIELKALRLLNFQRQLRQEVVVCMRRDTALETALNAKAYKRSKRQSLREARITEKLEKQQKIEQERKRRQKHQEYLNSILQHAKDFKEYHRSVTGKIQKLTKAVATYHANTEREQKKENERIEKERMRRLMAEDEEGYRKLIDQKKDKRLAYLLQQTDEYVANLTELVRQHKAAQVAKEKKKKKKKKKAENAEGQTPAIGPDGEPLDETSQMSDLPVKVIHVESGKILTGTDAPKAGQLEAWLEMNPGYEVAPRSDSEESGSEEEEEEEEEEQPQAAQPPTLPVEEKKKIPDPDSDDVSEVDARHIIENAKQDVDDEYGVSQALARGLQSYYAVAHAVTERVDKQSALMVNGVLKQYQIKGLEWLVSLYNNNLNGILADEMGLGKTIQTIALITYLMEHKRINGPFLIIVPLSTLSNWAYEFDKWAPSVVKVSYKGSPAARRAFVPQLRSGKFNVLLTTYEYIIKDKHILAKIRWKYMIVDEGHRMKNHHCKLTQVLNTHYVAPRRLLLTGTPLQNKLPELWALLNFLLPTIFKSCSTFEQWFNAPFAMTGEKVDLNEEETILIIRRLHKVLRPFLLRRLKKEVEAQLPEKVEYVIKCDMSALQRVLYRHMQAKGVLLTDGSEKDKKGKGGTKTLMNTIMQLRKICNHPYMFQHIEESFSEHLGFTGGIVQGLDLYRASGKFELLDRILPKLRATNHKVLLFCQMTSLMTIMEDYFAYRGFKYLRLDGTTKAEDRGMLLKTFNEPGSEYFIFLLSTRAGGLGLNLQSADTVIIFDSDWNPHQDLQAQDRAHRIGQQNEVRVLRLCTVNSVEEKILAAAKYKLNVDQKVIQAGMFDQKSSSHERRAFLQAILEHEEQDESRHCSTGSGSASFAHTAPPPAGVNPDLEEPPLKEEDEVPDDETVNQMIARHEEEFDLFMRMDLDRRREEARNPKRKPRLMEEDELPSWIIKDDAEVERLTCEEEEEKMFGRGSRHRKEVDYSDSLTEKQWLKAIEEGTLEEIEEEVRQKKSSRKRKRDSDAGSSTPTTSTRSRDKDDESKKQKKRGRPPAEKLSPNPPNLTKKMKKIVDAVIKYKDSSSGRQLSEVFIQLPSRKELPEYYELIRKPVDFKKIKERIRNHKYRSLNDLEKDVMLLCQNAQTFNLEGSLIYEDSIVLQSVFTSVRQKIEKEDDSEGEESEEEEEGEEEGSESESRSVKVKIKLGRKEKAQDRLKGGRRRPSRGSRAKPVVSDDDSEEEQEEDRSGSGSEED

SEQ ID NO: 736 - DNA, 792 bp, Homo sapien
atggcgcttgccagcgtgttggagagaccgctaccggtgaaccagcgcgggtttttcggacttgggggtcgtgcagatctgctggatctaggtccagggagtctcagtgatggtctgagcctggccgcgccaggctggggtgtcccagaagagccaggaatcgaaatgcttcatggaacaaccaccctggccttcaagttccgccatggagtcatagttgcagctgactccagggctacagcgggtgcttacattgcctcccagacggtgaagaaggtgatagagatcaacccatacctgctaggcaccatggctgggggcgcagcggattgcagcttctgggaacggctgttggctcggcaatgtcgaatctatgagcttcgaaataaggaacgcatctctgtagcagctgcctccaaactgcttgccaacatggtgtatcagtacaaaggcatggggctgtccatgggcaccatgatctgtggctgggataagagaggccctggcctctactacgtggacagtgaagggaaccggatttcaggggccaccttctctgtaggttctggctctgtgtatgcatatggggtcatggatcggggctattcctatgacctggaagtggagcaggcctatgatctggcccgtcgagccatctaccaagccacctacagagatgcctactcaggaggtgcagtcaacctctaccacgtgcgggaggatggctggatccgagtctccagtgacaatgtggctgatctacatgagaagtatagtggctctaccccctga

SEQ ID NO: 737 - protein, 263 aa, Homo sapien
MALASVLERPLPVNQRGFFGLGGRADLLDLGPGSLSDGLSLAAPGWGVPEEPGIEMLHGTTTLAFKFRHGVIVAADSRATAGAYIASQTVKKVIEINPYLLGTMAGGAADCSFWERLLARQCRIYELRNKERISVAAASKLLANMVYQYKGMGLSMGTMICGWDKRGPGLYYVDSEGNRISGATFSVGSGSVYAYGVMDRGYSYDLEVEQAYDLARRAIYQATYRDAYSGGAVNLYHVREDGWIRVSSDNVADLHEKYSGSTP

SEQ ID NO: 738 - DNA, 4561 bp, Homo sapien
  Unsure 3395: Unknown base
tgctaagtaacttgtttattgtcagacatctagtgagtcgcagagccagggaactgaccacgggcattttcaccccattacccttccagcttattgccgactgctcccgaagggagcgaaaaggacaggcaaagggtttcaccaaaccctttgtaatgggagattcttgccttcttacctttcctcacgtttgcttctctgccagaatgtcttcccgcactttccccagaacccaagttctcctaatcatctttcaagatccctttccctcaaccacagatgagccgtgcctatttctccttcaaatgactccctatggcttctagttggtagtcttttatttaccacctcatagtccttttatttatatcccataaatgatcgtccggccccgcaccgtgggaccaggacgctgcctcgaccatggcggtctcctggaaacaggctgctttgagccgaaactggtgaccgtttcccaaccccgtccaggagtccgacgcctcttttctccaggccaacttcaagtgaggtgtatcaactctatccgcacaaatttcttgccacgagagcagaagattatgatctctgatgctgccttagggctgaagacactcccaactcggcgacgcttagcaatcatcgacttcctcctcctcttggctgcctcggagatcctgttccggggcagaggtctccccgccccgcccctcgtctcctccaagatggcgagcggcggcagcgggggggtgtcagtacctgcgctgtggagtgaagtgaaccggtatggccagaacggcgacttcacgcgcgctctcaagaccgtcaataagatactacagatcaacaaagatgacgtaactgccctgcattgtaaagtggtatgccttatccagaatggaagtttcaaggaagctttgaatgtcatcaatactcacaccaaagtgttagccaataactctctctcctttgaaaaggcatattgcgagtacaggctgaacagaattgagaatgccttgaagacaatagaaagtgccaaccagcagacagacaaactgaaggagctttatggacaagtgttataccgtttggaacgctatgatgaatgcttagcagtgtatagagatctcgtccgaaactcccaagatgattatgatgaggagaggaaaacaaacctttcagcagttgttgcagctcaaagcaattgggaaaaagtggttccagagaacctgggcctccaagaaggcacacatgagctgtgctacaacactgcatgtgcactgataggccaaggccagctgaaccaggccatgaaaatcctacaaaaagctgaagatctttgccgccgttcattatcagaagacactgatgggactgaggaagacccacaggcagaactggccatcattcatggtcagatggcttatattctgcagcttcagggtcgaacagaggaggctttgcaactttacaatcaaataataaaactaaaaccaacagatgtgggattactagctgtaattgcaaataacatcattaccattaacaaggaccaaaatgtctttgactccaagaagaaagtgaaattaaccaatgcggaaggagtagagtttaagctttccaagaaacaactacaagctatagaatttaacaaagctttacttgctatgtacacaaaccaggctgaacaatgccgcaaaatatctgccagtttacagtcccaaagtcccgagcatctcttacctgtgttaatccaagctgcccagctctgccgtgaaaagcagcacacaaaagcaatagagctgcttcaggaattttcagatcagcatccagaaaatgcagctgaaattaagctgaccatggcacagttgaaaatttctcaaggtaatatttctaaagcatgtctaatattgagaagcatagaggagttaaagcataaaccaggcatggtatctgcattagttaccatgtatagccatgaagaagatattgatagtgccattgaggtcttcacacaagctatccagtggtatcaaaaccatcagccaaaatctcctgctcatttgtccttgataagagaagctgcaaacttcaaactcaaatatgggcggaagaaggaggcaattagtgacctacaacagctgtggaaacaaaatccaaaagatattcacaccctggcacagcttatttctgcttactcacttgtagatccagagaaagccaaagctcttagtaaacacttgccatcgtcagatagtatgtctctaaaagtagatgttgaggctcttgaaaattctgctggtgctacatacattcggaagaagggtggaaaagttactggagatagtcaaccaaaggaacaaggacagggagatttgaaaaagaagaaaaagaaaaagaagggaaaattgcctaagaattatgacccaaaagttaccccagatccagaaagatggctgccaatgcgagaacgttcttactaccggggaagaaagaagggtaaaaagaaggatcagattggaaaagggacccagggagcaactgcaggagcttcatctgaactggatgccagtaaaactgtgagcagcccacccacctccccaagacctggcagtgctgcaacagtatctgcctctacaagtaacatcatacccccaagacaccagaaacctgcaggggctccagcaacaaaaaagaaacagcaacagaaaaagaagaaaggtggaaaaggtggctggtgatgagaatattcttgttgcaggctgtttttaaactagtgtcagtgacactaggaatataataaaggtaacacagcaagaagcacagaactactccctcttcatctccatattttcataatttcttgtgtttcaaatagggaaacatcttcctcaaagtctgcctagtgagatatggcctactggttgcctcatagctttgtacagattatgaggactgaaaataattgggcatttacccatcttggtatctgttgtatcctttatctgtgtgtgctgatttgatcttttttcagtttcacataccttatctaaggtttcccaggatttaaacagaaactacttctatgatttcagctggagtctgaagatacttgtttctgttcaagtcccactttaaattatgtcttaggagactgaaagtggaatcttctgagcattcctaaatatctgcttagaaatatcatgtgataaagagggaccttcttaatacactgatgttcttcactaaatggatggccacaagaaaaataaagtaaatgtcttaaataatttaaccataaattttctgtcatgtgatactggaatatgggatacttttcatgtttatatatatatatatatgtatatatatatacgatatatatatatatataaacntgaaatatatatatatggctcctttgtgccccatgtcattttcagattatggtagcatgctgatacagcaccatgaaagaactcaaggaaaatatatcaatgtaagaagttcactcttagacccagtgttctgaggtcacatgggtttggactgtctcaatcagaaagattaatgactgttatcaagaacatgaacattggcttcctccatagagaagaaatcagtatctgagttgcataccaggcagtattaaaatctaacaggtctgtttggcccattgatagatactcaaatggtgtctccttctggttatggattttgaccattgattacctttctcaatgtaatgaagtattttacagtcaatttgtggtgtaaatgttgctcttgtctttccttgcttacaaactactttcacattgaacagctgtgagacagacatattgagatgcctgcccttgttagtattcattttatgctgcccaagatatcatttaatttagacttaacaagtatttccttgtgattatattactctgtccttgttaataaagtgctgctgtgtttgactctgaacatactaccaaaacttcttcaaagagttttttatgaaagactttcctcctttacaagaaagaaatggggtgctgcctttctgtttagtaaaagcagaatttgcagtggcatctaaagagatcttttttaaataaaaattatgtattgtggcataatcctttttttgagctctacagagaacagtcttttggtaatagtggcaggtatttattccttctgaatatataccccattataggaataactgttacttatttaggattccatcattgaaaattttgacccaaggcacagcagtgaaatttatagttctcaatttagttgtcattattgacaggcattggtattattagtcattgctaagcaactaaaacttcatcagttcaaataagttttaattgtcaaatgaagtataaacacatgaactttctagaaatatttcctcttttggataggtctttaaccagttcatatatatactttgtcaaatatatggatgtgtatgtgtacatttataagaaccagtatggatacatccattcactgtggtacattttaaaataaaatattttagcagtgaatatggaaa

SEQ ID NO: 739 - protein, 786 aa, Homo sapien [sequence omitted]

SEQ ID NO: 740 - DNA, 979 bp, Rattus norvegicus
cggtgcctggtgcgggagctacggggcccagggattgtgtttaaagtagtgcttctaccaacatgtcccgtggttccagcgccggttttgaccgccacattaccattttttcacccgagggtcggctctaccaagtagaatatgcttttaaggctattaaccagggtggccttacatcagtagctgtcagagggaaagactgtgcagtaattgtcacacagaagaaagtacctgacaaattattggattccagcacagtgactcacttattcaagataactgaaaacattggttgtgtgatgaccggaatgacagctgacagcagatcccaggtacagagggcacgctatgaggcagctaactggaaatacaagtatggctatgagattcctgtggacatgctgtgtaaaagaattgccgatatttctcaggtctacacacagaatgctgaaatgaggcctcttggttgttgtatgattttaattggtatagatgaagagcaaggccctcaggtatataagtgtgatcctgcaggttactactgtgggtttaaagccactgcagcgggagttaaacaaactgagtcaaccagcttccttgaaaaaaaagtgaagaagaaatttgattggacatttgaacagacagtggaaactgcaattacatgcctgtctactgttctatcaattgatttcaaaccttcagaaatagaagttggagtagtgacagttgaaaatcctaaattcaggattcttacagaagcagagattgatgctcaccttgttgctctagcagagagagactaaacattgtcgttagtttaccagatccgtgatgccacttacctgtgtgtttggtaacaacaaacaaacatcatggaggtccctggattgaaaaaggagcctctcccactcctcctaccaccgaagtggttaggactctatataaataaaaacaaggcttttggaaaaaaaaaaaaaaa

SEQ ID NO: 741 - protein, 246 aa, Rattus norvegicus
MSRGSSAGFDRHITIFSPEGRLYQVEYAFKAINQGGLTSVAVRGKDCAVIVTQKKVPDKLLDSSTVTHLFKITENIGCVMTGMTADSRSQVQRARYEAANWKYKYGYEIPVDMLCKRIADISQVYTQNAEMRPLGCCMILIGIDEEQGPQVYKCDPAGYYCGFKATAAGVKQTESTSFLEKKVKKKFDWTFEQTVETAITCLSTVLSIDFKPSEIEVGVVTVENPKFRILTEAEIDAHLVALAERD

SEQ ID NO: 742 - DNA, 1941 bp, Homo sapien
tctcttgattcctagtctctcgatatggcacctccgtcagtctttgccgaggttccgcaggcccagcctgtcctggtcttcaagctcactgccgacttcagggaggatccggacccccgcaaggtcaacctgggagtgggagcatatcgcacggatgactgccatccctgggttttgccagtagtgaagaaagtggagcagaagattgctaatgacaatagcctaaatcacgagtatctgccaatcctgggcctggctgagttccggagctgtgcttctcgtcttgcccttggggatgacagcccagcactcaaggagaagcgggtaggaggtgtgcaatctttggggggaacaggtgcacttcgaattggagctgatttcttagcgcgttggtacaatggaacaaacaacaagaacacacctgtctatgtgtcctcaccaacctgggagaatcacaatgctgtgttttccgctgctggttttaaagacattcggtcctatcgctactgggatgcagagaagagaggattggacctccagggcttcctgaatgatctggagaatgctcctgagttctccattgttgtcctccacgcctgtgcacacaacccaactgggattgacccaactccggagcagtggaagcagattgcttctgtcatgaagcaccggtttctgttccccttctttgactcagcctatcagggcttcgcatctggaaacctggagagagatgcctgggccattcgctattttgtgtctgaaggcttcgagttcttctgtgcccagtccttctccaagaacttcgggctctacaatgagagagtcgggaatctgactgtggttggaaaagaacctgagagcatcctgcaagtcctttcccagatggagaagatcgtgcggattacttggtccaatccccccgcccagggagcacgaattgtggccagcaccctctctaaccctgagctctttgaggaatggacaggtaatgtgaagacaatggctgaccggattctgaccatgagatctgaactcagggcacgactagaagccctcaaaacccctgggacctggaaccacatcactgatcaaattggcatgttcagcttcactgggttgaaccccaagcaggttgagtatctggtcaatgaaaagcacatctacctgctgccaagtggtcgaatcaacgtgagtggcttaaccaccaaaaatctagattacgtggccacctccatccatgaagcagtcaccaaaatccagtgaagaaacaccacccgtccagtaccaccaaagtagttctctgtcatgtgtgttccctgcctgcacaaacctacatgtacataccatggattagagacacttgcaggactgaaagctgctctggtgaggcagcctctgtttaaaccggccccacatgaagagaacatcccttgagacgaatttggagactgggattagagcctttggaggtcaaagcaaattaagatttttatttaagaataaaagagtactttgatcatgagacataggtatcttgtccctctcactaaaaaggagtgttgtgtgtggcggccacgtgcttctatgtggtgtttgactctgtacaaattctagtcccaaagatcaagttgtctgaaggagccaaagtgtgaatgtgggtgtcggctgcggcattaaattcatcatctcaacccagagtgtctggtctccctgctctttctgcatggttgtgtccctagtcctaagctttggttctttagggtgactgtggtaagaaggatatttaatcatgacatgcacggacacgtacatatttaactgaaacaagttttaccaaacagtatttactcgtgatgtgcgtagtgcattctgatatttttgagccattctattgtgttctacttcacctaaaaaaataaaataaaaatgttgatcaag

SEQ ID NO: 743 - protein, 413 aa, Homo sapien
MAPPSVFAEVPQAQPVLVFKLTADFREDPDPRKVNLGVGAYRTDDCHPWVLPVVKKVEQKIANDNSLNHEYLPILGLAEFRSCASRLALGDDSPALKEKRVGGVQSLGGTGALRIGADFLARWYNGTNNKNTPVYVSSPTWENHNAVFSAAGFKDIRSYRYWDAEKRGLDLQGFLNDLENAPEFSIVVLHACAHNPTGIDPTPEQWKQIASVMKHRFLFPFFDSAYQGFASGNLERDAWAIRYFVSEGFEFFCAQSFSKNFGLYNERVGNLTVVGKEPESILQVLSQMEKIVRITWSNPPAQGARIVASTLSNPELFEEWTGNVKTMADRILTMRSELRARLEALKTPGTWNHITDQIGMFSFTGLNPKQVEYLVNEKHIYLLPSGRINVSGLTTKNLDYVATSIHEAVTKIQ

SEQ ID NO: 744 - DNA, 2839 bp, Homo sapien
gcacgagctgcggctccgctctcgtcgcaacgagatctttcgagatcttctccgcccccgctaccggcgcctcctctgcggccactgagccggagccggcctgagcagcgctctcggttgcagtacccactggaaggacttaggcgctcgcgtggacaccgcaagcccctcagtagcctcggcccaagaggcctgctttccactcgctagccccgccggggtccgtgtcctgtctcggtggccggacccgggcccgagcccgagcagtagccggcgccatgtcggtggtgggcatagacctgggcttccagagctgctacgtcgctgtggcccgcgccggcggcatcgagactatcgctaatgagtatagcgaccgctgcacgccggcttgcatttcttttggtcctaagaatcgttcaattggagcagcagctaaaagccaggtaatttctaatgcaaagaacacagtccaaggatttaaaagattccatggccgagcattctctgatccatttgtggaggcagaaaaatctaaccttgcatatgatattgtgcagttgcctacaggattaacaggtataaaggtgacatatatggaggaagagcgaaattttaccactgagcaagtgactgccatgcttttgtccaaactgaaggagacagccgaaagtgttcttaagaagcctgtagttgactgtgttgtttcggttccttgtttctatactgatgcagaaagacgatcagtgatggatgcaacacagattgctggtcttaattgcttgcgattaatgaatgaaaccactgcagttgctcttgcatatggaatctataagcaggatcttcctgccttagaagagaaaccaagaaatgtagtttttgtagacatgggccactctgcttatcaagtttctgtatgtgcatttaatagaggaaaactgaaagttctggccactgcatttgacacgacattgggaggtagaaaatttgatgaagtgttagtaaatcacttctgtgaagaatttgggaagaaatacaagctagacattaagtccaaaatccgtgcattattacgactctctcaggagtgtgagaaactcaagaaattgatgagtgcaaatgcttcagatctccctttgagcattgaatgttttatgaatgatgttgatgtatctggaactatgaatagaggcaaatttctggagatgtgcaatgatctcttagctagagtggagccaccacttcgtagtgttttggaacaaaccaagttaaagaaagaagatatttatgcagtggagatagttggtggtgctacacgaatccctgcggtaaaagagaagatcagcaaatttttcggtaaagaacttagtacaacattaaatgctgatgaagctgtcactcgaggctgtgcattgcagtgtgccatcttatcgcctgctttcaaagtcagagaattttctatcactgatgtagtaccatatccaatatctctgagatggaattctccagctgaagaagggtcaagtgactgtgaagtcttttccaaaaatcatgctgctcctttctctaaagttcttacattttatagaaaggaacctttcactcttgaggcctactacagctctcctcaggatttgccctatccagatcctgctatagctcagttttcagttcagaaagtcactcctcagtctgatggctccagttcaaaagtgaaagtcaaagttcgagtaaatgtccatggcattttcagtgtgtccagtgcatctttagtggaggttcacaagtctgaggaaaatgaggagccaatggaaacagatcagaatgcaaaggaggaagagaagatgcaagtggaccaggaggaaccacatgttgaagagcaacagcagcagacaccagcagaaaataaggcagagtctgaagaaatggagacctctcaagctggatccaaggataaaaagatggaccaaccaccccaagccaagaaggcaaaagtgaagaccagtactgtggacctgccaatcgagaatcagctattatggcagatagacagagagatgctcaacttgtacattgaaaatgagggtaagatgatcatgcaggataaactggagaaggagcggaatgatgctaagaacgcagtgagggaatatgtgtatgaaatgagagacaagcttagtggtgaatatgagaagtttgtgagtgaagatggtcgtaacagttttactttgaaactggaagatactgaaaattggttgtatgaggatggagaagaccagccaaagcaagtttatgttgataagttggctgaattaaaaaatctaggtcaacctattaagatacgtttccaggaatctgaagaacgaccaaaattatttgaagaactagggaaacagatccaacagtatatgaaaataatcagctctttcaaaaacaaggaggaccagtatgatcatttggatgctgctgacatgacaaaggtagaaaaaagcacaaatgaagcaatggagtggatgaataacaagctaaatctgcagaacaagcagagtttgaccatggatccagttgtcaagtcaaaagagattgaagctaaaattaaggagctgacaagtacttgtagccctataatttcaaagcccaaacccaaagtggaacctccaaaagaggaacaaaaaaatgcagagcagaatggaccagtggatggacaaggagacaacccaggcccccaggctgctgagcagggtacagacacagctgtgccttcggattcagacaagaagcttcctgaaatggacattgattgattccaacacttgtttctattaaaacagactattataaa

SEQ ID NO: 745 - protein, 840 aa, Homo sapien
MSVVGIDLGFQSCYVAVARAGGIETIANEYSDRCTPACISFGPKNRSIGAAAKSQVISNAKNTVQGFKRFHGRAFSDPFVEAEKSNLAYDIVQLPTGLTGIKVTYMEEERNFTTEQVTAMLLSKLKETAESVLKKPVVDCVVSVPCFYTDAERRSVMDATQIAGLNCLRLMNETTAVALAYGIYKQDLPALEEKPRNVVFVDMGHSAYQVSVCAFNRGKLKVLATAFDTTLGGRKFDEVLVNHFCEEFGKKYKLDIKSKIRALLRLSQECEKLKKLMSANASDLPLSIECFMNDVDVSGTMNRGKFLEMCNDLLARVEPPLRSVLEQTKLKKEDIYAVEIVGGATRIPAVKEKISKFFGKELSTTLNADEAVTRGCALQCAILSPAFKVREFSITDVVPYPISLRWNSPAEEGSSDCEVFSKNHAAPFSKVLTFYRKEPFTLEAYYSSPQDLPYPDPAIAQFSVQKVTPQSDGSSSKVKVKVRVNVHGIFSVSSASLVEVHKSEENEEPMETDQNAKEEEKMQVDQEEPHVEEQQQQTPAENKAESEEMETSQAGSKDKKMDQPPQAKKAKVKTSTVDLPIENQLLWQIDREMLNLYIENEGKMIMQDKLEKERNDAKNAVREYVYEMRDKLSGEYEKFVSEDGRNSFTLKLEDTENWLYEDGEDQPKQVYVDKLAELKNLGQPIKIRFQESEERPKLFEELGKQIQQYMKIISSFKNKEDQYDHLDAADMTKVEKSTNEAMEWMNNKLNLQNKQSLTMDPVVKSKEIEAKIKELTSTCSPIISKPKPKVEPPKEEQKNAEQNGPVDGQGDNPGPQAAEQGTDTAVPSDSDKKLPEMDID

SEQ ID NO: 746 - DNA, 1650 bp, Homo sapien
gccttttttgcagtctcaggacgggcgctttggagccggccccaggcagcgtgtgtcggtcgcctagtctggagaactagtcctcgactcacggtgagggaatggaccgacacgggtattgtaccgctgagggaaaggagcgggactccggacctccaggagtgcaaggatgatgctgaaaggaataacaaggcttatctctaggatccataagttggaccctgggcgttttttacacatggggacccaggctcgccaaagcattgctgctcacctagataaccaggttccagttgagagtccgagagctatttcccgcaccaatgagaatgacccggccaagcatggggatcagcacgagggtcagcactacaacatctccccccaggatttggagactgtatttccccatggccttcctcctcgctttgtgatgcaggtgaagacattcagtgaagcttgcctgatggtaaggaaaccagccctagaacttctgcattacctgaaaaacaccagttttgcttatccagctatacgatatcttctgtatggagagaagggaacaggaaaaaccctaagtctttgccatgttattcatttctgtgcaaaacaggactggctgatactacatattccagatgctcatctttgggtgaaaaattgtcgggatcttctgcagtccagctacaacaaacagcgctttgatcaacctttagaggcttcaacctggctgaagaatttcaaaactacaaatgagcgcttcctgaaccagataaaagttcaagagaagtatgtctggaataagagagaaagcactgagaaagggagtcctctgggagaagtggttgaacagggcataacacgggtgaggaacgccacagatgcagttggaattgtgctgaaagagctaaagaggcaaagttctttgggtatgtttcacctcctagtggccgtggatggaatcaatgctctttggggaagaaccactctgaaaagagaagataaaagcccgattgcccccgaggaattagcacttgttcacaacttgaggaaaatgatgaaaaatgattggcatggaggcgccattgtgtcggctttgagccagactgggtctctctttaagccccggaaagcctatctgccccaggagttgctgggaaaggaaggatttgatgccctggatccctttattcccatcctggtttccaactataacccaaaggaatttgaaagttgtattcagtattatttggaaaacaattggcttcaacatgagaaagctcctacagaagaagggaaaaaagagctgctgttcctaagtaacgcgaacccctcgctgctggagcggcactgtgcctacctctaagccaagatcacagcatgtgaggaagacagtggacatctgctttatgctggacccagtaagatgaggaagtcgggcagtacacaggaagaggagccaggcccttgtacctatgggattggacaggactgcagttggctctggacctgcattaaaatgggtttcactgtgaatgcgtgacaataagatattcccttgttcctaaaactttatatcagtttattggatgtggtttttcacatttaagataattatggctcttttcctaaaaaataaaatatctttct

SEQ ID NO: 747 - protein, 398 aa, Homo sapien
MMLKGITRLISRIHKLDPGRFLHMGTQARQSIAAHLDNQVPVESPRAISRTNENDPAKHGDQHEGQHYNISPQDLETVFPHGLPPRFVMQVKTFSEACLMVRKPALELLHYLKNTSFAYPAIRYLLYGEKGTGKTLSLCHVIHFCAKQDWLILHIPDAHLWVKNCRDLLQSSYNKQRFDQPLEASTWLKNFKTTNERFLNQIKVQEKYVWNKRESTEKGSPLGEVVEQGITRVRNATDAVGIVLKELKRQSSLGMFHLLVAVDGINALWGRTTLKREDKSPIAPEELALVHNLRKMMKNDWHGGAIVSALSQTGSLFKPRKAYLPQELLGKEGFDALDPFIPILVSNYNPKEFESCIQYYLENNWLQHEKAPTEEGKKELLFLSNANPSLLERHCAYL

SEQ ID NO: 748 - DNA, 1679 bp, Homo sapien
atgacgaagaacgagaagaagtccctcaaccagagcctggccgagtggaagctcttcatctacaacccgaccaccggagaattcctggggcgcaccgccaagagctggggtttgatcttgctcttctacctagttttttatgggttcctggctgcactcttctcattcacgatgtgggttatgcttcagactctcaacgatgaggttccaaaataccgtgaccagattcctagcccaggactcatggtttttccaaaaccagtgaccgcattggaatatacattcagtaggtctgatccaacttcgtatgcagggtacattgaagaccttaagaagtttctaaaaccatatactttagaagaacagaagaacctcacagtctgtcctgatggagcactttttgaacagaagggtccagtttatgttgcatgtcagtttcctatttcattacttcaagcatgcagtggtatgaatgatcctgattttggctattctcaaggaaacccttgtattcttgtgaaaatgaacagaataattggattaaagcctgaaggagtgccaaggatagattgtgtttcaaagaatgaagatataccaaatgtagcagtttatcctcataatggaatgatagacttaaaatatttcccatattatgggaaaaaactgcatgttgggtatctacagccattggttgctgttcaggtcagctttgctcctaacaacactgggaaagaagtaacagttgagtgcaagattgatggatcagccaacctaaaaagtcaggatgatcgtgacaagtttttgggacgagttatgttcaaaatcacagcacgtgcatagtatgagtaggatatctccacagagtaaatgttgtgttgtctgtcttcattttgtaacagctggaccttccattctagaattatgagaccaccttggagaaaggtgtgtggtacatgacattgggttacatcataacgtgcttccagatcatagtgttcagtgtcctctgaagtaactgcctgttgcctctgctgccctttgaaccagtgtacagtcgccagatagggaccggtgaacacctgattccaaacatgtaggatgggggtcttgtcctctttttatgtggtttaattgccaagtgtctaaagcttaatatgccgtgctatgtaaatattttatggatataacaactgtcatattttgatgtcaacagagttttagggataaaatggtacccggccaacatcaagtgactttatagctgcaagaaatgtggtatgtggagaagttctgtatgtgaggaaggaaaaaaagaaaataaaagtgtgtttgaaaaatattatcttgggttctttgtaaaatttattttttacatgctgaattagcctcgatctttttgattaagagcacaaacttttttttgtaaaacatgtaaaaaaaaaaactgggattaatttttagtgttggaactgcctcttattttaggctgtagataaaatagcatttttaggttagccagtgtgactatgcacctaattttttatgagattaaattcataagacttaatttgtacaatagtttgtgaaatatcttgttactgcttttatttagcagactgtggactgtaataaagtatataaattgtgaaatataaaaacttggaacttattcaaagctt

SEQ ID NO: 749 - protein, 279 aa, Homo sapien
MTKNEKKSLNQSLAEWKLFIYNPTTGEFLGRTAKSWGLILLFYLVFYGFLAALFSFTMWVMLQTLNDEVPKYRDQIPSPGLMVFPKPVTALEYTFSRSDPTSYAGYIEDLKKFLKPYTLEEQKNLTVCPDGALFEQKGPVYVACQFPISLLQACSGMNDPDFGYSQGNPCILVKMNRIIGLKPEGVPRIDCVSKNEDIPNVAVYPHNGMIDLKYFPYYGKKLHVGYLQPLVAVQVSFAPNNTGKEVTVECKIDGSANLKSQDDRDKFLGRVMFKITARA

SEQ ID NO: 750 - DNA, 501 bp, Homo sapien
gaattcgctttggatccatttccatcggtccttacagccgctcgtcagactccagcagccaagatggtgaagcagatcgagagcaagactgcttttcaggaagccttggacgctgcaggtgataaacttgtagtagttgacttctcagccacgtggtgtgggccttgcaaaatgatcaaccctttctttcattccctctctgaaaagtattccaacgtgatattccttgaagtagatgtggatgactgtcaggatgttgcttcagagtgtgaagtcaaatgcacgccaacattccagttttttaagaagggacaaaaggtgggtgaattttctggagccaataaggaaaagcttgaagccaccattaatgaattagtctaatcatgttttctgaaaacataaccagccattggctatttaaacttgtatttttttatttacaaaatataaatatgaagacataaccagttgccatctgcgtgacaataaacattatgctaa

SEQ ID NO: 751 - protein, 105 aa, Homo sapien
MVKQIESKTAFQEALDAAGDKLVVVDFSATWCGPCKMINPFFHSLSEKYSNVIFLEVDVDDCQDVASECEVKCTPTFQFFKKGQKVGEFSGANKEKLEATINELV

SEQ ID NO: 752 - DNA, 1020 bp, Homo sapien
ggggagagagtggggacgtccggcttcggagcgggagtgttcgttgtgccagcgactaaaaagagaattaaatatgggtgatgttgagaaaggcaagaagatttttattatgaagtgttcccagtaccacaccgttgaaaagggaggcaagcacaagactgggccaaatctccatggtctctttgggcggaagacaggtcaggcccctggatactcttacacagccgccaataagaacaaaggcatcatctggggagaggatacactgatggagtatttggagaatcccaagaagtacatccctggaacaaaaatgatctttgtcggcattaagaagaaggaagaaagggcagacttaatagcttatctcaaaaaagctactaatgagtaataattggccactgccttatttattacaaaacagaaatgtctcatgacttttttatgtgtaccatcctttaatagatctcatacaccagaattcagatcatgaatgactgacagaatattttgttgggcagtcctgatttaaaactaagactggcttgtggttaaatgaatatgttcagtttttgaattttaatagtaactccaattcagtaaatggtatcactgtttaccccttttaaagatatgattagacttcgttagtaatgttcaacttttcacaaagatggtgagtgccatcttaaaacttactggagattggttttatatttagatttatataactggttatgtgaatatatttaaatactggggaaattgcttcactgtcttagaaccaagcaagattcacctgtgttttgtgttcatgttcatttgcctcttaaaggcaagggttgaagataaataaggtagcaatgtctatagttttggccttaactatgccaatctaattataattccctgtatttaaaatggtttcttttacttattgaaaggcattttagtgtggtttatgtgtaatattaaagattattcaacaccccaaaaaaaaaaaaaaaaaaaaaaaaaaaa

SEQ ID NO: 753 - protein, 105 aa, Homo sapien
MGDVEKGKKIFIMKCSQYHTVEKGGKHKTGPNLHGLFGRKTGQAPGYSYTAANKNKGIIWGEDTLMEYLENPKKYIPGTKMIFVGIKKKEERADLIAYLKKATNE

SEQ ID NO: 754 - DNA, 1332 bp, Homo sapien
ccggcggcgcctcaggtcgcggggcgcctaggcctgggttgtcctttgcatctgcacgtgttcgcagtcgtttccgcgatgctgcctctgctgcgctgcgtgccccgtgtgctgggctcctccgtcgccggcctccgcgctgccgcgcccgcctcgcctttccggcagctcctgcagccggcaccccggctgtgcacccggcccttcgggctgctcagcgtgcgcgcaggttccgagcggcggccgggcctcctgcggcctcgcggaccctgcgcctgtggctgtggctgcggctcgctgcacaccgacggagacaaagcttttgttgatttcctgagtgatgaaattaaggaggaaagaaaaattcagaagcataaaaccctccctaagatgtctggaggttgggagctggaactgaatgggacagaagcgaaattagtgcggaaagttgccggggaaaaaatcacggtcactttcaacattaacaacagcatcccaccaacatttgatggtgaggaggaaccctcgcaagggcagaaggttgaagaacaggagcctgaactgacatcaactcccaatttcgtggttgaagttataaagaatgatgatggcaagaaggcccttgtgttggactgtcattatccagaggatgaggttggacaagaagacgaggctgagagtgacatcttctctatcagggaagttagctttcagtccactggcgagtctgaatggaaggatactaattatacactcaacacagattccttggactgggccttatatgaccacctaatggatttccttgccgaccgaggggtggacaacacttttgcagatgagctggtggagctcagcacagccctggagcaccaggagtacattacttttcttgaagacctcaagagttttgtcaagagccagtagagcagacagatgctgaaagccatagtttcatggcaggctttggccagtgaacaaatcctactctgaagctagacatgtgctttgaaatgattatcatcctaatatcatgggggaaaaaataccaaatttaaattatatgttttgtgttctcatttattatcatttttttctgtacaaatctattatttctagatttttgtataacatgatagacataaaattggtttatctcctccgctgagtcttcctagaagtacctgctgggttctcagttccagttcccatcctttgattgatcactctccctgacatccacctgtatgactttgtcaccaaatgctgtcttctctttctccaatcaagaaataataatccctcgagtttacaaaacaaaaaaaaaaaaaa

SEQ ID NO: 755 - protein, 282 aa, Homo sapien
MLPLLRCVPRVLGSSVAGLRAAAPASPFRQLLQPAPRLCTRPFGLLSVRAGSERRPGLLRPRGPCACGCGCGSLHTDGDKAFVDFLSDEIKEERKIQKHKTLPKMSGGWELELNGTEAKLVRKVAGEKITVTFNINNSIPPTFDGEEEPSQGQKVEEQEPELTSTPNFVVEVIKNDDGKKALVLDCHYPEDEVGQEDEAESDIFSIREVSFQSTGESEWKDTNYTLNTDSLDWALYDHLMDFLADRGVDNTFADELVELSTALEHQEYITFLEDLKSFVKSQ

SEQ ID NO: 756 - DNA, 2593 bp, Homo sapien
tggacttggatccgaggcagacgaggaagctgagaaaaccctggcgttgaccccgtggacctgggcgccccgggaaggtccagcgcttggtccaggcaggcggggatgtgcggtgaccaccctggtcctgaaaagtccagccccgaatctccctccctcctagacctggaggcctggaacagccagccgcccacggacgccagagccgggaaccctgacggcacttagctgctgacaaacaacctgctccgtggacgcctgaaacaccagtctttggggccagtgcctcagtttcaatccaggtaacctttaaatgaaacttgcctaaaatcttaggtcatacacagaagagactccaatcgacaagaagctggaaaagaatgatgttgtccttaaacaacctacagaatatcatctataacccggtaatcccgtatgttggcaccattcccgatcagctggatcctggaactttgattgtgatatgtgggcatgttcctagtgacgcagacagattccaggtggatctgcagaatggcagcagtgtgaaacctcgagccgatgtggcctttcatttcaatcctcgtttcaaaagggccggctgcattgtttgcaatactttgataaatgaaaaatggggacgggaagagatcacctatgacacgcctttcaaaagagaaaagtcttttgagatcgtgattatggtgctaaaggacaaattccaggtggctgtaaatggaaaacatactctgctctatggccacaggatcggcccagagaaaatagacactctgggcatttatggcaaagtgaatattcactcaattggttttagcttcagctcggacttacaaagtacccaagcatctagtctggaactgacagagataagtagagaaaatgttccaaagtctggcacgccccagcttcagactgtctctccctcctgggatttacagggtcatggctctgaaacattctgtagtgttctttggacacgagttttcctggagatcgctttctgcaggcctattggtctgactgtggcttcttttcagagcctgccattcgctgcaaggttgaacacccccatgggccctggacgaactgtcgtcgttaaaggagaagtgaatgcaaatgccaaaagctttaatgttgacctactagcaggaaaatcaaaggatattgctctacacttgaacccacgcctgaatattaaagcatttgtaagaaattcttttcttcaggagtcctggggagaagaagagagaaatattacctctttcccatttagtcctgggatgtactttgagatgataatttactgtgatgttagagaattcaaggttgcagtaaatggcgtacacagcctggagtacaaacacagatttaaagagctcagcagtattgacacgctggaaattaatggagacatccacttactggaagtaaggagctggtagcctacctacacagctgctacaaaaaccaaaatacagaatggcttctgtgatactggccttgctgaaacgcatctcactgtcattctattgtttatattgttaaaatgagcttgtgcaccattagatcctgctgggtgttctcagtccttgccatgaagtatggtggtgtctagcactgaatggggaaactgggggcagcaacacttatagccagttaaagccactctgccctctctcctactttggctgactcttcaagaatgccattcaacaagtatttatggagtacctactataatacagtagctaacatgtattgagcacagattttttttggtaaaactgtgaggagctaggatatatacttggtgaaacaaaccagtatgttccctgttctcttgagcttcgactcttctgtgctctattgctgcgcactgctttttctacaggcattacatcaactcctaaggggtcctctgggattagttaagcagctattaaatcacccgaagacactaatttacagaagacacaactccttccccagtgatcactgtcataaccagtgctctaccgtatcccatcactgaggactgatgttgactgacatcattttatcgtaataaacatgtggctctattagctgcaagctttaccaagtaattggcatgacatctgagcacagaaattaaggcaaaaaaccaaagcaaaacaaatacatggtgctgaaattaacttgatgccaagcccaaggcagctgatttctgtgtatttgaacttagggcaaatcagagtctacacagacgcctacagaaagtttcaggaagaggcaagatgcattcaatttgaaagatatttatgggcaacaaagtaaggtcaggattagacttcaggcattcataaggcaggcactatcagaaagtgtacgccaactaagggacccacaaagcaggcagaggtaatgcagaaatctgttttgttcccatgaaatcaccaatcaaggcctccgttcttctaaagattagtccatcatcattagcaactgagatcaaagcactcttccactttacgtgattaaaatcaaacctgtatcagcaaaaaaaaaaaaaaaaaaaaaaaaaaaaaaaaaa

SEQ ID NO: 757 - protein, 359 aa, Homo sapien
MLSLNNLQNIIYNPVIPYVGTIPDQLDPGTLIVICGHVPSDADRFQVDLQNGSSVKPRADVAFHFNPRFKRAGCIVCNTLINEKWGREEITYDTPFKREKSFEIVIMVLKDKFQVAVNGKHTLLYGHRIGPEKIDTLGIYGKVNIHSIGFSFSSDLQSTQASSLELTEISRENVPKSGTPQLQTVSPSWDLQGHGSETFCSVLWTRVFLEIAFCRPIGLTVASFQSLPFAARLNTPMGPGRTVVVKGEVNANAKSFNVDLLAGKSKDIALHLNPRLNIKAFVRNSFLQESWGEEERNITSFPFSPGMYFEMIIYCDVREFKVAVNGVHSLEYKHRFKELSSIDTLEINGDIHLLEVRSW

SEQ ID NO: 758 - DNA, 1672 bp, Homo sapien
ggcggcggccggctcccgcaggcgccgaggcaggcgagcccccggccccaggcgcccgggccccgccgccgcccgcgcgcggcgcggcattttattcaggcgacgcttaagggagccggccgcgcccggtgcattgtgggaggcccgcggccgttttcgggaggaaggcggaggggccaaagcgagccggtggatccataaagaacccagccaacccgcagagggaggggaggggctgagctgtgaggagagcggggcccaagaaccatgtctacgcgggagtcctttaacccggaaagttacgaattggacaaaagcttccggctaaccagattcactgaactgaagggcacaggctgcaaagtgccccaagatgtcctgcaaaaattgctggaatctttacaggagaaccacttccaagaagatgagcagtttctgggagccgttatgccaaggcttggcattggaatggatacttgtgtcattcctttgaggcacggtgggctttccttggttcaaaccacagattacatttacccgatcgtagacgacccttacatgatgggcaggatagcgtgtgccaatgtcctcagtgacctctatgcaatgggggtcacggaatgtgacaatatgctgatgctccttggagtcagtaataaaatgaccgacagggaaagggataaagtgatgcctctgattatccaaggttttaaagacgcagctgaggaagcaggaacgtctgtaacaggcggccaaacagtactaaacccctggattgtcctgggaggagtggctaccactgtctgccaacccaatgaatttatcatgccagacaatgcagtgccaggggacgtgctggtgctgacaaaacccctggggacacaggtggcagtggctgtgcaccagtggctggatatccctgagaaatggaataagattaaactagtggtcacccaagaagatgtagagctggcctaccaggaggcgatgatgaacatggcgaggctcaacaggacagctgcaggactcatgcacacgttcaatacccacgccgccactgacatcacgggcttcgggattttgggccatgcgcagaacctggccaagcagcagaggaacgaggtgtcgtttgtaattcacaacctcccggtgctggccaagatggctgcggtgagcaaggcctgcggaaacatgttcggcctcatgcacgggacctgcccggagacttcaggcggccttctgatctgtttaccacgtgagcaagcagctcggttctgtgcagagataaagtcccccaaatatggtgaaggccaccaagcatggattattgggattgtagagaagggcaaccgcacagccagaatcatagacaaaccccggatcatcgaggtcgcacacaagtggccactcaaaacgtgaatcccacacccggggccacctcttaatctagacagaaatagctgtttggttttgtttttaaatagatctatttcccttatcacttcaattaaagactataaacaacaaaaatctcattgtgtctacacatcggggtgaccttaggtcggtttgtaagtggatacaattaataaaataaaatccattgcctttttttcctgttacattaactgaagatcgacctaatcttgaggcagcttctgagttgagaatt

SEQ ID NO: 759 - protein, 383 aa, Homo sapien
MSTRESFNPESYELDKSFRLTRFTELKGTGCKVPQDVLQKLLESLQENHFQEDEQFLGAVMPRLGIGMDTCVIPLRHGGLSLVQTTDYIYPIVDDPYMMGRIACANVLSDLYAMGVTECDNMLMLLGVSNKMTDRERDKVMPLIIQGFKDAAEEAGTSVTGGQTVLNPWIVLGGVATTVCQPNEFIMPDNAVPGDVLVLTKPLGTQVAVAVHQWLDIPEKWNKIKLVVTQEDVELAYQEAMMNMARLNRTAAGLMHTFNTHAATDITGFGILGHAQNLAKQQRNEVSFVIHNLPVLAKMAAVSKACGNMFGLMHGTCPETSGGLLICLPREQAARFCAEIKSPKYGEGHQAWIIGIVEKGNRTARIIDKPRIIEVAHKWPLKT

SEQ ID NO: 760 - DNA, 3207 bp, Homo sapien
tctccctccgcctcccgagcaccagcgcgctctgagctgcccccagggtccctcccccgccgccagcagcccatttggagggaggaagtaagggaagaggagaggaaggggagccggaccgactacccagacagagccggtgaatgggtttgtggtgacccccgccccccaccccaccctcccttcccacccgacccccaacccccatccccagttcgagccgccgcccgaaaggccgggccgtcgtcttaggaggagtcgccgccgccgccacctccgccatggagctgatcaccattctcgagaagaccgtgtctcccgatcggctggagctggaagcggcgcagaagttcctggagcgtgcggccgtggagaacctgcccactttccttgtggaactgtccagagtgctggcaaatccaggaaacagtcaggttgccagagttgcagctggtctacaaatcaagaactctttgacatctaaagatccagatatcaaggcacaatatcagcagaggtggcttgctattgatgctaatgctcgacgagaagtcaagaactatgttttgcagacattgggtacagaaacttaccggcctagttctgcctcacagtgtgtggctggtattgcttgtgcagagatcccagtaaaccagtggccagaactcattcctcagctggtggccaatgtcacaaaccccaacagcacagagcacatgaaggagtcgacattggaagccatcggttatatttgccaagatatagacccagagcagctacaagataaatccaatgagattctgactgccataatccaggggatgaggaaagaagagcctagtaataatgtgaagctagctgctacgaatgcactcctgaactcattggagttcaccaaagcaaactttgataaagagtctgaaaggcactttattatgcaggtggtctgtgaagccacacagtgtccagatacgagggtacgagtggctgctttacagaatctggtgaagataatgtccttatattatcagtacatggagacatatatgggtcctgctctttttgcaatcacaatcgaagcaatgaaaagtgacattgatgaggtggctttacaagggatagaattctggtccaatgtctgtgatgaggaaatggatttggccattgaagcttcagaggcagcagaacaaggacggccccctgagcacaccagcaagttttatgcgaagggagcactacagtatctggttccaatcctcacacagacactaactaaacaggacgaaaatgatgatgacgatgactggaacccctgcaaagcagcaggggtgtgcctcatgcttctggccacctgctgtgaagatgacattgtcccacatgtcctccccttcattaaagaacacatcaagaacccagattggcggtaccgggatgcagcagtgatggcttttggttgtatcttggaaggaccagagcccagtcagctcaaaccactagttatacaggctatgcccaccctaatagaattaatgaaagaccccagtgtagttgttcgagatacagctgcatggactgtaggcagaatttgtgagctgcttcctgaagctgccatcaatgatgtctacttggctcccctgctacagtgtctgattgagggtctcagtgctgaacccagagtggcttcaaatgtgtgctgggctttctccagtctggctgaagctgcttatgaagctgcagacgttgctgatgatcaggaagaaccagctacttactgcttatcttcttcatttgaactcatagttcagaagctcctagagactacagacagacctgatggacaccagaacaacctgaggagttctgcatatgaatctctgatggaaattgtgaaaaacagtgccaaggattgttatcctgctgtccagaaaacgactttggtcatcatggaacgactgcaacaggttcttcagatggagtcacatatccagagcacatccgatagaatccagttcaatgaccttcagtctttactctgtgcaactcttcagaatgttcttcggaaagtgcaacatcaagatgctttgcagatctctgatgtggttatggcctccctgttaaggatgttccaaagcacagctgggtctgggggagtacaagaggatgccctgatggcagttagcacactggtggaagtgttgggtggtgaattcctcaagtacatggaggcctttaaacccttcctgggcattggattaaaaaattatgctgaataccaggtttgtttggcagctgtgggcttagtgggagacttgtgccgtgccctgcaatccaacatcatacctttctgtgacgaggtgatgcagctgcttctggaaaatttggggaatgagaacgtccacaggtctgtgaagccgcagattctgtcagtgtttggtgatattgcccttgctattggaggagagtttaaaaaatacttagaggttgtattgaatactcttcagcaggcctcccaagcccaggtggacaagtcagactatgacatggtggattatctgaatgagctaagggaaagctgcttggaagcctatactggaatcgtccagggattaaagggggatcaggagaacgtacacccggatgtgatgctggtacaacccagagtagaatttattctgtctttcattgaccacattgctggagatgaggatcacacagatggagtagtagcttgtgctgctggactaataggggacttatgtacagcatttgggaaggatgtactgaaattagtagaagctaggccaatgatccatgaattgttaactgaagggcggagatcgaagactaacaaagcaaaaacccttgctacatgggcaacaaaagaactgaggaaactgaagaaccaagcttgatctgttaccattgggatgataacctgaggacccccactggaaatctcccatcttttgaaaaacctggaagtgaggagtgtgcacggatgctgaatgtttgggaatgagaggatgagtgagtgaggcttgaaaacacaccacattgaaaatcctgccacagcagcagccgcagccgccaacagcagcgctgttagtgagctaagtaagcactgacttcgtagaaaaccataacatcggccatcttggaaaagagaaaaacaatggagttacttatttaaaaaaaaaaaaaaaaaaa

SEQ ID NO: 761 - protein, 876 aa, Homo sapien
MELITILEKTVSPDRLELEAAQKFLERAAVENLPTFLVELSRVLANPGNSQVARVAAGLQIKNSLTSKDPDIKAQYQQRWLAIDANARREVKNYVLQTLGTETYRPSSASQCVAGIACAEIPVNQWPELIPQLVANVTNPNSTEHMKESTLEAIGYICQDIDPEQLQDKSNEILTAIIQGMRKEEPSNNVKLAATNALLNSLEFTKANFDKESERHFIMQVVCEATQCPDTRVRVAALQNLVKIMSLYYQYMETYMGPALFAITIEAMKSDIDEVALQGIEFWSNVCDEEMDLAIEASEAAEQGRPPEHTSKFYAKGALQYLVPILTQTLTKQDENDDDDDWNPCKAAGVCLMLLATCCEDDIVPHVLPFIKEHIKNPDWRYRDAAVMAFGCILEGPEPSQLKPLVIQAMPTLIELMKDPSVVVRDTAAWTVGRICELLPEAAINDVYLAPLLQCLIEGLSAEPRVASNVCWAFSSLAEAAYEAADVADDQEEPATYCLSSSFELIVQKLLETTDRPDGHQNNLRSSAYESLMEIVKNSAKDCYPAVQKTTLVIMERLQQVLQMESHIQSTSDRIQFNDLQSLLCATLQNVLRKVQHQDALQISDVVMASLLRMFQSTAGSGGVQEDALMAVSTLVEVLGGEFLKYMEAFKPFLGIGLKNYAEYQVCLAAVGLVGDLCRALQSNIIPFCDEVMQLLLENLGNENVHRSVKPQILSVFGDIALAIGGEFKKYLEVVLNTLQQASQAQVDKSDYDMVDYLNELRESCLEAYTGIVQGLKGDQENVHPDVMLVQPRVEFILSFIDHIAGDEDHTDGVVACAAGLIGDLCTAFGKDVLKLVEARPMIHELLTEGRRSKTNKAKTLATWATKELRKLKNQA

SEQ ID NO: 762 - DNA, 1577 bp, Homo sapien
ggcacgaggctgctgtttgtctacttcctcctgcttccccgccgccgccgccgccatcatgagggaaatcgtgcacttgcaggccgggcagtgcggcaaccaaatcggcgccaagttttgggaggtgatcagcgatgagcacggcatcgaccccacgggcacctaccacggggacagcgacctgcagctggaacgcatcaacgtgtactacaatgaggccaccggcggcaagtacgtgccccgcgccgtgctcgtggatctggagcccggcaccatggactccgtgcgctcggggcccttcgggcagatcttccggccggacaacttcgttttcggtcagagtggtgctgggaacaactgggccaaggggcactacacagaaggcgcggagctggtggactcggtgctggatgttgtgagaaaggaggctgagagctgtgactgcctgcagggtttccagctgacccactccctgggtggggggactgggtctgggatgggtaccctcctcatcagcaagatccgggaggagtacccagacaggatcatgaacacgtttagtgtggtgccttcgcccaaagtgtcagacacagtggtggagccctacaacgccaccctctcagtccaccagctcgtagaaaacacagacgagacctactgcattgataacgaagctctctacgacatttgcttcagaaccctaaagctgaccacgcccacctatggtgacctgaaccacctggtgtctgctaccatgagtggggtcaccacctgcctgcgcttcccaggccagctcaatgctgacctgcggaagctggctgtgaacatggtcccgtttccccggctgcacttcttcatgcccggctttgccccactgaccagccggggcagccagcagtaccgggcgctgaccgtgcccgagctcacccagcagatgtttgatgccaagaacatgatggctgcctgcgacccccgccatggccgctacctgacggttgccgccgtgttcaggggccgcatgtccatgaaggaggtggatgagcaaatgcttaatgtccaaaacaaaaacagcagctattttgttgagtggatccccaacaatgtgaaaacggctgtctgtgacatcccacctcgggggctaaaaatgtccgccaccttcattggcaacagcacggccatccaggagctgttcaagcgcatctccgagcagttcacggccatgttccggcgcaaggccttcctgcactggtacacgggcgagggcatggacgagatggagttcaccgaggccgagagcaacatgaatgacctggtgtccgagtaccagcagtaccaggatgccacagccgaggaggagggcgagttcgaggaggaggctgaggaggaggtggcctagagccttcagtcactggggaaagcagggaagcagtgtgaactctttattcactcccagcctgtcctgtggcctgtcccactgtgtgcacttgctgttttccctgtccacatccatgctgtacagacaccaccattaaagcattttcatagtgaaaaaaaaaaaaaaaaaaaaaaaaaaaaaa

SEQ ID NO: 763 - protein, 445 aa, Homo sapien
MREIVHLQAGQCGNQIGAKFWEVISDEHGIDPTGTYHGDSDLQLERINVYYNEATGGKYVPRAVLVDLEPGTMDSVRSGPFGQIFRPDNFVFGQSGAGNNWAKGHYTEGAELVDSVLDVVRKEAESCDCLQGFQLTHSLGGGTGSGMGTLLISKIREEYPDRIMNTFSVVPSPKVSDTVVEPYNATLSVHQLVENTDETYCIDNEALYDICFRTLKLTTPTYGDLNHLVSATMSGVTTCLRFPGQLNADLRKLAVNMVPFPRLHFFMPGFAPLTSRGSQQYRALTVPELTQQMFDAKNMMAACDPRHGRYLTVAAVFRGRMSMKEVDEQMLNVQNKNSSYFVEWIPNNVKTAVCDIPPRGLKMSATFIGNSTAIQELFKRISEQFTAMFRRKAFLHWYTGEGMDEMEFTEAESNMNDLVSEYQQYQDATAEEEGEFEEEAEEEVA

SEQ ID NO: 764 - DNA, 3430 bp, Homo sapien
ggtttccggagctgcggcggcgcagactgggagggggagccgggggttccgacgtcgcagccgagggaacaagccccaaccggatcctggacaggcaccccggcttggcgctgtctctccccctcggctcggagaggcccttcggcctgagggagcctcgccgcccgtccccggcacacgcgcagccccggcctctcggcctctgccggagaaacaggatggcccaatggaatcagctacagcagcttgacacacggtacctggagcagctccatcagctctacagtgacagcttcccaatggagctgcggcagtttctggccccttggattgagagtcaagattgggcatatgcggccagcaaagaatcacatgccactttggtgtttcataatctcctgggagagattgaccagcagtatagccgcttcctgcaagagtcgaatgttctctatcagcacaatctacgaagaatcaagcagtttcttcagagcaggtatcttgagaagccaatggagattgcccggattgtggcccggtgcctgtgggaagaatcacgccttctacagactgcagccactgcggcccagcaagggggccaggccaaccaccccacagcagccgtggtgacggagaagcagcagatgctggagcagcaccttcaggatgtccggaagagagtgcaggatctagaacagaaaatgaaagtggtagagaatctccaggatgactttgatttcaactataaaaccctcaagagtcaaggagacatgcaagatctgaatggaaacaaccagtcagtgaccaggcagaagatgcagcagctggaacagatgctcactgcgctggaccagatgcggagaagcatcgtgagtgagctggcggggcttttgtcagcgatggagtacgtgcagaaaactctcacggacgaggagctggctgactggaagaggcggcaacagattgcctgcattggaggcccgcccaacatctgcctagatcggctagaaaactggataacgtcattagcagaatctcaacttcagacccgtcaacaaattaagaaactggaggagttgcagcaaaaagtttcctacaaaggggaccccattgtacagcaccggccgatgctggaggagagaatcgtggagctgtttagaaacttaatgaaaagtgcctttgtggtggagcggcagccctgcatgcccatgcatcctgaccggcccctcgtcatcaagaccggcgtccagttcactactaaagtcaggttgctggtcaaattccctgagttgaattatcagcttaaaattaaagtgtgcattgacaaagactctggggacgttgcagctctcagaggatcccggaaatttaacattctgggcacaaacacaaaagtgatgaacatggaagaatccaacaacggcagcctctctgcagaattcaaacacttgaccctgagggagcagagatgtgggaatgggggccgagccaattgtgatgcttccctgattgtgactgaggagctgcacctgatcacctttgagaccgaggtgtatcaccaaggcctcaagattgacctagagacccactccttgccagttgtggtgatctccaacatctgtcagatgccaaatgcctgggcgtccatcctgtggtacaacatgctgaccaacaatcccaagaatgtaaacttttttaccaagcccccaattggaacctgggatcaagtggccgaggtcctgagctggcagttctcctccaccaccaagcgaggactgagcatcgagcagctgactacactggcagagaaactcttgggacctggtgtgaattattcagggtgtcagatcacatgggctaaattttgcaaagaaaacatggctggcaagggcttctccttctgggtctggctggacaatatcattgaccttgtgaaaaagtacatcctggccctttggaacgaagggtacatcatgggctttatcagtaaggagcgggagcgggccatcttgagcactaagcctccaggcaccttcctgctaagattcagtgaaagcagcaaagaaggaggcgtcactttcacttgggtggagaaggacatcagcggtaagacccagatccagtccgtggaaccatacacaaagcagcagctgaacaacatgtcatttgctgaaatcatcatgggctataagatcatggatgctaccaatatcctggtgtctccactggtctatctctatcctgacattcccaaggaggaggcattcggaaagtattgtcggccagagagccaggagcatcctgaagctgacccaggcgctgccccatacctgaagaccaagtttatctgtgtgacaccaacgacctgcagcaataccattgacctgccgatgtccccccgcactttagattcattgatgcagtttggaaataatggtgaaggtgctgaaccctcagcaggagggcagtttgagtccctcacctttgacatggagttgacctcggagtgcgctacctcccccatgtgaggagctgagaacggaagctgcagaaagatacgactgaggcgcctacctgcattctgccacccctcacacagccaaaccccagatcatctgaaactactaactttgtggttccagattttttttaatctcctacttctgctatctttgagcaatctgggcacttttaaaaatagagaaatgagtgaatgtgggtgatctgcttttatctaaatgcaaataaggatgtgttctctgagacccatgatcaggggatgtggcggggggtggctagagggagaaaaaggaaatgtcttgtgttgttttgttcccctgccctcctttctcagcagctttttgttattgttgttgttgttcttagacaagtgcctcctggtgcctgcggcatccttctgcctgtttctgtaagcaaatgccacaggccacctatagctacatactcctggcattgcactttttaaccttgctgacatccaaatagaagataggactatctaagccctaggtttctttttaaattaagaaataataacaattaaagggcaaaaaacactgtatcagcatagcctttctgtatttaagaaacttaagcagccgggcatggtggctcacgcctgtaatcccagcactttgggaggccgaggcggatcataaggtcaggagatcaagaccatcctggctaacacggtgaaaccccgtctctactaaaagtacaaaaaattagctgggtgtggtggtgggcgcctgtagtcccagctactcgggaggctgaggcaggagaatcgcttgaacctgagaggcggaggttgcagtgagccaaaattgcaccactgcacactgcactccatcctgggcgacagtctgagactctgtctcaaaaaaaaaaaaaaaaaaaaaaaaaaaaa

SEQ ID NO: 765 - protein, 770 aa, Homo sapien
MAQWNQLQQLDTRYLEQLHQLYSDSFPMELRQFLAPWIESQDWAYAASKESHATLVFHNLLGEIDQQYSRFLQESNVLYQHNLRRIKQFLQSRYLEKPMEIARIVARCLWEESRLLQTAATAAQQGGQANHPTAAVVTEKQQMLEQHLQDVRKRVQDLEQKMKVVENLQDDFDFNYKTLKSQGDMQDLNGNNQSVTRQKMQQLEQMLTALDQMRRSIVSELAGLLSAMEYVQKTLTDEELADWKRRQQIACIGGPPNICLDRLENWITSLAESQLQTRQQIKKLEELQQKVSYKGDPIVQHRPMLEERIVELFRNLMKSAFVVERQPCMPMHPDRPLVIKTGVQFTTKVRLLVKFPELNYQLKIKVCIDKDSGDVAALRGSRKFNILGTNTKVMNMEESNNGSLSAEFKHLTLREQRCGNGGRANCDASLIVTEELHLITFETEVYHQGLKIDLETHSLPVVVISNICQMPNAWASILWYNMLTNNPKNVNFFTKPPIGTWDQVAEVLSWQFSSTTKRGLSIEQLTTLAEKLLGPGVNYSGCQITWAKFCKENMAGKGFSFWVWLDNIIDLVKKYILALWNEGYIMGFISKERERAILSTKPPGTFLLRFSESSKEGGVTFTWVEKDISGKTQIQSVEPYTKQQLNNMSFAEIIMGYKIMDATNILVSPLVYLYPDIPKEEAFGKYCRPESQEHPEADPGSAAPYLKTKFICVTPTTCSNTIDLPMSPRTLDSLMQFGNNGEGAEPSAGGQFESLTFDMELTSECATSPM

SEQ ID NO: 766 - DNA, 3111 bp, Homo sapien
gcgagttgtgtgagccgccagtatggccgggctatggcggcgagcactggctacgtgcgactgtggggagcggcgcggtgctgggtgctgcggcggccgatgctggccgccgccggggggcgggttcccactgcagcaggagcgtggttgctccgaggccagcggacctgcgacgcctctcctccttgggcactgtggggccgaggcccggcaattgggggccaatggcgggggttttgggaagcgagcagccgcggcggaggcgcattctcggggggcgaggacgcctccgagggcggcgcggaggaaggagccggcggcgcggggggcagcgcgggcgccggggaaggcccggtcataacggcgctcacgcccatgacgatccccgatgtgtttccgcacctgccgctcatcgccatcacccgcaacccggtgttcccgcgctttatcaagattatcgaggttaaaaataagaagttggttgagctgctgagaaggaaagttcgtctcgcccagccttatgtcggcgtctttctaaagagagatgacagcaatgagtcggatgtggtcgagagcctggatgaaatctaccacacggggacgtttgcccagatccatgagatgcaggaccttggggacaagctgcgcatgatcgtcatgggacacagaagagtccatatcagcagacagctggaggtggagcccgaggagccggaggcggagaacaagcacaagccccgcaggaagtcaaagcggggcaagaaggaggcggaggacgagctgagcgccaggcacccggcggagctggcgatggagcccacccctgagctcccggctgaggtgctcatggtggaggtagagaacgttgtccacgaggacttccaggtcacggaggaggtgaaagccctgactgcagagatcgtgaagaccatccgggacatcattgccttgaaccctctctacagggagtcagtgctgcagatgatgcaggctggccagcgggtggtggacaaccccatctacctgagcgacatgggcgccgcgctcaccggggccgagtcccatgagctgcaggacgtcctggaagagaccaatattcctaagcggctgtacaaggccctctccctgctgaagaaggaatttgaactgagcaagctgcagcagcgcctggggcgggaggtggaggagaagatcaagcagacccaccgtaagtacctgctgcaggagcagctaaagatcatcaagaaggagctgggcctggagaaggacgacaaggatgccatcgaggagaagttccgggagcgcctgaaggagctcgtggtccccaagcacgtcatggatgttgtggacgaggagctgagcaagctgggcctgctggacaaccactcctcggagttcaatgtcacccgcaactacctagactggctcacgtccatcccttggggcaagtacagcaacgagaacctggacctggcgcgggcacaggcagtgctggaggaagaccactacggcatggaggacgtcaagaaacgcatcctggagttcattgccgttagccagctccgcggctccacccagggcaagatcctctgcttctatggcccccctggcgtgggtaagaccagcattgctcgctccatcgcccgcgccctgaaccgagagtacttccgcttcagcgtcgggggcatgactgacgtggctgagatcaagggccacaggcggacctacgtgggcgccatgcccgggaagatcatccagtgtttgaagaagaccaagacggagaaccccctgatcctcatcgacgaggtggacaagatcggccgaggctaccagggggacccgtcgtcggcactgctggagctgctggacccagagcagaatgccaacttcctggaccactacctggacgtgcccgtggacttgtccaaggtgctgttcatctgcacggccaacgtcacggacaccatccccgagccgctgcgagaccgtatggagatgatcaacgtgtcgggctacgtggcccaggagaagctggccattgcggagcgctacctggtgccccaggctcgcgccctgtgtggcttggatgagagcaaggccaagctgtcatcggacgtgctgacgctgctcatcaagcagtactgccgcgagagcggtgtccgcaacctgcagaagcaagtggagaaggtgttacggaaatcggcctacaagattgtcagcggcgaggccgagtccgtggaggtgacgcccgagaacctgcaggacttcgtggggaagcccgtgttcaccgtggagcgcatgtatgacgtgacaccgcccggcgtggtcatggggctggcctggaccgcaatgggaggctccacgctgtttgtggagacatccctgagacggccacaggacaaggatgccaagggtgacaaggatggcagcctggaggtgacaggccagctgggggaggtgatgaaggagagcgcccgcatagcctacaccttcgccagagccttcctcatgcagcacgcccccgccaatgactacctggtgacctcacacatccacctgcatgtgcccgagggcgccacccccaaggacggcccaagcgcaggctgcaccatcgtcacggccctgctgtccctggccatgggcaggcctgtccggcagaatctggccatgactggcgaagtctccctcacgggcaagatcctgcctgttggtggcatcaaggagaagaccattgcggccaagcgcgcaggggtgacgtgcatcgtcctgccagccgagaacaagaaggacttctacgacctggcagccttcatcaccgagggcctggaggtgcacttcgtggaacactaccgggagatcttcgacatcgccttcccggacgagcaggcagaggcgctggccgtggaacggtgacggccaccccgggactgcaggcggcggatgtcaggccctgtctgggccagaactgagcgctgtggggagcgcgcccggacctggcagtggagccaccgagcgagcagctcggtccagtgacccagatcccagggacctcagtcggcttaatcagagtgtggcatagaagctatttaatgattaaagtcatttgcagta

SEQ ID NO: 767 - protein, 959 aa, Homo sapien
MAASTGYVRLWGAARCWVLRRPMLAAAGGRVPTAAGAWLLRGQRTCDASPPWALWGRGPAIGGQWRGFWEASSRGGGAFSGGEDASEGGAEEGAGGAGGSAGAGEGPVITALTPMTIPDVFPHLPLIAITRNPVFPRFIKIIEVKNKKLVELLRRKVRLAQPYVGVFLKRDDSNESDVVESLDEIYHTGTFAQIHEMQDLGDKLRMIVMGHRRVHISRQLEVEPEEPEAENKHKPRRKSKRGKKEAEDELSARHPAELAMEPTPELPAEVLMVEVENVVHEDFQVTEEVKALTAEIVKTIRDIIALNPLYRESVLQMMQAGQRVVDNPIYLSDMGAALTGAESHELQDVLEETNIPKRLYKALSLLKKEFELSKLQQRLGREVEEKIKQTHRKYLLQEQLKIIKKELGLEKDDKDAIEEKFRERLKELVVPKHVMDVVDEELSKLGLLDNHSSEFNVTRNYLDWLTSIPWGKYSNENLDLARAQAVLEEDHYGMEDVKKRILEFIAVSQLRGSTQGKILCFYGPPGVGKTSIARSIARALNREYFRFSVGGMTDVAEIKGHRRTYVGAMPGKIIQCLKKTKTENPLILIDEVDKIGRGYQGDPSSALLELLDPEQNANFLDHYLDVPVDLSKVLFICTANVTDTIPEPLRDRMEMINVSGYVAQEKLAIAERYLVPQARALCGLDESKAKLSSDVLTLLIKQYCRESGVRNLQKQVEKVLRKSAYKIVSGEAESVEVTPENLQDFVGKPVFTVERMYDVTPPGVVMGLAWTAMGGSTLFVETSLRRPQDKDAKGDKDGSLEVTGQLGEVMKESARIAYTFARAFLMQHAPANDYLVTSHIHLHVPEGATPKDGPSAGCTIVTALLSLAMGRPVRQNLAMTGEVSLTGKILPVGGIKEKTIAAKRAGVTCIVLPAENKKDFYDLAAFITEGLEVHFVEHYREIFDIAFPDEQAEALAVER

SEQ ID NO: 768 - DNA, 3038 bp, Homo sapien
gtggggctgggcccagccggacgcgacctcagcctgcggcggctaactgccggtaggcgtctgtgtgcgccgccaagtcggtggggcggggacgcgaggtgtggatggggggtcgccttgacctctgcctcagccagtagcgcagtctcggcctcgccgttacggagatggtgccctgggtgcggacgatggggcagaagctgaagcagcggctgcgactggacgtgggacgcgagatctgccgccagtacccgctgttctgcttcctgctgctctgtctcagcgccgcctccctgcttcttaacaggtatattcatattttaatgatcttctggtcatttgttgctggagttgtcacattctactgctcactaggacctgattctctcttaccaaatatattcttcacaataaaatacaaacccaagcagttaggacttcaggaattatttcctcaaggtcatagctgtgctgtttgtggtaaagtgaaatgtaaacgacataggccttctttgctacttgaaaactaccagccatggctagacctgaaaatttcttccaaggttgatgcatctctctcagaggtggatattccatctattataaccaagaaactattaaaagcagcaatgaagcatatagaagtgatagttaaagccagacagaaagtaaaaaatacagagtttttacagcaagctgctttagaagaatatggtccagagcttcatgttgctttgagaagtcgaagagatgaattgcactatttaaggaaacttactgaactgctttttccttatattttgcctcctaaagcaacagactgcagatctctgaccttacttataagagagattctgtctggctctgtgttccttccttctttggatttcctagctgatccagatactgtgaatcatttgcttatcatcttcatagatgacagtccacctgaaaaagcaactgaaccggcttctcctttggttccattcttgcagaaatttgcagaacctagaaataaaaagccatctgtgctgaagttagaattgaagcaaatcagagagcaacaagatcttttatttcgttttatgaactttctgaaacaagaaggcgcagtgcacgtgttgcagttttgtttgactgtggaggaatttaatgatagaattttacgaccagaattatcaaatgatgaaatgctgtctcttcatgaagaattgcagaagatttataaaacatactgtttggatgaaagtattgacaaaattagatttgatcccttcattgtagaagagattcaaagaattgctgaaggcccatacatagatgttgtgaaacttcaaactatgagatgtctttttgaagcatatgaacatgttctttcccttttggagaatgtatttactcctatgttctgccatagtgatgagtatttcagacaacttttaagaggtgcagaatcaccaacacgcaattcaaaattgaacaggaacacacagaaaaggggagaatcatttggaatcagcagaataggtagcaaaattaaaggagtattcaaaagtaccacaatggagggagctatgttgcctaattatggtgtagctgaaggtgaagatgattttattgaagaaggtattgttgtaatggaagatgattctccagtggaggctgtgagcacacctaatactccccgaaaccttgctgcatggaaaattagcattccatatgtagacttttttgaggatccctcctctgaaaggaaggagaaaaaagaaagaattcctgtgttttgtattgatgttgaaagaaatgatagaagagcagttggacacgagcctgaacattggtctgtctatagaagatatcttgaattctatgtacttgaatcaaaactaacagaatttcatggtgcatttcctgatgcccagcttccttctaagaggatcattggccccaaaaattatgaattcttaaagtcaaagagggaagagttccaagaatatctacagaaacttctgcagcatccagaactgagtaatagtcaacttctggcagactttctttcccctaatggtggggaaacacaatttcttgataagatactaccagatgtaaatcttgggaaaattataaaatctgttcctggaaaactaatgaaagagaaaggtcagcatttggaaccttttatcatgaatttcattaattcttgtgagtctccaaagcctaaaccaagtagaccagaactgaccattctcagccctacttcagaaaacaacaagaagcttttcaatgatctgtttaaaaataatgcaaaccgtgctgaaaatacagagagaaagcaaaatcagaattattttatggaggtgatgactgtagaaggagtctatgattacctgatgtatgtaggacgggtagttttccaggttcctgactggcttcatcatctcttaatgggaactcgaatcctctttaaaaacaccctggaaatgtatactgattactatcttcagtgtaaactagaacagctatttcaggagcaccgtttggtctcactcataacacttctcagagatgctatattctgtgaaaacactgaacctcgctctctccaagataagcaaaaaggagcaaaacagacttttgaagaaatgatgaattacattccagatctgttagtcaagtgtattggtgaagaaaccaagtatgaaagcatcagacttctgtttgatggcttacagcaaccagtactcaacaagcagctgacttatgttttattggacattgtgatacaggaactgtttccagagctcaataaggtacaaaaggaagttacctctgtgacatcttggatgtaaacacttggatttggtatagaataacccattgaaatttctgctgtgcgagggtggtagaaatttacttttttgggtatattcttatatatattatgtacatcgctgtctgaaattttagttattttttgtttttaataaagactaacacaaacttaatgattaaaagtgaaaaaaaaaaaaaaaaaaaaa

SEQ ID NO: 769 - protein, 886 aa, Homo sapien
MGQKLKQRLRLDVGREICRQYPLFCFLLLCLSAASLLLNRYIHILMIFWSFVAGVVTFYCSLGPDSLLPNIFFTIKYKPKQLGLQELFPQGHSCAVCGKVKCKRHRPSLLLENYQPWLDLKISSKVDASLSEVDIPSIITKKLLKAAMKHIEVIVKARQKVKNTEFLQQAALEEYGPELHVALRSRRDELHYLRKLTELLFPYILPPKATDCRSLTLLIREILSGSVFLPSLDFLADPDTVNHLLIIFIDDSPPEKATEPASPLVPFLQKFAEPRNKKPSVLKLELKQIREQQDLLFRFMNFLKQEGAVHVLQFCLTVEEFNDRILRPELSNDEMLSLHEELQKIYKTYCLDESIDKIRFDPFIVEEIQRIAEGPYIDVVKLQTMRCLFEAYEHVLSLLENVFTPMFCHSDEYFRQLLRGAESPTRNSKLNRNTQKRGESFGISRIGSKIKGVFKSTTMEGAMLPNYGVAEGEDDFIEEGIVVMEDDSPVEAVSTPNTPRNLAAWKISIPYVDFFEDPSSERKEKKERIPVFCIDVERNDRRAVGHEPEHWSVYRRYLEFYVLESKLTEFHGAFPDAQLPSKRIIGPKNYEFLKSKREEFQEYLQKLLQHPELSNSQLLADFLSPNGGETQFLDKILPDVNLGKIIKSVPGKLMKEKGQHLEPFIMNFINSCESPKPKPSRPELTILSPTSENNKKLFNDLFKNNANRAENTERKQNQNYFMEVMTVEGVYDYLMYVGRVVFQVPDWLHHLLMGTRILFKNTLEMYTDYYLQCKLEQLFQEHRLVSLITLLRDAIFCENTEPRSLQDKQKGAKQTFEEMMNYIPDLLVKCIGEETKYESIRLLFDGLQQPVLNKQLTYVLLDIVIQELFPELNKVQKEVTSVTSWM

SEQ ID NO: 770 - DNA, 2932 bp, Homo sapien
agagaggagccgactcggcagggactgggggaccgggccgagagtgcgagcgagcgagggagggagtgagggagcgtgcgagccagaaggggaaaggcggccactcgtgcctgagcgaccgcagaggggagtgggagcagtggggtaaaggagcggggggcgggaataagaaaggccgagagaaggcggacagaggctagtggtggtggtggtggtagggggagaaggaggagctggaggagggcaggggctgagggagtgagtgaagcggacgcgcgagggaggggagggaagggaagggaagggaagggggggtcacgcgggggcgcgcgcgcgcaccgggagcgcgctcggaggcgagtggaactggatcgggtttgctgccagcggcgtgagcttcggccgccattttacaacagctccactcgcgccggacacagggagcagcgagcacgcgtttcccgcaacccgataccatcggacaggatttctccgcctcagcccaacggggagatctctggaaacatggctacagaacatgttaatggaaatggtactgaagagcccatggatactacttctgcagttatccattcagaaaattttcagacattgcttgatgctggtttaccacagaaagttgctgaaaaactagatgaaatttacgttgcagggctagttgcacatagtgatttagatgaaagagctattgaagctttaaaagaattcaatgaagacggtgcattggcagttcttcaacagtttaaagacagtgatctctctcatgttcagaacaaaagtgcctttttatgtggagtcatgaagacttacaggcagagagaaaaacaagggaccaaagtagcagattctagtaaaggaccagatgaggcaaaaattaaggcactcttggaaagaacaggctacacacttgatgtgaccactggacagaggaagtatggaggaccacctccagattccgtttattcaggtcagcagccttctgttggcactgagatatttgtgggaaagatcccaagagatctatttgaggatgaacttgttccattatttgagaaagctggacctatatgggatcttcgtctaatgatggatccactcactggtctcaatagaggttatgcgtttgtcactttttgtacaaaagaagcagctcaggaggctgttaaactgtataataatcatgaaattcgttctggaaaacatattggtgtctgcatctcagttgccaacaataggctttttgtgggctctattcctaagagtaaaaccaaggaacagattcttgaagaatttagcaaagtaacagagggtcttacagacgtcattttataccaccaaccggatgacaagaaaaaaaacaggagcttttgctttcttgaatatgaagatcacaaaacagctgcccaggcaaggcgtaggttaatgagtggtaaagtcaaggtctgggggaatgttggaactgttgaatgggctgatcctatagaagatcctgatcctgaggttatggcaaaggtaaaagtgctgtttgtacgcaaccttgccaatactgtaacagaagagattttagaaaaggcatttagtcagtttgggaaactggaacgagtgaagaagttaaaagattatgcgttcattcattttgatgagcgagatggtgctgtcaaggctatggaagaaatgaatggcaaagacttggagggagaaaatattgaaattgtttttgccaagccaccagatcagaaaaggaaagaaagaaaagctcagaggcaagcagcaaaaaatcaaatgtatgacgattactactattatggtccacctcatatgccccctccaacaagaggtcgagggcgtggaggtagaggtggttatggatatcctccagattattatggatatgaagattattatgattattatggttatgattaccataactatcgtggtggatatgaagatccatactatggttatgaagattttcaagttggagctagaggaaggggtggtagaggagcaaggggtgctgctccatccagaggtcgtggggctgctcctccccgcggtagagccggttattcacagagaggaggtcctggatcagcaagaggcgttcgaggtgcgagaggaggtgcccaacaacaaagaggccgcggggtacgtggtgcgaggggtggccgcggtggaaatgtaggaggaaagcgcaaagctgatgggtacaaccagccagattccaagcggcgccagaccaataatcagaactggggctcccaacccattgctcagcaaccgctccaaggtggtgatcattctggtaactatggttacaaatctgaaaaccaggagttttatcaggatacttttgggcaacagtggaagtagaaacagtagggcctctgtaaaattggagactgataggttgatcagaaactcaccctaaatctgaacgggtgccgctataatttgtgacatctggcaagatttccctttatgtatatattttaacaatccgcttggacacgaacaaagccacacttctaactgcttctggcgaactgattttatttttaatttttttcaataaagatattcttagatactgaaagaaatagttaatgagtttgcatttgtgcttgagaaaatttggctcaagtccatttggctgtagtgtcaacgatgtttccagtagtgtttagatttggtgtcttcaaaggtagttgattaaaaccaagtgtgtctttaatatcttgtatcagaataactttgtatgttaccaacttaaattgctagaataaggtaaattgatacacaactgctatttttaatttagaactttgacctaatttgggttttcaaaaccattttggctacttgtattctttatgctgttgtttatttcaataaaaaattcacacct

SEQ ID NO: 771 - protein, 623 aa, Homo sapien
MATEHVNGNGTEEPMDTTSAVIHSENFQTLLDAGLPQKVAEKLDEIYVAGLVAHSDLDERAIEALKEFNEDGALAVLQQFKDSDLSHVQNKSAFLCGVMKTYRQREKQGTKVADSSKGPDEAKIKALLERTGYTLDVTTGQRKYGGPPPDSVYSGQQPSVGTEIFVGKIPRDLFEDELVPLFEKAGPIWDLRLMMDPLTGLNRGYAFVTFCTKEAAQEAVKLYNNHEIRSGKHIGVCISVANNRLFVGSIPKSKTKEQILEEFSKVTEGLTDVILYHQPDDKKKNRSFCFLEYEDHKTAAQARRRLMSGKVKVWGNVGTVEWADPIEDPDPEVMAKVKVLFVRNLANTVTEEILEKAFSQFGKLERVKKLKDYAFIHFDERDGAVKAMEEMNGKDLEGENIEIVFAKPPDQKRKERKAQRQAAKNQMYDDYYYYGPPHMPPPTRGRGRGGRGGYGYPPDYYGYEDYYDYYGYDYHNYRGGYEDPYYGYEDFQVGARGRGGRGARGAAPSRGRGAAPPRGRAGYSQRGGPGSARGVRGARGGAQQQRGRGVRGARGGRGGNVGGKRKADGYNQPDSKRRQTNNQNWGSQPIAQQPLQGGDHSGNYGYKSENQEFYQDTFGQQWK

SEQ ID NO: 772 - DNA, 1696 bp, Homo sapien
ctttttctccatctcagaaccttcctgccgtcgcgtttgcacctcgctgctccagcctctggggcgcattccaaccttccagcctgcgacctgcggagaaaaaaaattacttattttcttgccccatacataccttgaggcgagcaaaaaaattaaattttaaccatgagggaaatcgtgcacatccaggctggtcagtgtggcaaccagatcggtgccaagttctgggaggtgatcagtgatgaacatggcatcgaccccaccggcacctaccacggggacagcgacctgcagctggaccgcatctctgtgtactacaatgaagccacaggtggcaaatatgttcctcgtgccatcctggtggatctagaacctgggaccatggactctgttcgctcaggtccttttggccagatctttagaccagacaactttgtatttggtcagtctggggcaggtaacaactgggccaaaggccactacacagagggcgccgagctggttgattctgtcctggatgtggtacggaaggaggcagagagctgtgactgcctgcagggcttccagctgacccactcactgggcgggggcacaggctctggaatgggcactctccttatcagcaagatccgagaagaataccctgatcgcatcatgaataccttcagtgtggtgccttcacccaaagtgtctgacaccgtggtcgagccctacaatgccaccctctccgtccatcagttggtagagaatactgatgagacctattgcattgacaacgaggccctctatgatatctgcttccgcactctgaagctgaccacaccaacctacggggatctgaaccaccttgtctcagccaccatgagtggtgtcaccacctgcctccgtttccctggccagctcaatgctgacctccgcaagttggcagtcaacatggtccccttcccacgtctccatttctttatgcctggctttgcccctctcaccagccgtggaagccagcagtatcgagctctcacagtgccggaactcacccagcaggtcttcgatgccaaggacatgatggctgcctgtgacccccgccacggccgatacctcaccgtggctgctgtcttccgtggtcggatgtccatgaaggaggtcgatgagcagatgcttaacgtgcagaacaagaacagcagctactttgtggaatggatccccaacaatgtcaagacagccgtctgtgacatcccacctcgtggcctcaagatggcagtcaccttcattggcaatagcacagccatccaggagctcttcaagcgcatctcggagcagttcactgccatgttccgccggaaggccttcctccactggtacacaggcgagggcatggacgagatggagttcaccgaggctgagagcaacatgaacgacctcgtctctgagtatcagcagtaccaggatgccaccgcagaagaggaggaggatttcggtgaggaggccgaagaggaggcctaaggcagagcccccatcacctcaggcttctcagttcccttagccgtcttactcaactgcccctttcctctccctcagaatttgtgtttgctgcctctatcttgttttttgttttttcttctgggggggggtctagaacagtgcctggcacatagtaggcgctcaataaatacttgtttgttgaaaaaaaaaaaaaaaa

SEQ ID NO: 773 - protein, 444 aa, Homo sapien [sequence omitted]

SEQ ID NO: 774 - DNA, 2061 bp, Homo sapien
tgttccgcgatcttctcaggctctcctagcagcatccatcgccgccaccctatcttcactggcttcaccttctccttctctcttcgttgctgagcgacaagcttcctagcgctatgactgtcgtctccgtcccgcagcgggagccgctcgtcctgggtggccgccttgcgccgcttggcttttcctcccgaggttactttggggccctcccgatggtgaccacggctccgcctcctttaccccggatcccggacccccgggcactgcccccgaccctcttcctccctcatttcctagggggagatggcccgtgtctgaccccccagcctcgcgctccagcagctctgcccaaccgcagcctcgccgtggcgggaggcactcctcgggcagcgccgaagaagcggcgaaagaagaaggtgcgggccagccccgcagggcagctgcccagccgcttccaccagtaccagcagcaccggccgagtctggagggcggccggagccccgcgaccggcccgagcggagcgcaggaggtcccgggcccggccgccgccttggccccgagtcctgcagccgcagccggcacggagggagccagccccgaccttgccccgctgcggcccgcggctcccggccaaacccccctcaggaaagaggttttaaaatcaaagatgggaaaatcggagaaaattgcccttccccatggccagcttgttcatggtatacacttgtatgagcaaccaaagataaacagacagaaaagcaaatataacttgccactaaccaagatcacctctgcaaaaagaaatgaaaacaacttttggcaggattctgtttcatctgacagaattcagaagcaggaaaaaaagccttttaaaaataccgagaacattaaaaattcgcatttgaagaaatcagcatttctaactgaagtgagccaaaaggaaaattatgctggggcaaagtttagtgatccaccttctcctagtgttcttccaaagcctcctagtcactggatgggaagcactgttgaaaattccaaccaaaacagggagctgatggcagtacacttaaaaaccctcctcaaagttcaaacttagatttcagatttcagtatgtgtgtaaaacataatttttcccatatccctggactcttgagaaaattggtacagaaatggaaatttgccttgttgcaacatacaattgcaaaagatgagtttaaaaaattacatacaaacagcttgtattatattttatattttgtaaatactgtataccatgtattatgtgtatattgttcatacttgagaggtatattatagttttgttatgaaagtatgtattttgccctgcccacattgcaggtgttttgtatatatacaatggataaattttaagtgtgtgctaaggcacatggaagaccgattttatttgcacaaggtactgagatttttttcaagaaacagctgtcaaatctcaaggtgaagatctaaatgtgaacagtttactaatgcactactgaagtttaaatctgtggcacaatcaatgtaagcatggggtttgtttctctaaattgatttgtaatctgaaattactgaacaactcctattcccatttttgctaaactcaatttctggttttggtatatatccattccagcttaatgcctctaattttaatgccaacaaaattggttgtaatcaaattttaaaataataataatttggcccccccttttaaaatagtcttgactctttgtgtgtgactgtttctcatgtttgaatgtgtgactaggagatgattttgtgtggttggatttttttgacttctactttactggctgagtgtgagccgccatgcctggccataatctacattttcttaccaggagcagcattgaggtttttgagcatagtacttgactactctagaggctgagacgggagcatctcttgagcctgagaagtggagattgcaattgagctaggatcaggccactgcactccagcctgggtaacagacgctgtctcaaaaaaaaggccaagagaaagtaagggagacaga

SEQ ID NO: 775 - protein, 327 aa, Homo sapien
MTVVSVPQREPLVLGGRLAPLGFSSRGYFGALPMVTTAPPPLPRIPDPRALPPTLFLPHFLGGDGPCLTPQPRAPAALPNRSLAVAGGTPRAAPKKRRKKKVRASPAGQLPSRFHQYQQHRPSLEGGRSPATGPSGAQEVPGPAAALAPSPAAAAGTEGASPDLAPLRPAAPGQTPLRKEVLKSKMGKSEKIALPHGQLVHGIHLYEQPKINRQKSKYNLPLTKITSAKRNENNFWQDSVSSDRIQKQEKKPFKNTENIKNSHLKKSAFLTEVSQKENYAGAKFSDPPSPSVLPKPPSHWMGSTVENSNQNRELMAVHLKTLLKVQT

SEQ ID NO: 776 - DNA, 3485 bp, Homo sapien
ccctaccgcccccaattccgccctgcccccgccgcggcggcgctagccgccactgagggaccgaccctataaaggccgctccgcgaggggtgcgcagcattcggcagagggcgcttcgacgggctgggctgtgcgcctgcgcagtgtgggtcgctcccgattccctgccccggccggccccgcctcggctccgcaccctcgccccgctctcagccgccgctctgccccgcagcagccagccccgtgtccggcagtatgttcagctgggtcagcaaggatgcccgccgcaagaaggagccggagctcttccagacggtggccgaggggctgcggcagctgtacgcgcagaagctgctacccctggaggagcactaccgcttccacgagttccactcgcccgcrctggaggacgctgacttcgacaacaagcctatggtgctcctcgtgrggcagtacagcacgggcaagaccaccttcatccgacacctgatcgagcaggacttcccggggatgcgcatcgggcccgagcccaccaccgactccttcatcgccgtcatgcacggccccactgagggcgtggtgccgggcaacgcgctcgtggtggacccgcggcgccccttccgcaagctcaacgcgtttggcaacgctttcctcaacaggttcatgtgtgcccagctgcccaaccccgtcctggacagcatcagcatcatcgacacccccgggatcctgtctggagagaagcagcggatcagcagaggctatgactttgcagccgtcctggagtggttcgcggagcgtgtggaccgcatcatcctgctcttcgacgcccacaagctggacatctccgatgagttctcggaagtgatcaaggctctgaagaaccatgaggacaagatccgcgtggtgctgaacaaggcagaccagatcgagacgcagcagctgatgcgggtgtacggggccctcatgtggtccctgggcaagatcatcaacacccccgaggtggtcagggtctacatcggctccttctggtcccacccgctcctcatccccgacaaccgcaagctctttgaggccgaggagcaggacctcttcaaggacatccagtcactgccccgaaacgccgccctcaggaagctcaatgacctgatcaagcgggcacggctggccaaggttcacgcctacatcatcagctccctcaagaaagagatgcccaatgtctttggtaaagagagcaaaaagaaagagctggtgaacaacctgggagagatctaccagaagattgagcgcgagcaccagatctcccctggggacttcccgagcctccgcaagatgcaggaactcctgcagacccaggacttcagcaagttccaggcgctgaagcccaagctgctggacacggtggatgacatgctggccaacgacatcgcgcggctgatggtgatggtgcggcaggaggagtccctgatgccttcccaggtggtcaagggcggcgcctttgacggcaccatgaacgggccgttcgggcacggctacggcgagggggccggcgagggcatccacgacgtggagtgggtggtgggcaaggacaagcccacctacgacgagatcttctacacgctgtcccctgtcaacggcaagatcacgggcgccaacgccaagaaggagatggtgaagtccaagctccccaacaccgtgctagggaagatctggaagctggccgacgtggacaaggacgggctgctggacgacgaggagttcgcgctggccaaccacctcatcaaggtcaagctggagggccacgagctgcccgccgacctgcccccgcacctggtgccgccctccaagcgcagacatgagtgatggcgcccggccccgcacctgccatttgcacgcccggccgggaggcagagacggggggaggggaagcctcaccatttctcaaggtccataaagactgagcggatgtttcctcgcctctcgaaaaggaaaaccaccatctttcttttaaggctgttcctgggcctggcgggggaggcaggggtgagaggatggaattgtgtgcacaagaactgtggctattttaatatataacgttagaggctgcgttctttgtcgccgcctcccctgtgtgccagccctgtgtgcacggcctctgccccccggccttgtgctgtggctggagctggacagtgcagtgactgcgaccgtgggggagccaggtcgcccttttggcagctgctaggctgaggctgcatggacaggaacaccaggcaccctccgtgtgcttctgagctgaggttgcttcacgggaccgtggcttccttcctcacctggctctgcctcccccgtgctctcgggcgaagtgggttcttgtgccttcccctcccgggcccaggctccccgtgcgcgggccctgccctttcctcccgcgccccaccggctccgacgcgcaaccccgctcagcagtcacagaagcagggcccagccaccttggtctttttttgggagttcaggggagtaggagaatgtcttccagaaaaatacataagctagtttctgttctgtaaagtgatatctttcatacttgaccaaagttcccaataacttcccaaccactgttcaaaagctgtgatttttgtctccccttcccaccctccagccaaggagcagccctgcccaggggaatttaggtgtgggtacccggggagcaccccgttcctggaccccagtgttgcatttcctggctgaggaagggtggtcatcccagctcctgccctaccctctcacttaactggagctttgggacgcaccctccacagtgggaggtggtggtggggtggcggtggcggggcctcacgacagcttggtgctggtaagaggaagcccgtggttctggctaggctctcatgtccagacagcggggaccaggggaaaacccagccccttctgtaatcccccttcatttcctaccttccttcctcctctgtttagcaaaggagggcagctcacttggatgtccttacaacgcccctggccccaggttgagcaataagaaaccagaaccttgcggcccagtggcccgggccagttcaggccgcctccccctcctctgcctggggccattgagccccagcctccaggggcccgggtgcgtttgcaagccagtggccactgtccgggctgtgatggcaccaaggcaggtggagcaccaggtaccacacagctgggcttcccaccaggctttcccgcgggggtctcagggagcttctccccagcgctgctcggagtctgcaggaactggccttgttctccttagcccgtcactccatacagtattaggtgaggatggatgcgggcgctgtccttgccgggaagtcactgttgaagttgcagtggcttgttcacacctgtgggaagagaagtgaagactttctccttgcattaaaaagtctgaactgtgaaaaaaaaaaaaaaaaaaaaaaaaa

SEQ ID NO: 777 - protein, 534 aa, Homo sapien
  unsure 65: unknown amino acid
MFSWVSKDARRKKEPELFQTVAEGLRQLYAQKLLPLEEHYRFHEFHSPALEDADFDNKPMVLLVXQYSTGKTTFIRHLIEQDFPGMRIGPEPTTDSFIAVMHGPTEGVVPGNALVVDPRRPFRKLNAFGNAFLNRFMCAQLPNPVLDSISIIDTPGILSGEKQRISRGYDFAAVLEWFAERVDRIILLFDAHKLDISDEFSEVIKALKNHEDKIRVVLNKADQIETQQLMRVYGALMWSLGKIINTPEVVRVYIGSFWSHPLLIPDNRKLFEAEEQDLFKDIQSLPRNAALRKLNDLIKRARLAKVHAYIISSLKKEMPNVFGKESKKKELVNNLGEIYQKIEREHQISPGDFPSLRKMQELLQTQDFSKFQALKPKLLDTVDDMLANDIARLMVMVRQEESLMPSQVVKGGAFDGTMNGPFGHGYGEGAGEGIHDVEWVVGKDKPTYDEIFYTLSPVNGKITGANAKKEMVKSKLPNTVLGKIWKLADVDKDGLLDDEEFALANHLIKVKLEGHELPADLPPHLVPPSKRRHE

SEQ ID NO: 778 - DNA, 3409 bp, Homo sapien
gtcatctggccagcccccgcccctcctcccggcgtcagcccgccagaggccgcgcggggcccgggcttcggccgatcagcccgggaggccccgccgcgcccccttggcccgcgcgcccgtggtcacagtggaagaggcgcccgcgctgcgctgcccggaggagccgtcgcgcgcccgcttcctgttcggctggttcctgccagctcgaggacaaaacacgcgtgcgcgcggcgggcgagcgcgctcgccgcctcagtcgccagcgccgggcgcagtccgcctttttccggagcagactggccgcggtgctagtcggtagcagcggccgccgcagcggctccgcactggcgaaccgagggcagaaaaaggcggggttgacggctttttggtaggagtgggctggaccggacgccagagacaaaggctcccaaggcaagagggactgtggccctgcgtcggctctgctcggaactgctgaccccaggaatttacgccccttcgtttttctcttctgattcttctcttctcccaagcccgcgtcccctcacgcgtggcctctctccttgccgggagggccgcgatggaggtcccgcccaggctttcccatgtgccgccgccattgttcccctccgctcccgctactttagcctcccgcagcctctcccattggcggccgcggccgccgcggcagctagccccgctcctcccttcgctcgctcccagctccgcccggcagggggcgcgccgggcccagcgccacgtcaccgcccagcagccctcccgattggcgggcggggcggctataaagggagggcgcaggcggcgcccggatctcttccgccgccattttaaatccagctccatacaacgctccgccgccgctgctgccgcgacccggactgcgcgccagcacccccctgccgacagctccgtcactatggaggatatgaacgagtacagcaatatagaggaattcgcagagggatccaagatcaacgcgagcaagaatcagcaggatgacggtaaaatgtttattggaggcttgagctgggatacaagcaaaaaagatctgacagagtacttgtctcgatttggggaagttgtagactgcacaattaaaacagatccagtcactgggagatcaagaggatttggatttgtgcttttcaaagatgctgctagtgttgataaggttttggaactgaaagaacacaaactggatggcaaattgatagatcccaaaagggccaaagctttaaaagggaaagaacctcccaaaaaggtttttgtgggtggattgagcccggatacttctgaagaacaaattaaagaatattttggagcctttggagagattgaaaatattgaacttcccatggatacaaaaacaaatgaaagaagaggattttgttttatcacatatactgatgaagagccagtaaaaaaattgttagaaagcagataccatcaaattggttctgggaagtgtgaaatcaaagttgcacaacccaaagaggtatataggcagcaacagcaacaacaaaaaggtggaagaggtgctgcagctggtggacgaggtggtacgaggggtcgtggccgaggtcagggccaaaactggaaccaaggatttaataactattatgatcaaggatatggaaattacaatagtgcctatggtggtgatcaaaactatagtggctatggcggatatgattatactgggtataactatgggaactatggatatggacagggatatgcagactacagtggccaacagagcacttatggcaaggcatctcgagggggtggcaatcaccaaaacaattaccagccatactaaaggagaacattggagaaaacaggaggagatgttaaagtaacccatcttgcaggacgacattgaagattggtcttctgttgatctaagatgattattttgtaaaagactttctagtgtacaagacaccattgtgtccaactgtatatagctgccaattagttttctttgtttttactttgtcctttgctatctgtgttatgactcaatgtggatttgtttatacacattttatttgtatcatttcatgttaaacctcaaataaatgcttccttatgtgattgcttttctgcgtcaggtactacatagctctgtaaaaaatgtaatttaaaataagcaataattaaggcacagttgattttgtagagtattggtccatacagagaaactgtggtcctttataaatagccagccagcgtcaccctcttctccaatttgtaggtgtattttatgctcttaaggcttcatcttctccctgtaactgagatttctaccacacctttgaacaatgttctttcccttctggttatctgaagactgtcctgaaaggaagacataagtgttgtgattagtagaagctttgtaatcataacacaatgagtaattcttgtataaaagttcagatacaaaaggagcactgtaaaactggtaggagctatggtttaagagcattggaagtagttacaactcaaggattttggtagaaaggtatgagtttggtcgaaaaattaaaatagtggcaaaataagatttagttgtgttttctcagagccgccacaagattgaacaaaatgttttctgtttgggcatcctgaggaagttgtattagctgttaatgctctgtgagtttagagaaaagtcttgatagtaaatctagtttttgacacagtgcatgaactaagtagttaaatatttacatattcagaaaggaatagtggaaaaggtatcttggttatgacaaagtcattacaaatgtgactaagtcattacaaatgtgactgagtcattacagtggaccctctgggtgcattgaaaagaatccgttttatatccaggtttcagaggacctggaataataataagctttggattttgcattcagtgtagttggattttgggaccttggcctcagtgttatttactgggattggcatacgtgttcacaggcagagtagttgatctcacacaacgggtgatctcacaaaactggtaagtttcttatgctcatgagccctccctttttttttttaatttggtgcctgcaactttcttaacaatgattctacttcctgggctatcacattataatgctcttggcctcttttttgctgctgttttgctattcttaaacttaggccaagtaccaatgttggctgttagaagggattctgttcattcaacatgcaactttagggaatggaagtaagttcatttttaagttgtgtggtcagtaggtgcggtgtctagggtagtgaatcctgtaagttcaaatttatgattaggtgacgagttgacattgagattgtccttttcccctgatcaaaaaaatgaataaagcctttttaaacg

SEQ ID NO: 779 - protein, 420 aa, Homo sapien
MEVPPRLSHVPPPLFPSAPATLASRSLSHWRPRPPRQLAPLLPSLAPSSARQGARRAQRHVTAQQPSRLAGGAAIKGGRRRRPDLFRRHFKSSSIQRSAAAAAATRTARQHPPADSSVTMEDMNEYSNIEEFAEGSKINASKNQQDDGKMFIGGLSWDTSKKDLTEYLSRFGEVVDCTIKTDPVTGRSRGFGFVLFKDAASVDKVLELKEHKLDGKLIDPKRAKALKGKEPPKKVFVGGLSPDTSEEQIKEYFGAFGEIENIELPMDTKTNERRGFCFITYTDEEPVKKLLESRYHQIGSGKCEIKVAQPKEVYRQQQQQQKGGRGAAAGGRGGTRGRGRGQGQNWNQGFNNYYDQGYGNYNSAYGGDQNYSGYGGYDYTGYNYGNYGYGQGYADYSGQQSTYGKASRGGGNHQNNYQPY

SEQ ID NO: 780 - DNA, 1993 bp, Homo sapien
ccgctctgtctgcttcgccaccttctccccgagcactgcccggccggccgccatggctaacgtggctgacacgaagctgtacgacatcctgggcgtcccgcccggcgccagcgagaacgagctgaagaaggcatacagaaagttagccaaggaatatcatcctgataagaatccaaatgcaggagacaaatttaaagaaataagttttgcatatgaagtactatcaaatcctgagaagcgtgagttatatgacagatacggagagcaaggtcttcgggaaggcagcggcggaggtggtggcatggatgatattttctctcacatttttggtgggggattgttcggcttcatgggcaatcagagtagaagtcgaaatggcagaagaagaggagaggacatgatgcatccactcaaagtatctttagaagatctgtataatggcaagacaaccaaactacaacttagcaagaatgtgctctgtagtgcatgcagtggccaaggcggaaagtctggagctgtccaaaagtgtagtgcttgtcgaggtcgaggtgtgcgcatcatgatcagacagctggctccagggatggtacaacagatgcagtctgtgtgctctgattgtaatggagaaggagaggtaattaatgaaaaagaccgctgtaaaaaatgtgaagggaagaaggtgattaaagaagtcaagattcttgaagtccacgtagacaaaggcatgaaacatggacagagaattacattcactggggaagcagaccaggccccaggagtggaacccggagacattgttcttttgctacaggagaaagaacatgaggtatttcagagagatgggaatgatttgcacatgacatataaaataggacttgttgaagctctatgtggatttcagttcacatttaagcaccttgatggacgtcagattgtggtgaaatacccccctggcaaagtaattgaaccagggtgtgttcgtgtagttcgaggtgaagggatgccgcagtatcgtaatccctttgaaaaaggtgatctttacataaagtttgatgtgcagtttcctgaaaacaactggatcaacccagacaagctttctgaactagaagatcttctgccatctagaccggaagttcctaacataattggagaaacagaggaggtagagcttcaggaatttgatagcactcgaggctcaggaggtggtcagaggcgtgaagcctataatgatagctctgatgaagaaagcagcagccatcatggacctggagtgcagtgtgcccatcagtaaactctgcaaacaaattgcacaggtggattttctttccacatttgcctgatttgttctcagcaatccagctggagtgtcttatcaatcccagatgaactgagggacatctgttggtctatgtataacttttaaaattggtatagtatctacagagtgtataatttaaactaaccacaaagctttacatcttcattttgactgttccatagcaaaataaagcacttgaaaggaaacaaaactccctttcacacatggattattataagtttcaatcctggtatctgtgcttgatttttatcagttttgtgtaaatttttatgtttcatattttaaatttaaatcccacattgtaaagtttgtacaatttgtcctgaagctttgtgtttggctgcacctgcataagctgctacaaataaaataaaaaatttcatagcctgtatctatcatttaaatgcatggaaaaaaatgggctttgcacacaatgggtttggagctgactgggaacaatggaaaaaattacattagctgtggttgtaaagtttttttgtttttgggttttgttttttttttgttttttttttttttttttttaccattttgtgaaaggtttttgaaaatcgataataaaaagcggttggtgtaaatttaaaaaaaaaaaaaaaaaaaaaaaaaaaaaaaaaaaaaaaaaaaaaaaaaaaaaaa

SEQ ID NO: 781 - protein, 412 aa, Homo sapien
MANVADTKLYDILGVPPGASENELKKAYRKLAKEYHPDKNPNAGDKFKEISFAYEVLSNPEKRELYDRYGEQGLREGSGGGGGMDDIFSHIFGGGLFGFMGNQSRSRNGRRRGEDMMHPLKVSLEDLYNGKTTKLQLSKNVLCSACSGQGGKSGAVQKCSACRGRGVRIMIRQLAPGMVQQMQSVCSDCNGEGEVINEKDRCKKCEGKKVIKEVKILEVHVDKGMKHGQRITFTGEADQAPGVEPGDIVLLLQEKEHEVFQRDGNDLHMTYKIGLVEALCGFQFTFKHLDGRQIVVKYPPGKVIEPGCVRVVRGEGMPQYRNPFEKGDLYIKFDVQFPENNWINPDKLSELEDLLPSRPEVPNIIGETEEVELQEFDSTRGSGGGQRREAYNDSSDEESSSHHGPGVQCAHQ

SEQ ID NO: 782 - DNA, 1204 bp, Homo sapien
ctctgaggagaagcagcagcaaacatttgctagtcagacaagtgacagggaatggattccaaacagcagtgtgtaaagctaaatgatggccacttcatgcctgtattgggatttggcacctatgcacctccagaggttccgagaagtaaagctttggaggtcacaaaattagcaatagaagctgggttccgccatatagattctgctcatttatacaataatgaggagcaggttggactggccatccgaagcaagattgcagatggcagtgtgaagagagaagacatattctacacttcaaagctttggtccacttttcatcgaccagagttggtccgaccagccttggaaaactcactgaaaaaagctcaattggactatgttgacctctatcttattcattctccaatgtctctaaagccaggtgaggaactttcaccaacagatgaaaatggaaaagtaatatttgacatagtggatctctgtaccacctgggaggccatggagaagtgtaaggatgcaggattggccaagtccattggggtgtcaaacttcaaccgcaggcagctggagatgatcctcaacaagccaggactcaagtacaagcctgtctgcaaccaggtagaatgtcatccgtatttcaaccggagtaaattgctagatttctgcaagtcgaaagatattgttctggttgcctatagtgctctgggatctcaacgagacaaacgatgggtggacccgaactccccggtgctcttggaggacccagtcctttgtgccttggcaaaaaagcacaagcgaaccccagccctgattgccctgcgctaccagctgcagcgtggggttgtggtcctggccaagagctacaatgagcagcgcatcagacagaacgtgcaggtttttgagttccagttgactgcagaggacatgaaagccatagatggcctagacagaaatctccactattttaacagtgatagttttgctagccaccctaattatccatattcagatgaatattaacatggagagctttgcctgatgtctaccagaagccctgtgtgtggatggtgacgcagaggacgtctctatgccggtgactggacatatcacctctacttaaatccgtcctgtttagcgacttcagtcaactacagctgagtccataggccagaaagacaataaatttttatcattttgaaat

SEQ ID NO: 783 - protein, 323 aa, Homo sapien
MDSKQQCVKLNDGHFMPVLGFGTYAPPEVPRSKALEVTKLAIEAGFRHIDSAHLYNNEEQVGLAIRSKIADGSVKREDIFYTSKLWSTFHRPELVRPALENSLKKAQLDYVDLYLIHSPMSLKPGEELSPTDENGKVIFDIVDLCTTWEAMEKCKDAGLAKSIGVSNFNRRQLEMILNKPGLKYKPVCNQVECHPYFNRSKLLDFCKSKDIVLVAYSALGSQRDKRWVDPNSPVLLEDPVLCALAKKHKRTPALIALRYQLQRGVVVLAKSYNEQRIRQNVQVFEFQLTAEDMKAIDGLDRNLHYFNSDSFASHPNYPYSDEY

SEQ ID NO: 784 - DNA, 1526 bp, Homo sapien
gcatctgcgcaggcgcccggctcctaagtctacccaggaactgaccctgctctctcctttccctgttagacatgggcactccacagaaggatgttattatcaagtcagatgcaccggacactttgttattggagaaacatgcagattatatcgcatcctatggctcaaagaaagatgattatgaatactgtatgtctgagtatttgagaatgagtggcatctattggggtctgacagtaatggatctcatgggacaacttcatcgcatgaatagagaagagattctggcatttattaagtcttgccaacatgaatgtggtggaataagtgctagtatcggacatgatcctcatcttttatacactcttagtgctgtccagattcttacgctgtatgacagtattaatgttattgacgtaaataaagttgtggaatatgttaaaggtctacagaaagaagatggttcttttgctggagatatttggggagaaattgacacaagattctctttttgtgcggtggcaactttggctttgttggggaagcttgatgctattaatgtggaaaaggcaatcgaatttgttttatcctgtatgaactttgacggtggatttggttgcagaccaggttctgaatcccatgctgggcagatctattgttgcacaggatttctggctattacaagtcagttgcatcaagtaaattctgatttacttggctggtggctttgtgaacgacaattaccctcaggcgggctcaatggaaggccggagaagttaccagatgtatgctactcatggtgggtcctggcttccctaaagataattggaagacttcattggattgatagagagaaactgcgtaatttcattttagcatgtcaagatgaagaaacggggggatttgcagacaggccaggagatatggtggatccttttcataccttatttggaattgctggattgtcacttttgggagaagaacagattaaacctgttaatcctgtcttttgcatgcctgaagaagtgcttcagagagtgaatgttcagcctgagctagtgagctagattcattgaattgaaagttgcatagtatagttttgccattttaacatttctgtatttgaagtgcttatcgaatctaaaagtgactactgttaatattttgtatattgtgttaaattaattttaataaattatataattatacatattgtaaaataaagaccggtattttattttctgctttttattctgaagtcctgttattctgactacagttctttgtgtatacttctgtgtctgttatgttcaataactgagctaacataaaataactctaggtttctacttgatttttcccccatgtatacctttcatctgttctatagcaagttgatgtaaattggtttgtcaacaagaatgttaactgatgaaagtggatagaacccatacatgaattaaatgatgcacaaaataaatggctgttgaaatttgaaaaaaaaaaaaaaaaaaaaaaaaaaaaaa

SEQ ID NO: 785 - protein, 331 aa, Homo sapien
MGTPQKDVIIKSDAPDTLLLEKHADYIASYGSKKDDYEYCMSEYLRMSGIYWGLTVMDLMGQLHRMNREEILAFIKSCQHECGGISASIGHDPHLLYTLSAVQILTLYDSINVIDVNKVVEYVKGLQKEDGSFAGDIWGEIDTRFSFCAVATLALLGKLDAINVEKAIEFVLSCMNFDGGFGCRPGSESHAGQIYCCTGFLAITSQLHQVNSDLLGWWLCERQLPSGGLNGRPEKLPDVCYSWWVLASLKIIGRLHWIDREKLRNFILACQDEETGGFADRPGDMVDPFHTLFGIAGLSLLGEEQIKPVNPVFCMPEEVLQRVNVQPELVS

SEQ ID NO: 786 - DNA, 6996 bp, Homo sapien
gcggggaccgcgacgagcccgggtcgccgttggcagcagcagcagcaacaccagcagcagcagcagccccggcggcggcgcggaaccccgagcgcccgggcgcaccccggcttcccggagcgcgacgcggcggcagcagccccggtgcggccgcgcgcgccttaggctcggccccgcggctcggggaccccgactcccggcccagcgagcgcgtcccccggcgccgcccgagagcccgaggaggcagcggccgcagagcccgggggaggggggcggccaccgcccgcgccgggcatcctcaggagccccagagcgcggagggcgcggcgccgccgagcggtgctggcccccgcgggctccccggaccttccccaccgcctgggcccgagggacgcgtgatcgggcgggcggccgggcgcaagggtgggagggagccgcccccgcccgcgccccctccgcccctcgccccaaacccctgggcgccgggcccgggccgcgcggcctgaagcgcccgcgatggcgagcccgccgcggcacgggccgcccgggccggcgagcggagacggccccaacctcaacaacaacaacaacaacaacaacaaccacagcgtgcgcaagtgcggctacctgcgcaacgaagagcatggccacaagcgcttcttcgtgctgcgcggacccggcgcgggcggcgacgaggcgacggcgggcggggggtcggcgccgcaaccgccgcggctcgagtactacgagagcgagaaaaagtggcggagcaaggcaggcgcgccgaaacgggtgatcgctctcgactgctgcctgaacatcaacaagcgcgccgacgccaagcacaagtacctgatcgccctctacaccaaggacgagtacttcgccgtggccgccgagaacgagcaggagcaggagggctggtaccgcgcgctcaccgacctggtcagcgagggccgcgcggccgccggagacgcgccccccgccgccgcgcccgccgcgtcctgcagcgcctccctgcccggcgccctgggcggctctgccggcgccgccggggccgaggacagctacgggctggtggctcccgccacggccgcctaccgtgaggtgtggcaggtgaacctgaagcccaagggtctgggccagagcaagaacctgacgggggtgtaccgtctgtgcctgtctgcgcgcaccatcggcttcgtgaagctcaactgcgagcagccgtcggtgacgctgcagctcatgaacatccgccgctgcggccactcggacagcttcttcttcatcgaggtgggccgctcggccgtcacaggccccggcgagctgtggatgcaggcggacgactcggtggtggcgcagaacatccacgagaccatcctggaggccatgaaggcgctcaaggagctcttcgagttccggccgcgcagtaagagccaatcgtcggggtcgtcggccacgcaccccatcagcgtccccggcgcgcgccgccaccaccacctggtcaacctgccccccagccagacgggcctggtgcgccgctcgcgcaccgacagcctggccgccaccccgccggcggccaagtgcagctcgtgccgggtgcgcaccgccagcgagggcgacggcggccgggctgcgggagcggcggccgcggcgcagaggctggtgtcggtggctgggagccccctgagccccgggccggtgcgcgcgcccctgagccgctcgcacaccctgagcggcggctgcggcggccgcgggagcaaggtggcgctgctgccggcagggggcgcgctgcaacacagccgctccatgtccatgcccgtggcgcactcgccgcccgccgccaccagccccggctccctgtcgtccagcagcggccacggctcgggctcctacccgccgccgcccggcccgcacccgcctctgccgcatccgctgcaccacggccccggccagcggccctccagcggcagcgcctccgcctcgggctcccccagcgaccccggcttcatgtccctggacgagtacggctccagcccaggcgacctgcgcgccttctgcagccaccgaagcaacacgcccgagtccatcgcggagacgcccccggcccgagacggcggcggcggcggtgagttctacgggtacatgaccatggacaggcccctgagccactgtggccgctcctaccgccgggtctcgggggacgcggcccaggacctggaccgagggctgcgcaagaggacctactccctgaccacgccagcccggcagcggccggtgccccagccctcctctgcctcgctggatgaatacaccctgatgcgggccaccttctcgggcagcgcgggccgcctctgcccgtcctgccccgcgtcctctcccaaggtggcctaccacccctacccagaggactacggagacatcgagatcggctcccacaggagctccagcagcaacctgggggcagacgacggctacatgcccatgacgcccggcgcggccttcgcgggcagtgggagcggcagctgcaggagcgacgactacatgcccatgagccccgccagcgtgtccgcccccaagcagatcttgcagcccagggccgccgccgccgccgccgccgccgtgccttctgcggggcctgcggggccagcacccacctctgcggcgggcaggacattcccggcgagcgggggcggctacaaggccagctcgcccgccgagagctcccccgaggacagtgggtacatgcgcatgtggtgcggttccaagctgtccatggagcatgcagatggcaagctgctgcccaacggggactacctcaacgtgtcccccagcgacgcggtcaccacgggcaccccgcccgacttcttctccgcagccctgcaccccggcggggagccgctcaggggcgttcccggctgctgctacagctccttgccccgctcctacaaggccccctacacctgtggcggggacagcgaccagtacgtgctcatgagctcccccgtggggcgcatcctggaggaggagcgtctggagcctcaggccacgccagggcccagccaggcggccagcgccttcggggccggccccacgcagccccctcaccctgtagtgccttcgcccgtgcggcgtagcggccgccggtcaggtttcttgggccagcgcggccgggcggtgaggcccacgcgcctgtccctggaggggctgcccagcctgcccagcatgcacgagtacccactgccaccggagcccaagagccccggcgagtacatcaacatcgactttggcgagcccggggcccgcctgtcgccgcccgcgcctcccctgctggcgtcggcggcctcgtcctcctcgctcttgtccgccagcagcccggcctcgtcgctgggctcaggcaccccgggcaccagcagcgacagccggcagcggtctccgctctccgactacatgaacctcgacttcagctcccccaagtctcctaagccgggcgccccgagcggccaccccgtgggctccttggacggcctcctgtcccccgaggcctcctccccgtatccgccgttgcccccgcgtccgtccgcgtccccgtcgtcgtctctgcagccgccgccaccgccgccggccccgggggagctgtaccgcctgccccccgcctcggccgttgccaccgcccagggcccgggcgccgcctcatcgttgtcctcggacaccggggacaatggtgactacaccgagatggcttttggtgtggccgccaccccgccgcaacctatcgcggcccccccgaagccagaagctgcccgcgtggccagcccgacgtcgggcgtgaagaggctgagcctcatggagcaggtgtcgggagtcgaggccttcctgcaggccagccagcccccggacccccaccgcggcgccaaggtcatccgcgcagacccgcaggggggccgccgccgccacagttccgagaccttctcctccaccacgacggtcacccccgtgtccccgtccttcgcccacaaccccaagcgccacaactcggcctccgtggaaaatgtctctctcaggaaaagcagcgagggcggcgtgggtgtcggccctggagggggcgacgagccgcccacctccccacgacagttgcagccggcgccccctttggcaccgcagggccggccgtggaccccgggtcagcccgggggcttggtcggttgtcctgggagcggtggatcgcccatgcgcagagagacctctgccggcttccagaatggtctcaactacatcgccatcgacgtgagggaggagcccgggctgccaccccagccgcagccgccgccgccgccgcttcctcagccgggagacaagagctcctggggccggacccgaagcctcgggggtctcatcagcgctgtgggcgtcggcagcaccggcggcgggtgcggggggccgggtcccggtgccctgccccctgccaacacctacgccagcattgacttcttgtcccaccacttgaaggaggccaccatcgtgaaagagtgaagatctgtctggctttatcaccaggatgtcacatgtcagagaatatcattaaaagaagacgctcagcgctgtttcagcccgaagctgcttgcagttttcttttggatctgagcaatgactgtgtttggaaacatctgtggactctgatagatggggcacaacaaggcaaggtcacctgcctctttcccttgttcccggatgggcattcatcattgtgctgtttgcgttttgttttgttttgttttaacaaaattagctgaagaagttattctcaagaaaattggatgttttcattggccttcttaaattgtggccagtgtcttttaatttcttcttcttttccttttggcaaagcagatataaccctcagcatgctaggagagtgcacccgtacctatggaagtggtaaaatctggtatttactggcttacactcaaaacgaccacagtcctacctcagttcaaggtaaagccggatttccgtggcgggggtccacaggacctcctgtagtagcccctgcgctgtgtgtctggagcgcgtcctcgccttatttaaatggtccagtagacagctgcttgttggattccagtgcaggtacctgcgatgtttacgtccacaccgagcccagtgtgggactgacatttctcaatggaagtgaaatttgggattggactttgaagacgattactaaataataattattatatgtaactgaagcaacctacttttgaaaatcaactgtattgggtagtgggaggtgggagggaagggctttgggaaggggatgaatatctctttttacctttaacagacttgtttaatcttctcgatgtagatgtttatgtaggtacttcacattgcaaacgccttttattctatttacaagctcagatgtctctgctctcctgaatcttgggcatgcctttctgtaaccaaaaatccctgtaggcgtgctagcaattccagggtggtccgggtttggcagatttgatttttaaaaaatgtattatctttaataaaaatgttattatgtcaaccagtgaggctgccctgaacaaaaaaaaacaaaaagaaaaaaaaaaaaaggaaagaaagaaactgataaaaagaggcatccagcccctatgttattgatggaaaaagaaaaagaagaaaagcaatctcgcagtacatgttacttgtcgaaaaaattccggacaagactacccttgttttatgttttcagtattctgaaaataccagtgtgtggcagttctcgcagatgttacctaaaactgctgaacttgaccggcagaatgttctgccgttttctgctccctcgacacttgattggagggctgtcgacctctcctcccgtgggggcttccccagtgcctatcttctctgatagtcatggagaggttacactaattcattggagatgtaagttgttggttttgttttgttttgtttttagaaaaatatatataaatatataatagatatctatcgctatagaataatgcattaataaaatgaggcttttttagaggaagaccaaaaaattcaatgtcttaaaaatatatttaatggcaatgcaaaagtcttcctgcttccgtgctgaactttagaacagaggattgtattgcaagacaaagttgaatgtaaagtgatctccctgaacatttttaaggttttacttttctgaaattatacatcacagcagtgcataggccatataatgttagctggaaggtcaatttcagtgtatgatatactttattaagatgtataaaacatcctgaagtttttatttagttttgggaataggcatcagtgggtggtatttgctttgtaactccccccaggtacgatagggactgaatatggaccctgctgaaagcagtgtattgacgcatatttaactcgccctctatccgtagagtagtcatgacactatacagatggttcgtgttcatactgcagcttaaaacaagcaaaatacacagatgataatatgctaaattttcctctatcctgtacatttcacaaaaaggcatatgcaatatttacatttttaatttagtttacagaatggaaccaaaatgtataaatgttatgtttgctaaaacttcacaatgtatattgggtctttgtacattttgcctgacttaccttaaatttaaaatattttttgctatataaactttaacagttattaaacagtgttttccttttgggtacgtattgtttctggatatcaagatgttaaatatatttcttgctattgtgatatgacaagagacttaacttatcttgctctgtcttccactgtacacgctgtatataggggtcaatgtgatgctgctggagacgagaataaactggactagaatagtgcattgtatttagtctgtattgatcatggatgccctccttaatagccatatgcaataaaataaagtacattatttatgaaatgaa

SEQ ID NO: 787 - protein, 1338 aa, Homo sapien [sequence omitted]

SEQ ID NO: 788 - DNA, 4134 bp, Homo sapien
gggtgattcagcgcccggcgaggcggaacgggccgcaagaggaggaggggagagcccgtccgcgcctgggctcccggggtggcacgagcccgcggccggagtgcgaggcggaggcgaggaggccgcggggacgggaggcgaggccggccgggcccccgaagccatggagaacgcgcacaccaagacggtggaggaggtgctgggccacttcggcgtcaacgagagtacggggctgagcctggaacaggtcaagaagcttaaggagagatggggctccaacgagttaccggctgaagaaggaaaaaccttgctggaacttgtgattgagcagtttgaagacttgctagttaggattttattactggcagcatgtatatcttttgttttggcttggtttgaagaaggtgaagaaacaattacagcctttgtagaaccttttgtaattttactcatattagtagccaatgcaattgtgggtgtatggcaggaaagaaatgctgaaaatgccatcgaagcccttaaggaatatgagcctgaaatgggcaaagtgtatcgacaggacagaaagagtgtgcagcggattaaagctaaagacatagttcctggtgatattgtagaaattgctgttggtgacaaagttcctgctgatataaggttaacttccatcaaatctaccacactaagagttgaccagtcaattctcacaggtgaatctgtctctgtcatcaagcacactgatcccgtccctgacccacgagctgtcaaccaagataaaaagaacatgctgttttctggtacaaacattgctgctgggaaagctatgggagtggtggtagcaactggagttaacaccgaaattggcaagatccgggatgaaatggtggcaacagaacaggagagaacaccccttcagcaaaaactagatgaatttggggaacagctttccaaagtcatctcccttatttgcattgcagtctggatcataaatattgggcacttcaatgacccggttcatggagggtcctggatcagaggtgctatttactactttaaaattgcagtggccctggctgtagcagccattcctgaaggtctgcctgcagtcatcaccacctgcctggctcttggaactcgcagaatggcaaagaaaaatgccattgttcgaagcctcccgtctgtggaaacccttggttgtacttctgttatctgctcagacaagactggtacacttacaacaaaccagatgtcagtctgcaggatgttcattctggacagagtggaaggtgatacttgttcccttaatgagtttaccataactggatcaacttatgcacctattggagaagtgcataaagatgataaaccagtgaattgtcaccagtatgatggtctggtagaattagcaacaatttgtgctctttgtaatgactctgctttggattacaatgaggcaaagggtgtgtatgaaaaagttggagaagctacagagactgctctcacttgcctagtagagaagatgaatgtatttgataccgaattgaagggtctttctaaaatagaacgtgcaaatgcctgcaactcagtcattaaacagctgatgaaaaaggaattcactctagagttttcacgtgacagaaagtcaatgtcggtttactgtacaccaaataaaccaagcaggacatcaatgagcaagatgtttgtgaagggtgctcctgaaggtgtcattgacaggtgcacccacattcgagttggaagtactaaggttcctatgacctctggagtcaaacagaagatcatgtctgtcattcgagagtggggtagtggcagcgacacactgcgatgcctggccctggccactcatgacaacccactgagaagagaagaaatgcaccttgaggactctgccaactttattaaatatgagaccaatctgaccttcgttggctgcgtgggcatgctggatcctccgagaatcgaggtggcctcctccgtgaagctgtgccggcaagcaggcatccgggtcatcatgatcactggggacaacaagggcactgctgtggccatctgtcgccgcatcggcatcttcgggcaggatgaggacgtgacgtcaaaagctttcacaggccgggagtttgatgaactcaacccctccgcccagcgagacgcctgcctgaacgcccgctgttttgctcgagttgaaccctcccacaagtctaaaatcgtagaatttcttcagtcttttgatgagattacagctatgactggcgatggcgtgaacgatgctcctgctctgaagaaagccgagattggcattgctatgggctctggcactgcggtggctaaaaccgcctctgagatggtcctggcggatgacaacttctccaccattgtggctgccgttgaggaggggcgggcaatctacaacaacatgaaacagttcatccgctacctcatctcgtccaacgtcggggaagttgtctgtattttcctgacagcagcccttggatttcccgaggctttgattcctgttcagctgctctgggtcaatctggtgacagatggcctgcctgccactgcactggggttcaaccctcctgatctggacatcatgaataaacctccccggaacccaaaggaaccattgatcagcgggtggctctttttccgttacttggctattggctgttacgtcggcgctgctaccgtgggtgctgctgcatggtggttcattgctgctgacggtggtccaagagtgtccttctaccagctgagtcatttcctacagtgtaaagaggacaacccggactttgaaggcgtggattgtgcaatctttgaatccccatacccgatgacaatggcgctctctgttctagtaactatagaaatgtgtaacgccctcaacagcttgtccgaaaaccagtccttgctgaggatgcccccctgggagaacatctggctcgtgggctccatctgcctgtccatgtcactccacttcctgatcctctatgtcgaacccttgccactcatcttccagatcacaccgctgaacgtgacccagtggctgatggtgctgaaaatctccttgcccgtgattctcatggatgagacgctcaagtttgtggcccgcaactacctggaacctggtaaagagtgtgtgcagcctgccaccaaatcctgctcgttctcggcatgcaccgatgggatttcctggccgtttgtgctgctcataatgcccctggtgatctgggtctatagcacagacactaactttagcgatatgttctggtcttgactgacagttttccataaagaagatgtttaacttaatcaattaatttttttattgtttaaagcaactgtctatttctgctgaattttcacatgaacatactggctggtgatggaggtttcatactctagattttgttttgctttttctgactccagtggggcaagattttccttttttatacacataattaaagtgtccattgacatgtacagagaactaacactattttatgcaaatatttttttgtagatgaaaaagcatgtacagtgttctgtttaatactcatccttgtataaaaaaaatagttgagccagcagacattgtcagcaaattaattggcagcagattttaggaaatgaatgtgtgtggttttttttctaaaactaaatagcatgtattgtgtcttttgcatgatgatccggatttaatttgatatcacagtctaatttttattcataagccaatttttctgcactgagcagagtcttgctacctcagtcagtattgttttggtttgctacttccctcacccactttggcctccgttcaccccaccccaccccacctctccccaccttacccccgccccgcttggcttcttctttaggattgtgatggttcgttctgtttacatcagttttaacgagaggtatgcctgtactcgcttgtgcagaaaacattgttccagattcaatcgactgggtttatgtcccttcacatagtttttaaggttatttatttaaatgtctaatgtattttattgtaacagacattgttttgccaacattgcctatttcagtggcacgtcatctagttttaaaaaaataaaacattttaaaaag

SEQ ID NO: 789 - protein, 1042 aa, Homo sapien
MENAHTKTVEEVLGHFGVNESTGLSLEQVKKLKERWGSNELPAEEGKTLLELVIEQFEDLLVRILLLAACISFVLAWFEEGEETITAFVEPFVILLILVANAIVGVWQERNAENAIEALKEYEPEMGKVYRQDRKSVQRIKAKDIVPGDIVEIAVGDKVPADIRLTSIKSTTLRVDQSILTGESVSVIKHTDPVPDPRAVNQDKKNMLFSGTNIAAGKAMGVVVATGVNTEIGKIRDEMVATEQERTPLQQKLDEFGEQLSKVISLICIAVWIINIGHFNDPVHGGSWIRGAIYYFKIAVALAVAAIPEGLPAVITTCLALGTRRMAKKNAIVRSLPSVETLGCTSVICSDKTGTLTTNQMSVCRMFILDRVEGDTCSLNEFTITGSTYAPIGEVHKDDKPVNCHQYDGLVELATICALCNDSALDYNEAKGVYEKVGEATETALTCLVEKMNVFDTELKGLSKIERANACNSVIKQLMKKEFTLEFSRDRKSMSVYCTPNKPSRTSMSKMFVKGAPEGVIDRCTHIRVGSTKVPMTSGVKQKIMSVIREWGSGSDTLRCLALATHDNPLRREEMHLEDSANFIKYETNLTFVGCVGMLDPPRIEVASSVKLCRQAGIRVIMITGDNKGTAVAICRRIGIFGQDEDVTSKAFTGREFDELNPSAQRDACLNARCFARVEPSHKSKIVEFLQSFDEITAMTGDGVNDAPALKKAEIGIAMGSGTAVAKTASEMVLADDNFSTIVAAVEEGRAIYNNMKQFIRYLISSNVGEVVCIFLTAALGFPEALIPVQLLWVNLVTDGLPATALGFNPPDLDIMNKPPRNPKEPLISGWLFFRYLAIGCYVGAATVGAAAWWFIAADGGPRVSFYQLSHFLQCKEDNPDFEGVDCAIFESPYPMTMALSVLVTIEMCNALNSLSENQSLLRMPPWENIWLVGSICLSMSLHFLILYVEPLPLIFQITPLNVTQWLMVLKISLPVILMDETLKFVARNYLEPGKECVQPATKSCSFSACTDGISWPFVLLIMPLVIWVYSTDTNFSDMFWS

SEQ ID NO: 790 - DNA, 2074 bp, Homo sapien
ggcacgagggctgagaagagttttgcacgtggatcgccgttcgggtgggcgagatggagacagcccccaagccgggcaaggatgtcccgcccaagaaagacaaacttcagaccaagagaaagaaaccgcggcgatactgggaggaagagaccgttccgaccacagccggagcctctccagggcctcctcgtaacaagaagaatcgggagctccgtcctcagagaccaaaaaatgcttacatcttaaagaagtctcggatctctaagaagcctcaggtcccgaagaaaccccgagaatggaagaacccggagtcccagcgcggcttgtccggggcccaagatccattcccaggccccgcccccgtccctgtggaagtggtccagaagttctgtcgcattgacaaatcccgaaagctaccacattctaaagccaaaactcgaagccgacttgaggtggctgaagctgaggaagaggaaacaagtatcaaagctgctcgttctgagctgctgcttgctgaagaacctgggtttctggaaggggaggatggggaagacacagcaaagatatgccaggctgacattgtggaggctgtggacattgcaagtgcagccaagcactttgacttgaatctgcggcagtttggaccctacagactaaactactctcgaactggaagacacctggcttttggagggcgccgaggtcatgtggctgcccttgattgggtaacaaagaagcttatgtgcgagatcaacgtcatggaggcggtgcgggacatccggtttctccattctgaggcactgcttgctgttgctcagaaccgctggctccacatctatgacaatcagggcattgagctccactgtatccgccgctgtgaccgagtaacacggcttgagttcctgcccttccacttcctcctggctacagcttcagaaacagggtttctaacctacctggatgtgtcagtggggaagattgtggcagctctgaatgctcgagctgggcggctcgatgttatgagtcagaacccttacaatgccgtcatccatctcggacacagcaatggtactgtgtctttatggagtccagctatgaaggagccactggcaaagattctctgtcatcgtggtggggtccgggctgtggcagtagattctacaggcacgtacatggccacctctggcctagaccaccagctgaagatctttgacttgcgagggacgtaccagcctctgagcactcggaccctgccccatggagcagggcacctggccttctcccagaggggactgctggtggcgggaatgggtgacgttgtcaacatctgggcagggcagggcaaggccagcccaccctcccttgaacagccctacctcacccaccggctctcaggccctgtgcatggccttcagttctgcccctttgaagatgtgctgggggtggggcacactgggggcatcaccagcatgctggtccctggggccggtgagcccaacttcgatggcctggagagtaatccatacagaagccggaagcagcgccaggagtgggaggtgaaggccctgctagagaaggtacctgcagagcttatttgtctggacccacgagccctggccgaggtggatgtcatctccctggagcagggaaagaaggagcagatagagaggctgggctatgacccgcaggctaaggctcccttccagccaaagccaaagcagaagggccgcagctccacggcaagcctggtgaagaggaagaggaaggtcatggatgaggaacacagggacaaggtccggcagagccttcagcagcagcatcataaggaggcgaaggccaagcccacgggggcccggccatctgccctggacagatttgtgcgctgagccagactccagggttgcctgggaacagtctctccccaagatcacctgtagggaaatgagtgttccctggaacaaggaggtgggggcagtgtggccccttccccaactgggggtggacagctgtctcctggggtgggttggtattaaagaggaaagcgattttttggaaaaaaaaaaaaaaaaaaaaa

SEQ ID NO: 791 - protein, 610 aa, Homo sapien
METAPKPGKDVPPKKDKLQTKRKKPRRYWEEETVPTTAGASPGPPRNKKNRELRPQRPKNAYILKKSRISKKPQVPKKPREWKNPESQRGLSGAQDPFPGPAPVPVEVVQKFCRIDKSRKLPHSKAKTRSRLEVAEAEEEETSIKAARSELLLAEEPGFLEGEDGEDTAKICQADIVEAVDIASAAKHFDLNLRQFGPYRLNYSRTGRHLAFGGRRGHVAALDWVTKKLMCEINVMEAVRDIRFLHSEALLAVAQNRWLHIYDNQGIELHCIRRCDRVTRLEFLPFHFLLATASETGFLTYLDVSVGKIVAALNARAGRLDVMSQNPYNAVIHLGHSNGTVSLWSPAMKEPLAKILCHRGGVRAVAVDSTGTYMATSGLDHQLKIFDLRGTYQPLSTRTLPHGAGHLAFSQRGLLVAGMGDVVNIWAGQGKASPPSLEQPYLTHRLSGPVHGLQFCPFEDVLGVGHTGGITSMLVPGAGEPNFDGLESNPYRSRKQRQEWEVKALLEKVPAELICLDPRALAEVDVISLEQGKKEQIERLGYDPQAKAPFQPKPKQKGRSSTASLVKRKRKVMDEEHRDKVRQSLQQQHHKEAKAKPTGARPSALDRFVR

SEQ ID NO: 792 - DNA, 1410 bp, Homo sapien
gagctagctttgcaatatggcggccgaggcggacggaccgcttaaacggctgctcgtgccgattcttttacctgagaaatgctacgaccaacttttcgttcagtgggacttgcttcacgtcccctgcctcaagattctcctcagcaaaggcctggggctgggcattgtggctggctcacttctagtaaagctgccccaggtgtttaaaatccggggagccaagagtgctgaagggttgagtctccagtctgtaatgctggagctagtggcattgactgggaccatggtctacagcatcactaacaacttcccattcagctcttggggtgaagccttattcctgatgctccagacgatcaccatctgcttcctggtcatgcactacagaggacagactgtgaaaggtgtcgctttcctcgcttgctacggcctggtcctgctggtgcttctctcacctctgacgcccttgactgtagtcaccctgctccaggcctccaatgtgcctgctgtggtggtggggaggcttctccaggcagccaccaactaccacaacgggtacacaggccagctctcagccatcacagtcttcctgctgtttgggggctccctggcccgaatcttcacttccattcaggaaaccggagatcccctgatggctgggacctttgtggtctcctctctctgcaacggcctcatcgccgcccagctgctcttctactggaatgcaaagcctccccacaagcagaaaaaggcgcagtagagccagctactggagtcattccgtttccactcattcacccaacctcagggttctccccatctgagccagcctgctggtgtgacttactcatcctccattcctctgcacttgcagactttctgagccagggttttcttttagtggaaacaaatggttgatggatccagatccttagaaaaggagaggatgggggtagagtctcccaagccaaaattttgacatttgagtgctttcgtaagccctgtacatgtactattaattcagtcattcagccaagcctcctcctctagcagcaatttccagctgtttaacactatcctgggcaaatgttttaccctgtcctccagcctccctgcttcccttctggccctggaagactgagtctggacggcagagtggagggactgggaggctgtggctgcctccctccctcagcccggctgggactgtctcccggaccccagtgctggggtgggggaagggggacggagaatgactcaggcagggccccagggtggggtgaggaggttcctgctctggcaggtctaggcggaagggagtggagatggggctggttgctgctgcagtgaggggaacagatgggacaataaagactggagactcagttgaataatgcaaaaaaaaaaaaa

SEQ ID NO: 793 - protein, 247 aa, Homo sapien
MAAEADGPLKRLLVPILLPEKCYDQLFVQWDLLHVPCLKILLSKGLGLGIVAGSLLVKLPQVFKIRGAKSAEGLSLQSVMLELVALTGTMVYSITNNFPFSSWGEALFLMLQTITICFLVMHYRGQTVKGVAFLACYGLVLLVLLSPLTPLTVVTLLQASNVPAVVVGRLLQAATNYHNGYTGQLSAITVFLLFGGSLARIFTSIQETGDPLMAGTFVVSSLCNGLIAAQLLFYWNAKPPHKQKKAQ

SEQ ID NO: 794 - DNA, 3359 bp, Homo sapien
ggtacgtgcgctcgcggttctctcgcggaggtcggcggtggcgggagcgggctccggagagcctgagagcacggtggggcggggcgggagaaagtggccgcccggaggacgttggcgtttacgtgtggaagagcggaagagttttgcttttcgtgcgcgccttcgaaaactgcctgccgctgtctgaggagtccacccgaaacctcccctcctccgccggcagccccgcgctgagctcgccgacccaagccagcgtgggcgaggtgggaagtgcgcccgacccgcgcctggagctgcgcccccgagtgcccatggctacaagggtgctgagcatgagcgcccgcctgggacccgtgccccagccgccggcgccgcaggacgagccggtgttcgcgcagctcaagccggtgctgggcgccgcgaatccggcccgcgacgcggcgctcttccccggcgaggagctgaagcacgcgcaccaccgcccgcaggcgcagcccgcgcccgcgcaggccccgcagccggcccagccgcccgccaccggcccgcggctgcctccagaggacctggtccagacaagatgtgaaatggagaagtatctgacacctcagcttcctccagttcctataattccagagcataaaaagtatagacgagacagtgcctcagtcgtagaccagttcttcactgacactgaagggttaccttacagtatcaacatgaacgtcttcctccctgacatcactcacctgagaactggcctctacaaatcccagagaccgtgcgtaacacacatcaagacagaacctgttgccattttcagccaccagagtgaaacgactgcccctcctccggccccgacccaggccctccctgagttcaccagtatattcagctcacaccagaccgcagctccagaggtgaacaatattttcatcaaacaagaacttcctacaccagatcttcatctttctgtccctacccagcagggccacctgtaccagctactgaatacaccggatctagatatgcccagttctacaaatcagacagcagcaatggacactcttaatgtttctatgtcagctgccatggcaggccttaacacacacacctctgctgttccgcagactgcagtgaaacaattccagggcatgcccccttgcacatacacaatgccaagtcagtttcttccacaacaggccacttactttcccccgtcaccaccaagctcagagcctggaagtccagatagacaagcagagatgctccagaatttaaccccacctccatcctatgctgctacaattgcttctaaactggcaattcacaatccaaatttacccaccaccctgccagttaactcacaaaacatccaacctgtcagatacaatagaaggagtaaccccgatttggagaaacgacgcatccactactgcgattaccctggttgcacaaaagtttataccaagtcttctcatttaaaagctcacctgaggactcacactggtgaaaagccatacaagtgtacctgggaaggctgcgactggaggttcgcgcgatcggatgagctgacccgccactaccggaagcacacaggcgccaagcccttccagtgcggggtgtgcaaccgcagcttctcgcgctctgaccacctggccctgcatatgaagaggcaccagaactgagcactgcccgtgtgacccgttccaggtcccctgggctccctcaaatgacagacctaactattcctgtgtaaaaacaacaaaaacaaaaaaaaaacaagaaaaccacaactaaaactggaaatgtatattttgtatatttgagaaaacagggaatacattgtattaataccaaagtgtttggtcattttaagaatctggaatgcttgctgtaatgtatatggctttactcaagcagatctcatctcatctcatgacaggcagccagtctcaacatgggtaaggggtgggggtgaaggggagtgtgtgcagcgtttttacctaggcaccatcatttaatgtgacagtgttcagtaaacaaatcagttggcaggcaccagaagaagaatggattgtatgtcaagattttacttggcattgagtagtttttttcaatagtaggtaattccttagagatacagtatacctggcaattcacaaatagccattgaacaaatgtgtgggtttttaaaaattatatacatatatgagttgcctatatttgctattcaaaattttgtaaatatgcaaatcagctttataggtttattacaagttttttaggattcttttggggaagagtcataattcttttgaaaataaccatgaatacacttacagttaggatttgtggtaaggtacctctcaacattaccaaaatcatttctttagagggaaggaataatcattcaaatgaactttaaaaaagcaaatttcatgcactgattaaaataggattattttaaatacaaaaggcattttatatgaattataaactgaagagcttaaagatagttacaaaatacaaaagttcaacctcttacaataagctaaacgcaatgtcatttttaaaaagaaggacttaggggtcgttttcacatatgacaatgttgcatttatgatgcagttttcaagtaccaaaacgttgaattgatgatgcagttttcatatatcgagatgttcgctcgtgcagtactgttggttaaatgacaatttatgtggattttgcatgtaatacacagtgagacacagtaattttatctaaattacagtgcagtttagttaatctattaatactgactcagtgtctgcctttaaatataaatgatatgttgaaaacttaaggaagcaaatgctacatatatgcaatataaaatagtaatgtgatgctgatgctgttaaccaaagggcagaataaataagcaaaatgccaaaaggggtcttaattgaaatgaaaatttaattttgtttttaaaatattgtttatctttatttattttgtggtaatatagtaagtttttttagaagacaattttcataacttgataaattatagttttgtttgttagaaaagttgctcttaaaagatgtaaatagatgacaaacgatgtaaataattttgtaagaggcttcaaaatgtttatacgtggaaacacacctacatgaaaagcagaaatcggttgctgttttgcttctttttccctcttatttttgtattgtggtcatttcctatgcaaataatggagcaaacagctgtatagttgtagaattttttgagagaatgagatgtttatatattaacgacaattttttttttggaaaataaaaagtgcctaaaagaaaaaaaaaaaaaaaaaa

SEQ ID NO: 795 - protein, 457 aa, Homo sapien
MATRVLSMSARLGPVPQPPAPQDEPVFAQLKPVLGAANPARDAALFPGEELKHAHHRPQAQPAPAQAPQPAQPPATGPRLPPEDLVQTRCEMEKYLTPQLPPVPIIPEHKKYRRDSASVVDQFFTDTEGLPYSINMNVFLPDITHLRTGLYKSQRPCVTHIKTEPVAIFSHQSETTAPPPAPTQALPEFTSIFSSHQTAAPEVNNIFIKQELPTPDLHLSVPTQQGHLYQLLNTPDLDMPSSTNQTAAMDTLNVSMSAAMAGLNTHTSAVPQTAVKQFQGMPPCTYTMPSQFLPQQATYFPPSPPSSEPGSPDRQAEMLQNLTPPPSYAATIASKLAIHNPNLPTTLPVNSQNIQPVRYNRRSNPDLEKRRIHYCDYPGCTKVYTKSSHLKAHLRTHTGEKPYKCTWEGCDWRFARSDELTRHYRKHTGAKPFQCGVCNRSFSRSDHLALHMKRHQN

SEQ ID NO: 796 - DNA, 1464 bp, Homo sapien
cgttttccgctcctcgctacgtcatcgttgtgagcccgctatcagcggccagcgcgggcgcggccggagaccgtggggcccccggttgccgccccctcgggagccaccatgttggtgataccccccggactgagcgaggaagaggaggctctgcagaagaaattcaacaagctcaagaaaaagaaaaaggcattgctggctctgaagaagcaaagtagcagcagcacaaccagccaaggtggtgtcaaacgctcactatcagagcagcctgtcatggacacagccacagcaacagagcaggcaaagcagctggtgaagtcaggagccatcagtgccatcaaggctgagaccaagaactcaggcttcaagcgttctcgaacccttgaggggaagttaaaggaccccgagaagggaccagtccccactttccagccgttccagaggagcatatctgctgatgatgacctgcaagagtcatccagacgtccccagaggaaatctctgtatgagagctttgtgtcttctagtgatcgacttcgagaactaggaccagatggagaagaggcagagggcccaggggctggtgatggtccccctcgaagctttgactggggctatgaagaacgcagtggtgcccactcctcagcctcccctccccgaagccgcagccgggaccgcagccatgagaggaaccgggacagagaccgagatcgggagcgggatcgagaccgggatcgagacagagacagagagcgggacagggatcgggatcgggatcgagatcgagaccgggaacgggacagggatcgggagcgggatcgagaccgagaccgagagggtcctttccgcaggtcggattcattccctgaacggcgagcccctaggaaagggaatactctctatgtatatggagaagacatgacacccacccttctccgtggggccttctctccttttggaaacatcattgacctctccatggacccacccagaaactgtgccttcgtcacctatgaaaagatggagtcagcagatcaggccgttgctgagctcaacgggacccaggtggagtctgtacagctcaaagtcaacatagcccgaaaacagcccatgctggatgccgctactggcaagtctgtctggggctccctcgctgtccagaacagccctaagggttgccaccgggacaagaggacccagattgtctacagtgatgacgtctacaaggaaaaccttgtggatggcttctagggaacagagctggattccttgtgcctcatatgccccaatgctggtctcagtaaaacactgaggtggaagcttacacatctccctcagcctctggtttttcagcacttgggattggggttaagcctttaaaaacggctgtcaggtttgatctcagtgtaacgacatggccagtgcctgttccccactcccttgccccaaaaggatctggaacac

SEQ ID NO: 797 - protein, 380 aa, Homo sapien
MLVIPPGLSEEEEALQKKFNKLKKKKKALLALKKQSSSSTTSQGGVKRSLSEQPVMDTATATEQAKQLVKSGAISAIKAETKNSGFKRSRTLEGKLKDPEKGPVPTFQPFQRSISADDDLQESSRRPQRKSLYESFVSSSDRLRELGPDGEEAEGPGAGDGPPRSFDWGYEERSGAHSSASPPRSRSRDRSHERNRDRDRDRERDRDRDRDRDRERDRDRDRDRDRDRERDRDRERDRDRDREGPFRRSDSFPERRAPRKGNTLYVYGEDMTPTLLRGAFSPFGNIIDLSMDPPRNCAFVTYEKMESADQAVAELNGTQVESVQLKVNIARKQPMLDAATGKSVWGSLAVQNSPKGCHRDKRTQIVYSDDVYKENLVDGF

SEQ ID NO: 798 - DNA, 2374 bp, Homo sapien
gtcatgcagtgcgccggagaactgtgctctttgaggccgacgctaggggcccggaaggaaactgcgaggcgaaggtgaccggggaccgagcatttcagatctgctcggtagacctggtgcaccaccaccatgttggctgcaaggctggtgtgtctccggacactaccttctagggttttccacccagctttcaccaaggcctcccctgttgtgaagaattccatcacgaagaatcaatggctgttaacacctagcagggaatatgccaccaaaacaagaattgggatccggcgtgggagaactggccaagaactcaaagaggcagcattggaaccatcgatggaaaaaatatttaaaattgatcagatgggaagatggtttgttgctggaggggctgctgttggtcttggagcattgtgctactatggcttgggactgtctaatgagattggagctattgaaaaggctgtaatttggcctcagtatgtcaaggatagaattcattccacctatatgtacttagcagggagtattggtttaacagctttgtctgccatagcaatcagcagaacgcctgttctcatgaacttcatgatgagaggctcttgggtgacaattggtgtgacctttgcagccatggttggagctggaatgctggtacgatcaataccatatgaccagagcccaggcccaaagcatcttgcttggttgctacattctggtgtgatgggtgcagtggtggctcctctgacaatattagggggtcctcttctcatcagagctgcatggtacacagctggcattgtgggaggcctctccactgtggccatgtgtgcgcccagtgaaaagtttctgaacatgggtgcacccctgggagtgggcctgggtctcgtctttgtgtcctcattgggatctatgtttcttccacctaccaccgtggctggtgccactctttactcagtggcaatgtacggtggattagttcttttcagcatgttccttctgtatgatacccagaaagtatcaagcgtgcagaagtatcaccaatgtatggagttcaaaaatatgatcccattaactcgatgctgagtatctacatggatacattaaatatatttatgcgagttgcaactatgctggcaactggaggcaacagaaagaaatgaagtgactcagcttctggcttctctgctacatcaaatatcttgtttaatggggcagatatgcattaaatagtttgtacaagcagctttcgttgaagtttagaagataagaaacatgtcatcatatttaaatgttccggtaatgtgatgcctcaggtctgcctttttttctggagaataaatgcagtaatcctctcccaaataagcacacacattttcaattctcatgtttgagtgattttaaaatgttttggtgaatgtgaaaactaaagtttgtgtcatgagaatgtaagtcttttttctactttaaaatttagtaggttcactgagtaactaaaatttagcaaacctgtgtttgcatatttttttggagtgcagaatattgtaattaatgtcataagtgatttggagctttggtaaagggaccagagagaaggagtcacctgcagtcttttgtttttttaaatacttagaacttagcacttgtgttattgattagtgaggagccagtaagaaacatctgggtatttggaaacaagtggtcattgttacattcatctgctgaacttaacaaaactgttcatcctgaaacaggcacaggtgatgcattctcctgctgttgcttctcagtgctctctttccaatatagatgtggtcatgtttgacttgtacagaatgttaatcatacagagaatccttgatggaattatatatgtgtgttttacttttgaatgttacaaaaggaaataactttaaaactattctcaagagaaaatattcaaagcatgaaatatgttgctttttccagaatacaaacagtatactcatgaattgctaagtgtttttttatttttgcatatttattgaactgtctaattgaatacagcttgctcttgtcacctcttcaagctttcaagcctttatagaaaagcttctttgtggcttacactggaaattatgaaagcagtttttctcctaagacttttggtttctcgcattgcctctcagactaagcactaaaaagcaaagcaaaacagaactagttctgtcttaatgaaatatatcaacccaaaagtgtaatgaggaaaatgcttcattagtttcccctagcagacttttacttctcttacactgctacaccattactttcttgagacatttgtaagtcctttgatacagaagagttatatttaggaggctttaatgaaggg

SEQ ID NO: 799 - protein, 319 aa, Homo sapien
MLAARLVCLRTLPSRVFHPAFTKASPVVKNSITKNQWLLTPSREYATKTRIGIRRGRTGQELKEAALEPSMEKIFKIDQMGRWFVAGGAAVGLGALCYYGLGLSNEIGAIEKAVIWPQYVKDRIHSTYMYLAGSIGLTALSAIAISRTPVLMNFMMRGSWVTIGVTFAAMVGAGMLVRSIPYDQSPGPKHLAWLLHSGVMGAVVAPLTILGGPLLIRAAWYTAGIVGGLSTVAMCAPSEKFLNMGAPLGVGLGLVFVSSLGSMFLPPTTVAGATLYSVAMYGGLVLFSMFLLYDTQKVSSVQKYHQCMEFKNMIPLTRC

SEQ ID NO: 800 - DNA, 1350 bp, Homo sapien
atgcgtgagtgcatctccatccacgttggccaggctggtgtccagattggcaatgcctgctgggagctctactgcctggaacacggcatccagcccgatggccagatgccaagtgacaagaccattgggggaggagatgattccttcaacaccttcttcagtgaaacgggtgctggcaagcatgtgccccgggcagtgtttgtagacttggaacccacagtcattgatgaagttcgcactggcacttaccgccagctcttccaccctgagcaactcatcacaggcaaggaagatgctgccaataactatgcccgagggcactacaccattggcaaggagatcattgacctcgtgttggaccgaattcgcaagctggctgaccagtgcaccggtcttcagggcttcttggttttccacagctttggtgggggaactggttctgggttcacctcgctgctcatggaacgtctctcagttgattatggcaagaagtccaagctggagttctccatttacccggcgccccaggtttccacagctgtagttgagccctacaactccatcctcaccacccacaccaccctggagcactctgattgtgccttcatggtagacaatgaggccatctatgacatctgtcgtagaaacctcgatatcgagcgcccaacctacactaaccttaaccgccttattagccagattgtgtcctccatcactgcttccctgagatttgatggagccctgaatgttgacctgacagaattccagaccaacctggtgccctacccccgcatccacttccctctggccacatatgcccctgtcatctctgctgagaaagcctaccatgaacagcttactgtagcagagatcaccaatgcttgctttgagccagccaaccagatggtgaaatgtgaccctcgccatggtaaatacatggcttgctgcctgttataccgtggtgacgtggttcccaaagatgtcaatgctgccattgccaccatcaaaaccaagcgtaccatccagtttgtggattggtgccccactggcttcaaggttggcattaattaccagcctcccactgtggtgcctggcggagacctggccaaggtacagagagctgtgtgcatgctgagcaataccacagctgttgccgaggcctgggctcgcctggaccacaagtttgacctgatgtatgccaagcgtgcctttgttcactggtacgtgggtgaggggatggaggaaggcgagttttcagaggcccgtgaggacatggctgcccttgagaaggattatgaggaggttggagcagatagtgctgacggagaggatgagggtgaagagtattaa

SEQ ID NO: 801 - protein, 449 aa, Homo sapien
MRECISIHVGQAGVQIGNACWELYCLEHGIQPDGQMPSDKTIGGGDDSFNTFFSETGAGKHVPRAVFVDLEPTVIDEVRTGTYRQLFHPEQLITGKEDAANNYARGHYTIGKEIIDLVLDRIRKLADQCTGLQGFLVFHSFGGGTGSGFTSLLMERLSVDYGKKSKLEFSIYPAPQVSTAVVEPYNSILTTHTTLEHSDCAFMVDNEAIYDICRRNLDIERPTYTNLNRLISQIVSSITASLRFDGALNVDLTEFQTNLVPYPRIHFPLATYAPVISAEKAYHEQLTVAEITNACFEPANQMVKCDPRHGKYMACCLLYRGDVVPKDVNAAIATIKTKRTIQFVDWCPTGFKVGINYQPPTVVPGGDLAKVQRAVCMLSNTTAVAEAWARLDHKFDLMYAKRAFVHWYVGEGMEEGEFSEAREDMAALEKDYEEVGADSADGEDEGEEY

SEQ ID NO: 802 - DNA, 2383 bp, Homo sapien
ggggctaccgcgcctttgcttcctggcgcacgcggagcctcctggagcctgccaccatcctgcctactacgtgctgccctgcgcccgcagccatgtgccgcaccctggccgccttccccaccacctgcctggagagagccaaagagttcaagacacgtctggggatctttcttcacaaatcagagctgggctgcgatactgggagtactggcaagtccgagtggggcagtaaacacagcaaagagaatagaaacttctcagaagatgtgctggggtggagagagtcgttcgacctgctgctgagcagtaaaaatggagtggctgccttccacgctttcctgaagacagagttcagtgaggagaacctggagttctggctggcctgtgaggagttcaagaagatccgatcagctaccaagctggcctccagggcacaccagatctttgaggagttcatttgcagtgaggcccctaaagaggtcaacattgaccatgagacccgcgagctgacgaggatgaacctgcagactgccacagccacatgctttgatgcggctcaggggaagacacgtaccctgatggagaaggactcctacccacgcttcctgaagtcgcctgcttaccgggacctggctgcccaagcctcagccgcctctgccactctgtccagctgcagcctggacgagccctcacacacctgagtctccacggcagtgaggaagccagccgggaagagaggttgagtcacccatccccgaggtggctgcccctgtgtgggaggcaggttctgcaaagcaagtgcaagaggacaaaaaaaaaaaaaaaaaaaaaaaaaatgcgctccagcagcctgtttgggaagcagcagtctctccttcagatactgtgggactcatgctggagaggagccgcccacttccaggacctgtgaataagggctaatgatgagggttggtggggctctctgtggggcaaaaaggtggtatgggggttagcactggctctcgttctcaccggagaaggaagtgttctagtgtggtttaggaaacatgtggataaagggaaccatgaaaatgagaggaggaaagacatccagatcagctgttttgcctgttgctcagttgactctgattgcatcctgttttcctaattcccagactgttctgggcacggaagggaccctggatgtggagtcttcccctttggccctcctcactggcctctgggctagcccagagtcccttagcttgtacctcgtaacactcctgtgtgtctgtccagccttgcagtcatgtcaaggccagcaagctgatgtgactcttgccccatgcgagatatttatacctcaaacactggcctgtgagccctttccaagtcagtggagagccctgaaaggaggctcacttgaatccagctcagtgctctgggtggccccctgcaggtggcccctgaccctgcgttgcagcagggtccacctgtgagcaggcccgccctggggcctcttcctggatgtgccctctctgagttctgtgctgtctcttggaggcagggcccaggagaacaaagtgtggaggcctcggggagtggcttttccagctctcatgccccgcagtgtggaacaaggcagaaaaggatcctaggaaataagtctcttggcggtccctgagagtcctgctgaaatccagccagtgttttttgtggtatgagaacaggcaaaaagagatgccccgagatagaaggggagccttgtgtttctttcctgcagacgtgagatgaacactggagtgggcagaggtggcmcaggaccatggcacccttagagtgcagaagctggggggagaggctgcttcgaagggcaggactggggatacctgcctgtcacctcagggcatcactgaacaaacatttcctgatggsaactcctgcggcagagcccaggctggggaagtgaactacccagggcagcccctttgtggcccaggataatcaacactgttctctctgtaccatgagctcctccaggagattatttaagtgtattgtatcattggttttctgtgattgtcataacattgtttttgttattgttggtgctgttgttatttattattgtaatttcagtttgcctctactggagaatctcagcaggggtttcagcctgactgtctccctttctctaccagactctacctctgaatgtgctgggaacctcttggagcctgtcaggaactcctcactgtttaaatatttatttattgtgacaaatggagctggtttcctagatatgaatgatgtttgcaatccccattttcctgtttcagcatgttatattcttataaaataaaagcaaaagtcaaatatgaaaaaaaaaaaaaaaaaaaaa

SEQ ID NO: 803 - protein, 202 aa, Homo sapien [sequence omitted]

SEQ ID NO: 804 - DNA, 3201 bp, Homo sapien
ggatccgcgcggcacacgtgcgacggccgtgatgaagttcgcttaccggttttcaaatttgctgggtacggtgtaccggcgtgggaacctaaattttacctgcaatggaaattcagttatcagtcccgtgggcaatagagtcactgtatttgaccttaaaaacaacaaatctgacacgctgcccctggccactcggtacaacgtcaagtgcgtggggctgtccccggatggccgcctcgctatcatcgtcgatgaagggggcgatgcgctgctggtcagcctggtctgcaggtctgtgctgcaccacttccacttcaagggctctgtgcacagtgtgtccttctcccctgatggcaggaagtttgttgtcacaaagggtaacattgcccagatgtatcatgcccctgggaagaagcgggagttcaacgccttcgttctggacaagacctattttgggccctacgatgagaccacctgcatcgactggacggatgactccaggtgctttgtggttgggagcaaagacatgtccacctgggtgttcggagccgagcgctgggacaacctcatctactatgcactggggggacataaggatgccatcgtggcctgcttctttgaatccaacagcctggacctgtactcactcagccaggacggagtgctgtgcatgtggcagtgtgacacgccccccgagggcttgcggctgaagccccctgcgggctggaaagcagacctgttgcagcgggaggaggaagaggaggaggaggaggaccaggagggcgacagagagaccaccatccggggaaaagccactccggccgaggaggagaagacaggaaaagtgaagtactcacggctggccaagtacttcttcaataaagaaggggattttaacaacctgacagctgcagcatttcataagaagtctcacctcttggtcactggctttgcttctggaatcttccatcttcatgagctgccagagtttaacctcatccactccctgagcatctcagatcagagcatcgcctcagtggccatcaatagctcgggggactggattgcttttggctgttcaggcctgggccagctgctggtgtgggagtggcagagtgagtcctacgtgctcaagcagcagggccacttcaacagcatggtggccctggcctactcgcccgacggacagtacatcgtgactggcggggacgacggcaaggtcaaggtgtggaataccctcagcggcttctgcttcgtcacttttacggagcactccagcggggtgaccggtgtgacctttactgccaccggctacgttgtggtgacctcatccatggacgggaccgtgcgagcctttgaccttcacaggtaccgaaacttccgcaccttcacctctccacgccccacccagttctcctgtgtggcggtggatgcgagcggtgagatcgtctctgcaggggcgcaggactcctttgagattttcgtgtggtccatgcagacaggcaggctccttgatgttttgtctggacacgaagggcccatcagtggtctgtgttttaacccaatgaagtccgtcctggccagtgcctcctgggacaagacggtgcgcctatgggacatgtttgacagctggaggaccaaggagacgctggccctgacctctgatgctctggctgtgacttttcgccctgatggtgcggagctggctgtggccacactgaactcacagatcaccttctgggaccctgagaacgcggtgcagacgggctccattgagggcaggcatgacctcaagactggcaggaaggagctggacaagattacagccaagcacgcggccaaggggaaggccttcaccgccctgtgctactctgcagacggccacagcatcctggcgggaggcatgtccaagttcgtgtgcatctaccacgtccgtgagcagattctcatgaagaggttcgagatctcttgcaacctgtctctggacgccatggaggaatttttgaaccgaagaaaaatgacagagtttggcaacctggcactaattgatcaggatgctgggcaggaggatggagtcgcgataccactgccaggcgtcaggaaaggtgacatgagttctcggcacttcaaacctgagatcagggtgacctcactccgcttctctcccactgggcgctgctgggcgggcaccaccacggagggactcctcatctactccctggacacccgcgtgctctttgacccgtttgagctggacaccagcgtcacccccgggagggtgcgcgaggcactgcgccagcaggacttcaccagggccatcctcatggccctccggctcaacgagagcaaactggtgcaggaggccctggaggcggtgcccaggggcgagattgaagtggtcacctcctcccttcctgaactgtatgtggagaaagtgctggagtttttagcttcctcctttgaagtgtctcgccacctggaattctacctcctctggactcacaaactgctcatgttgcacggacagaagctgaagtccagagccgggacgctgctgcctgtcattcagttcctccagaagagcatccagcggcacctggacgacctgtcgaaactctgtagctggaaccactataacatgcagtacgcactagcagtttccaagcagcggggcacaaaacgctccctagacccgctgggaagtgaggaggaggcagaagcatctgaagatgacagcctgcatctgcttggaggaggaggcagagactcagaagaagagatgctggcctagagccagccggttgcagcgttggattgtgccggctaagacctgccagggagatgggacccttgtgccacctgggccagcaaagaggaggggtccagagaacagctgaaatactgtcactagtggtagtgacttgcttttcctgtgcacacatgtagcccatcaggacagcgagccgacgggtcacgccaggggccggcacgcactggcacctggccccaggagcgggcccgtgtgaacggtgatgaatgttgaaaatgcgtctcagagaggtattcacatgaactttgtatgagacttatttatatttttaacataaaggtttgataaagaacttagggattaaaaaaaagatggagttttctaacgtgaggatgaagtctacacttcagattaaaaagggttatgttgta

SEQ ID NO: 805 - protein, 919 aa, Homo sapien
MKFAYRFSNLLGTVYRRGNLNFTCNGNSVISPVGNRVTVFDLKNNKSDTLPLATRYNVKCVGLSPDGRLAIIVDEGGDALLVSLVCRSVLHHFHFKGSVHSVSFSPDGRKFVVTKGNIAQMYHAPGKKREFNAFVLDKTYFGPYDETTCIDWTDDSRCFVVGSKDMSTWVFGAERWDNLIYYALGGHKDAIVACFFESNSLDLYSLSQDGVLCMWQCDTPPEGLRLKPPAGWKADLLQREEEEEEEEDQEGDRETTIRGKATPAEEEKTGKVKYSRLAKYFFNKEGDFNNLTAAAFHKKSHLLVTGFASGIFHLHELPEFNLIHSLSISDQSIASVAINSSGDWIAFGCSGLGQLLVWEWQSESYVLKQQGHFNSMVALAYSPDGQYIVTGGDDGKVKVWNTLSGFCFVTFTEHSSGVTGVTFTATGYVVVTSSMDGTVRAFDLHRYRNFRTFTSPRPTQFSCVAVDASGEIVSAGAQDSFEIFVWSMQTGRLLDVLSGHEGPISGLCFNPMKSVLASASWDKTVRLWDMFDSWRTKETLALTSDALAVTFRPDGAELAVATLNSQITFWDPENAVQTGSIEGRHDLKTGRKELDKITAKHAAKGKAFTALCYSADGHSILAGGMSKFVCIYHVREQILMKRFEISCNLSLDAMEEFLNRRKMTEFGNLALIDQDAGQEDGVAIPLPGVRKGDMSSRHFKPEIRVTSLRFSPTGRCWAGTTTEGLLIYSLDTRVLFDPFELDTSVTPGRVREALRQQDFTRAILMALRLNESKLVQEALEAVPRGEIEVVTSSLPELYVEKVLEFLASSFEVSRHLEFYLLWTHKLLMLHGQKLKSRAGTLLPVIQFLQKSIQRHLDDLSKLCSWNHYNMQYALAVSKQRGTKRSLDPLGSEEEAEASEDDSLHLLGGGGRDSEEEMLA

SEQ ID NO: 806 - DNA, 2240 bp, Homo sapien
ccccgcgggctgcagcgagccaggcatgctcactggcgcaggcccggcccgcagcccgagcaggaagcgccggcgtaggcggccccctgcgctgccagctggagccgggcggagccagcgccccggcgcagggtggctctgccagtccccgcgcgcctgggcggccgcacacgtgtccaggcgtcacgtccgcgcgcgcccccggggcttgcgtcagcggctgttccagaagcgggtgggccagggctctgcgcaccgctggggttcggggcccgggacgccgccgggaggagggcaccgcgcggggtccgacgcggaggcgtgctcggaacgccgggggctgcggagtgcatcagcgcggtccagccctccgcctgccgggcgccgagcgtctccgccgcccggacctgggctgggcgccgtggcgttgcctcggagctcgctgcccgcggggcgcgcaccgccttgacccgggcggccccgcggcaggcaggcgcccgcagttccatggttggttcggagcgcgatgagccgcccgtcctccaccggccccagcgctaataaaccctgcagcaagcagccgccgccgcagccccagcacactccgtccccggctgcgcccccggccgccgccaccatctcggctgcgggccccggctcgtccgcggtgcccgccgcggcggcggtgatctcgggccccggcggcggcggcggggccggcccggtgtccccgcagcaccacgagctgacctcgctcttcgagtgtccggtctgctttgactatgtcctgcctcctattctgcagtgccaggccgggcacctggtgtgtaaccaatgccgccagaagttgagctgctgcccgacgtgcaggggcgccctgacgcccagcatcaggaacctggctatggagaaggtggcctcggcagtcctgtttccctgtaagtatgccaccacgggctgttccctgaccctgcaccatacggagaaaccagaacatgaagacatatgtgaataccgcccctactcctgcccatgtcctggtgcttcctgcaagtggcaggggtccctggaagctgtgatgtcccatctcatgcacgcccacaagagcattaccacccttcaggaagaagacatcgtctttctagctacagacattaacttgccaggggctgtcgactgggtgatgatgcagtcatgttttggccatcacttcatgctggtgctggagaaacaagagaagtacgaaggccaccagcagttttttgccatcgtcctgctcattggcacccgcaagcaagccgagaactttgcctacagactggagttgaatgggaaccggcggagattgacctgggaggccacgccccgctcgattcatgacggtgtggctgcggccatcatgaacagcgactgccttgttttcgacacagccatagcacatctttttgcagataatgggaaccttggaatcaatgttactatttctacatgttgtccatgatgtgacttccgtaaaccttcaaaattatttgggcatactgctctatgtttaataaaggtttttatagatgttttattccatatgtcttcacaagtcaggacccacaattacccgtgttttgtttgaacagcagtgtcccatctggcttcgacccaacaaagttcattaacctgggatgaatggggttggcctgttggtgatttggatgctgttctgtgatctaaaacaactcttattgaattgtatttactccctaaacaacacttgacaggctgttgcacagggcttctatagatcagtgtgttaggaatgggaggccccttcctgcctgccttcccatattggtcccttgacattgacaaaagcacagtgactgtcagcagattcctttacttttgtttgtgggaggtaggaattgttttaatgcattttaaacagtgtttctgaaattggatggctggctaatagacactgaatcacccggagtgcttatcttaaaattgcagatttagggagcctgccaatttaacagtctcatcagtgatctttcaacagtaatgtttgagaattactgggttaaattgtggaaagggtccagattttaaaggtgctttaaggttgccctctgccgatactgtttgtctttctactgtttcatcccctaacttcccccaaccctcaaattaaaactagaactatagatccacatgaacgcacgcctgagatttggccactcacc

SEQ ID NO: 807 - protein, 324 aa, Homo sapien
MSRPSSTGPSANKPCSKQPPPQPQHTPSPAAPPAAATISAAGPGSSAVPAAAAVISGPGGGGGAGPVSPQHHELTSLFECPVCFDYVLPPILQCQAGHLVCNQCRQKLSCCPTCRGALTPSIRNLAMEKVASAVLFPCKYATTGCSLTLHHTEKPEHEDICEYRPYSCPCPGASCKWQGSLEAVMSHLMHAHKSITTLQEEDIVFLATDINLPGAVDWVMMQSCFGHHFMLVLEKQEKYEGHQQFFAIVLLIGTRKQAENFAYRLELNGNRRRLTWEATPRSIHDGVAAAIMNSDCLVFDTAIAHLFADNGNLGINVTISTCCP

SEQ ID NO: 808 - DNA, 2049 bp, Homo sapien
gagcccagccgagcgtccgccgctgcccgtgcgcctctgcgctccgcgccatggccggcctcaactccctggaggcggtgaaacgcaagatccaggccctgcagcagcaggcggacgaggcggaagaccgcgcgcagggcctgcagcgggagctggacggcgagcgcgagcggcgcgagaaagctgaaggtgatgtggccgccctcaaccgacgcatccagctcgttgaggaggagttggacagggctcaggaacgactggccacggccctgcagaagctggaggaggcagaaaaagctgcagatgagagtgagagaggaatgaaggtgatagaaaaccgggccatgaaggatgaggagaagatggagattcaggagatgcagctcaaagaggccaagcacattgcggaagaggctgaccgcaaatacgaggaggtagctcgtaagctggtcatcctggagggtgagctggagagggcagaggagcgtgcggaggtgtctgaactaaaatgtggtgacctggaagaagaactcaagaatgttactaacaatctgaaatctctggaggctgcatctgaaaagtattctgaaaaggaggacaaatatgaagaagaaattaaacttctgtctgacaaactgaaagaggctgagacccgtgctgaatttgcagagagaacggttgcaaaactggaaaagacaattgatgacctggaagagaaacttgcccaggccaaagaagagaacgtgggcttacatcagacactggatcagacactaaacgaacttaactgtatataagcaaaacagaagagtcttgttccaacagaaactctggagctccgtgggtctttctcttctcttgtaagaagttccttttgttattgccatcttcgctttgctggaaatgtcaagcaaattatgaatacatgaccaaatattttgtatcggagaagctttgagcaccagttaaatctcattccttccctttttttttcaaatggcaccagctttttcagctctcttattttttccttaagtagcatttattcctaaggtaggcagggtatttcctagtaagcatactttcttaagacggaggccatttggttcctgggagaataggcagccccacactttgaagaatacagaccccagtatctagtcgtggatataattaaaacgctgaagaccataaccttttgggtcaactgttggtcaaactataggagagaccagggaccatcacatgggtagggattttccatccagagccaataaaaggactggtgggggccgggggtggctattgtgggaagtcataacccacagatagatcaacctaagaatcctggcccttctccactctccaccatgcaggacaaacatcttctcaagcagtcaacgtagaatgcttgggaaatagtcataattacccacatatagtaattaatagatggtaattaattgatccttgatgtgatgttcttttgcatatttccttcattctaaagttgttccctggccgggagcgtttgctttcgcctgtaatcccaacactttgggaggccaggacagatcacttgaggtcaggagttcgagaccagcccagccaacatggcgaaaccatgtctctactaaaaatacaaaaattatggtgacgcctgcctgtagtcccagctactcgggaggctgaggcaggaggatcgcttgaacccaggaagtggagactgcagtgagccgatatcgcaccacagcgctccagcctggtcgacagagtgagactccatctcaagaaaaaataaaaataaagttgttctctgaagagcaaatgtctcattccagtaatgacccactcagcaggaatatggtggagttcagtccaattcaggtcagccatatccaaaagaccacaagtcattactaagttgagcaaaagagtttttatctattagcagaaagggcctctctggcagcagagattaaaaactggcccaacttcatttccatacttcagggaacagcaaattgaggatttacttatctaggactt

SEQ ID NO: 809 - protein, 248 aa, Homo sapien
MAGLNSLEAVKRKIQALQQQADEAEDRAQGLQRELDGERERREKAEGDVAALNRRIQLVEEELDRAQERLATALQKLEEAEKAADESERGMKVIENRAMKDEEKMEIQEMQLKEAKHIAEEADRKYEEVARKLVILEGELERAEERAEVSELKCGDLEEELKNVTNNLKSLEAASEKYSEKEDKYEEEIKLLSDKLKEAETRAEFAERTVAKLEKTIDDLEEKLAQAKEENVGLHQTLDQTLNELNCI

SEQ ID NO: 810 - DNA, 4246 bp, Homo sapien
  Unsure 3300: Unknown base
atcttttttcatcttctagctgtagctcgggctgcttgtcggcttggctccccctcccccctttgctctctgcctcgtctttccccaggacttcgctattttgcttttttaaaaaaaggcaagaaagaactaaactcccccctccctctcctccagtcgggctgcacctctgccttgcactttgcacagaggtagagagcgcgcgagggagagagaggaaagaaaaaaaataataaagagagccaagcagaagaggaggcgagaagcatgaagtgttaactcccccgtgccaaggcccgcgccgcccggacagacgcccgccgcgccttccagccccgagcggacgccgcgcgccgccctgcctgcagcccgggccggcgacggcgagcccttccttatgcaaagcgcgccagcagcgcgaaggcgggacgccgcgcaccgggccgggctcctccagcttcgccgccgcagccaccaccgccgccaccgcagctcgcggaggatcttcccgagcctgaagccgccggctcggcgcgcaaggaggcgagcgcaaggaggggccggggcgagcgagggagcacattggcgtgagcaggggggagggagggcgggcgcggggggcgcgggcagggcgggggggtgtgtgtgtgagcgcgcttggaggtttcgggccagccaccgccgcgcaagctagaagcgccccagcccggcaagctggctcacccgctggccacccagcacagcccgctggcccctctcctgcagcccatctggcggagcggcggcggcggcggcggcggcaggagaatggcatcagaactggcaatgagcaactccgacctgcccaccagtcccctggccatggaatatgttaatgacttcgatctgatgaagtttgaagtgaaaaaggaaccggtggagaccgaccgcatcatcagccagtgcggccgtctcatcgccgggggctcgctgtcctccacccccatgagcacgccgtgcagctcggtgcccccttcccccagcttctcggcgcccagcccgggctcgggcagcgagcagaaggcgcacctggaagactactactggatgaccggctacccgcagcagctgaaccccgaggcgctgggcttcagccccgaggacgcggtcgaggcgctcatcagcaacagccaccagctccagggcggcttcgatggctacgcgcgcggggcgcagcagctggccgcggcggccggggccggtgccggcgcctccttgggcggcagcggcgaggagatgggccccgcggccgccgtggtgtccgccgtgatcgccgcggccgccgcgcagagcggcgcgggcccgcactaccaccaccaccaccaccacgccgccggccaccaccaccacccgacggccggcgcgcccggcgccgcgggcagcgcggccgcctcggccggtggcgctgggggcgcgggcggcggtggcccggccagcgctgggggcggcggcggcggcggcggcggcggaggcggcgggggcgcggcgggggcggggggcgccctgcacccgcaccacgccgccggcggcctgcacttcgacgaccgcttctccgacgagcagctggtgaccatgtctgtgcgcgagctgaaccggcagctgcgcggggtcagcaaggaggaggtgatccggctgaagcagaagaggcggaccctgaaaaaccgcggctatgcccagtcctgccgcttcaagagggtgcagcagagacacgtcctggagtcggagaagaaccagctgctgcagcaagtcgaccacctcaagcaggagatctccaggctggtgcgcgagagggacgcgtacaaggagaaatacgagaagttggtgagcagcggcttccgagaaaacggctcgagcagcgacaacccgtcctctcccgagtttttcatgtgagtctgacacgcgattccagctagccaccctgataagtgctccgcgggggtccggctcgggtgtgggcttgctagttctagagccatgctcgccaccacctcaccacccccacccccaccgagtttggcccccttggccccctacacacacacaaacccgcacgcacacaccacacacacacacacacacacacacacacaccccacaccctgctcgagtttgtggtggtggtggctgttttaaactggggagggaatgggtgtctggctcatggattgccaatctgaaattctccataacttgctagcttgttttttttttttttttttacacccccccgccccaccccccggacttgcacaatgttcaatgatctcagcagagttcttcatgtgaaacgttgatcacctttgaagcctgcatcattcacatattttttcttcttcttccccttcagttcatgaactggtgttcattttctgtgtgtgtgtgtgttttattttgtttggatttttttttttaattttacttttagagcttgctgtgcttgcccacctcttttccaacctccaccctcactccttctcaacccatctcttccgagatgaaagaaaaaaaaaagcaaagtttttttttcttctcctgagttcttcagtgagattgagcttgcaaaggaaaaaaaaatgtgaaatgttatagacttgcagcgtgccgagttccatcgggttttttttttagcattgttatgctaaaatagagaaaaaaatcctcatgaaccttccacaatcaagcctgcatcaaccttctgggtgtgacttgtgagttttggccttgtgatgccaaatctgagagtttagtctgccattaaaaaaactcattctcatctcatgcattattatgcttgctactttgtcttagcaacaatgaactataactgtttcaaagactttatggaaaagagacattatattaataaaaaaaaaagcctgcatgctggacatatatggtataattattttttcctttttttttccttttggcttggaaatggacgttcgaagacttatagcatggcattcatacttttgttttattgcctcatgacttttttgagtttagaacaaaacagtgcaaccgtagagccttcttcccatgaaattttgcatctgctccaaaactgctttgagttactcagaacttcaacctcccaatgcactgaaggcattccttgtcaaagataccagaatgggttacacatttaacctggcaaacattgaagaactcttaatgttttctttttaataagaatgacgcccactttggggactaaaattgtgctattgccgagaagcagtctaaaatttatttttnaaaaagagaaactgccccattatttttggtttgttttatttttattttatattttttggcttttggtcattgtcaaatgtggaatgctctgggtttctagtatataatttaattctagtgtttataatctgttagcccagttaaaatgtatgctacagataaaggaatgttatagataaatttgaaagagttaggtctgtttagctgtagattttttaaacgattgatgcactaaattgtttactattgtgatgttaaggggggtagagtttgcaaggggactgtttaaaaaaagtagcttatacagcatgtgcttgcaacttaaatataagttgggtatgtgtagtctttgctataccactgactgtattgaaaaccaaagtattaagaggggaaacgcccctgtttatatctgtaggggtattttacattcaaaaatgtatgtttttttttcttttcaaaattaaagtatttgggactgaattgcactaagatataacctgcaagcatataatacaaaaaaaaattgcaaaactgtttagaacgctaataaaatttatgcagttataaaaatggcattactgcacagttttaagatgatgcagatttttttacagttgtattgtggtgcagaactggattttctgtaacttaaaaaaaatccacagttttaaaggcaataatcagtaaatgttattttcagggactacatcctgtctttaaaaagaaatgaaaagtaaatcttaccacaataaatataaaaaaatcttgtcagttacttttcttttacatattttgctgtgcaaaattgttttatatcttgagttactaactaaccacgcgtgttgttcctatgtgcttttctttcattttcaattctggttatatcaagaaaagataatctacaataataaacggcatttttttttgattctgtaaaaaaaaa

SEQ ID NO: 811 - protein, 373 aa, Homo sapien
MASELAMSNSDLPTSPLAMEYVNDFDLMKFEVKKEPVETDRIISQCGRLIAGGSLSSTPMSTPCSSVPPSPSFSAPSPGSGSEQKAHLEDYYWMTGYPQQLNPEALGFSPEDAVEALISNSHQLQGGFDGYARGAQQLAAAAGAGAGASLGGSGEEMGPAAAVVSAVIAAAAAQSGAGPHYHHHHHHAAGHHHHPTAGAPGAAGSAAASAGGAGGAGGGGPASAGGGGGGGGGGGGGGAAGAGGALHPHHAAGGLHFDDRFSDEQLVTMSVRELNRQLRGVSKEEVIRLKQKRRTLKNRGYAQSCRFKRVQQRHVLESEKNQLLQQVDHLKQEISRLVRERDAYKEKYEKLVSSGFRENGSSSDNPSSPEFFM

SEQ ID NO: 812 - DNA, 2473 bp, Homo sapien
aatcgcgaaacccggcgagcggcgcgctggctatcgagcgagcggggcggaaccgggagttgcgccgccgctcgggcgccgggctccgtcgcggccgcagccccgcgggtcgccctcccgtgcctcgcccgcggacaccctggccgtggacaccctggccgtgggcacccgcggggcgcggcgcgggcgctgcgcggcggcggcggcggcatgaaggtcacgtcgctcgacgggcgccagctgcgcaagatgctccgcaaggaggcggcggcgcgctgcgtggtgctcgactgccggccctatctggccttcgctgcctcgaacgtgcgcggctcgctcaacgtcaacctcaactcggtggtgctgcggcgggcccggggcggcgcggtgtcggcgcgctacgtgctgcccgacgaggcggcgcgcgcgcggctcctgcaggagggcggcggcggcgtcgcggccgtggtggtgctggaccagggcagccgccactggcagaagctgcgagaggagagcgccgcgcgtgtcgtcctcacctcgctactcgcttgcctacccgccggcccgcgggtctacttcctcaaagggggatatgagactttctactcggaatatcctgagtgttgcgtggatgtaaaacccatttcacaagagaagattgagagtgagagagccctcatcagccagtgtggaaaaccagtggtaaatgtcagctacaggccagcttatgaccagggtggcccagttgaaatccttcccttcctctaccttggaagtgcctaccatgcatccaagtgcgagttcctcgccaacttgcacatcacagccctgctgaatgtctcccgacggacctccgaggcctgcatgacccacctacactacaaatggatccctgtggaagacagccacacggctgacattagctcccactttcaagaagcaatagacttcattgactgtgtcagggaaaagggaggcaaggtcctggtccactgtgaggctgggatctcccgttcacccaccatctgcatggcttaccttatgaagaccaagcagttccgcctgaaggaggccttcgattacatcaagcagaggaggagcatggtctcgcccaactttggcttcatgggccagctcctgcagtacgaatctgagatcctgccctccacgcccaacccccagcctccctcctgccaaggggaggcagcaggctcttcactgataggccatttgcagacactgagccctgacatgcagggtgcctactgcacattccctgcctcggtgctggcaccggtgcctacccactcaacagtctcagagctcagcagaagccctgtggcaacggccacatcctgctaaaactgggatggaggaatcggcccagccccaagagcaactgtgatttttgtttttaagactcatggacatttcatacctgtgcaatactgaagacctcattctgtcatgctgccccagtgagatagtgagtggtcaccaggcttgcaaatgaacttcagacggacctcagggtaggttctcgggactgaaggaaggccaagccattacgggagcacagcatgtgctgactactgtacttccagacccctgccctcttgggactgcccagtccttgcacctcagagttcgccttttcatttcaagcataagccaataaatacctgcagcaacgtgggagaaagaagttgctggaccaggagaaaaggcagttatgaagccaattcattttgaaggaagcacaatttccaccttattttttgaactttggcagtttcaatgtctgtctctgttgcttcggggcataagctgatcaccgtctagttgggaaagtcaccctacagggtttgtagggacatgatcagcatcctgatttgaaccctgaaatgttgtgtagacaccctcttgggtccaatgaggtagttggttgaagtagcaagatgttggcttttctggattttttttgccatgggttcttcactgaccttggactttggcatgattcttagtcatacttgaacttgtctcattccacctcttctcagagcaactcttcctttgggaaaagagttcttcagatcatagaccaaaaaagtcataccttcgaggtggtagcagtagattccaggaggagaagggtacttgctaggtatcctgggtcagtggcggtgcaaactggtttcctcagctgcctgtccttctgtgtgcttatgtctcttgtgacaattgttttcctccctgcccctggaggttgtcttcaactgtggacttctgggatttgcagattttgcaacgtggtactacttttttttctttttgtctgttagttatttctccaggggaaaaggcaataattttctaagacccgtgtgaatgtgaagaaaagcagtatgttactggttgttgttgttgttcttgttttttatatgtaaaataaaaatagtgaaaggag

SEQ ID NO: 813 - protein, 384 aa, Homo sapien
MKVTSLDGRQLRKMLRKEAAARCVVLDCRPYLAFAASNVRGSLNVNLNSVVLRRARGGAVSARYVLPDEAARARLLQEGGGGVAAVVVLDQGSRHWQKLREESAARVVLTSLLACLPAGPRVYFLKGGYETFYSEYPECCVDVKPISQEKIESERALISQCGKPVVNVSYRPAYDQGGPVEILPFLYLGSAYHASKCEFLANLHITALLNVSRRTSEACMTHLHYKWIPVEDSHTADISSHFQEAIDFIDCVREKGGKVLVHCEAGISRSPTICMAYLMKTKQFRLKEAFDYIKQRRSMVSPNFGFMGQLLQYESEILPSTPNPQPPSCQGEAAGSSLIGHLQTLSPDMQGAYCTFPASVLAPVPTHSTVSELSRSPVATATSC

SEQ ID NO: 814 - DNA, 1973 bp, Homo sapien
agccgccgcctcgccgcttcccctcgtcggagcggccgctcgtccgcccggcttgaggcccgcggggagcgcggcgcaattcgtcggcccgcgggggggcggcctcccggcatcttcgcggcgaccaaggactaccaggaaggggagcggctgggatggcgcgtccgcggccccgcgagtacaaagcgggcgacctggtcttcgccaagatgaagggctacccgcactggccggcccggattgatgaactcccagagggcgctgtgaagcctccagcaaacaagtatcctatcttcttttttggcacccatgaaactgcatttctaggtcccaaagacctttttccatataaggagtacaaagacaagtttggaaagtcaaacaaacggaaaggatttaacgaaggattgtgggaaatagaaaataacccaggagtaaagtttactggctaccaggcaattcagcaacagagctcttcagaaactgagggagaaggtggaaatactgcagatgcaagcagtgaggaagaaggtgatagagtagaagaagatggaaaaggcaaaagaaagaatgaaaaagcaggctcaaaacggaaaaagtcatatacttcaaagaaatcctctaaacagtcccggaaatctccaggagatgaagatgacaaagactgcaaagaagaggaaaacaaaagcagctctgagggtggagatgcgggcaacgacacaagaaacacaacttcagacttgcagaaaaccagtgaagggacctaactaccataatgaatgctgcatattaagagaaaccacaagaaggttatatgtttggttgtctaatattcttggatttgatatgaaccaacacatagtccttgttgtcattgacagaaccccagtttgtatgtacattattcatattcctctctgttgtgtttcggggggaaaagacattttagccttttttaaaagttactgatttaatttcatgttatttggttgcatgaagttgcccttaaccactaaggattatcaagatttttgcgcagacttatacatgtctaggatccttttatcaaggcagttatgatcatcgttttcctgccttgaccccaccatcatcaaacactcagttaaatataaattaacattttttagatgaccactcaacataatgcttaagaatggaatttcctctctgtgacagaacccaggaattaattcctaaatacataacgttggtatattgaagacgaaattaaaattgtccttcagttttgaggccatgtgtaaagtttaaccatattgtaaaatatctattccgtattagaaatagctagttgacagcttatacttctcaaaattcatattgttatgtacacaaactaagtttctatatgtgaagttagtgagtctttttgtgttactccaaaataaaggcaatgatttatttttttcccagtgccaatacaattttgagctaagcactcaaggtggatactttacattttaaagctggaatcagcaacagccctatgggaaaccagacaaagcattgacttttaaatgtagacttttaaaataaactgttttcttttggaactacaattagaatagttaatattcatccttaaaccattattatgtgtacattattgttgctattgtgataatagagaattttatttatttttatgccagcttatattgtgagaacacatttagtcagtttgggttttatcaatcctgttaatgcttgtccttggaacatctttcgcgtattcacggtttgtagttgaaaagtttactgtaaaaaaatcaaaaacaaaaaaatgtattgtttttacagaataaatttattgggatgtgtactgggagtaagatttgaggttgtaagcaaactaagttagtgtaatttggcttcatatatgtaacgtgaggtattaatgtaattcatatattaaagcaaaaattgttcgcagc

SEQ ID NO: 815 - protein, 203 aa, Homo sapien
MARPRPREYKAGDLVFAKMKGYPHWPARIDELPEGAVKPPANKYPIFFFGTHETAFLGPKDLFPYKEYKDKFGKSNKRKGFNEGLWEIENNPGVKFTGYQAIQQQSSSETEGEGGNTADASSEEEGDRVEEDGKGKRKNEKAGSKRKKSYTSKKSSKQSRKSPGDEDDKDCKEEENKSSSEGGDAGNDTRNTTSDLQKTSEGT

SEQ ID NO: 816 - DNA, 1718 bp, Homo sapien
ggcacgaggcacgtggttatgctgccggagtttgggccgccactgtaggaaaagtaacttcagctgcagccccaaagcgagtgagccgagccggagccatggagggccagagcgtggaggagctgctcgcaaaggcagagcaggacgaggcagagaagttgcaacgcatcacggtgcacaaggagctggagctgcagtttgacctgggcaacctgctggcgtcggaccggaaccccccgaccgggctgcggtgcgccggacccacgccggaggccgagctacaggccctggcgcgggacaacacgcaactgctcatcaaccagctgtggcagctgcccacggagcgcgtggaagaggcgatagtggcgcggctgccggagcccaccacacgcctgccgcgagagaagcctctgccccgaccgcggccacttacacgctggcagcagttcgcgcgcctcaagggcatccgtcccaagaagaagaccaacctggtgtgggacgaggtgagtggccagtggcggcggcgctggggctaccagcgcgcccgggacgacaccaaagaatggctgattgaggtgcccggcaatgccgaccccttggaggaccagttcgccaagcggattcaggccaagaaggaaagggtggccaagaacgagctgaaccggctgcgtaacctggcccgcgcgcacaagatgcagctgcccagcgcggccggcttgcaccctaccggacaccagagtaaggaggagctgggccgcgccatgcaagtggccaaggtctccaccgcctctgtggggcgctttcaggagcgcctccccaaggagaaggtgccccggggctccggcaagaaaaggaagtttcaaccccttttcggggactttgcagccgagaaaaagaaccagttggagctgcttcgtgtcatgaacagcaagaagcctcagctggatgtgactagggccaccaataagcagatgagggaggaggaccaggaggaggccgccaagaggaggaaaatgagccagaagggcaagagaaagggaggccggcaggggcctgggggcaagaggaaagggggcccgcccagccagggagggaagaggaaagggggcttgggaggcaagatgaattctgggccgcctggcttgggtggcaagagaaaaggaggacagcgcccaggaggaaagaggaggaagtaatagtttctaactgtcggacccgtctgtaaaccaaggactatgaatactaaatgttaagttctaggcaattatacggggactcagaaggacctggccgctgccttcattgagtttaaagggacaggattgcccttccgtcaagaaagtatgtaagtgttggactgcacaaattaatgtttttcccacaaccgagactttggagattaagaacttatttgaggatttaagaattagggaaataatttggtggaaaccgggaatgagttctattcttaaacagcctttttttttctttttaatgttggatatacggcgaggtagagttggccatatttcagagacttagattgacgtatatgtttctgcattatttttacaacaagtttgtgtatcagagcgggagtgcgggggagggaaagaaaacaaacagtttcagaattgaataggcaagtgactgttttaaagattaagtaataaagatgtcttatctagtgtgacttttaaaaaaaaaaaaaaaaaaaa

SEQ ID NO: 817 - protein, 365 aa, Homo sapien
MEGQSVEELLAKAEQDEAEKLQRITVHKELELQFDLGNLLASDRNPPTGLRCAGPTPEAELQALARDNTQLLINQLWQLPTERVEEAIVARLPEPTTRLPREKPLPRPRPLTRWQQFARLKGIRPKKKTNLVWDEVSGQWRRRWGYQRARDDTKEWLIEVPGNADPLEDQFAKRIQAKKERVAKNELNRLRNLARAHKMQLPSAAGLHPTGHQSKEELGRAMQVAKVSTASVGRFQERLPKEKVPRGSGKKRKFQPLFGDFAAEKKNQLELLRVMNSKKPQLDVTRATNKQMREEDQEEAAKRRKMSQKGKRKGGRQGPGGKRKGGPPSQGGKRKGGLGGKMNSGPPGLGGKRKGGQRPGGKRRK

SEQ ID NO: 818 - DNA, 1503 bp, Homo sapien
gggagcggccgtggagcccaatcgttcgctccccttcccgggtccgcgcgcggcgccgcctccgccattgctgcgagcaggagcaggagacgcggagctcggagcgctgagctgacctgccggagccgggcgtgggctgcagcctcggagctcccggaacgatggtgaagttggggaacaatttcgcagagaagggcaccaagcagccgctgctggaggatggcttcgacaccattcccctgatgacgcccctcgatgtcaatcagctgcagttcccgcccccggataaggtggtcgtgaaaactaagaccgagtatgaacctgaccgcaagaaagggaaagcacgtcctccccaaattgctgagttcaccgtcagcatcacggagggtgtcaccgagaggtttaaggtctccgtgttggtcctcttcgccctggccttcctcacctgcgtcgtcttcctggttgtctacaaggtgtacaagtatgaccgcgcctgccccgatgggttcgtcctcaagaacacccagtgcatcccagaaggcttggagagctactacgcggagcaagactccagtgcccgggagaaattttacacagtcataaaccactacaacctggccaagcagagcatcacgcgctccgtatcgccctggatgtcagttctgtcagaagagaagctgtccgagcaggagactgaagcggctgagaagtcagcttagcgggatgggcaagttccttacaatgtgtcacttgcaaataacaaagggactttgagggacatttcattaaatataattactgatactttagaggttactcatttacggtgcaattgcttctgtttgctaatgctgctttgcaaataaaacttgctgccgaccacccacgggcataaaatcaagtgcatttcagcattgcctaaagagctctgacaccacttttcatgttaagatcttcatttagctcctttactgggatttattggatgctgtaaaaaaataaatttacactggatatgcgaagggtttggatctcagataaatgcattttgtggaattgattttctgaaccgaccctgctgtctgcaaaccttcctccatagccatatctagagtgatctctcgctgtgctaagagcaagcctacttcgcatttcttcctcggccatcagcgggtaacagtgctgactgctgccaaggtgcactgtagtaaggtgtctggagacacagaccgtgaccttggcgcagcggtgtgcatcagaggcgtgtgctgagaagggtggtgttaagctgtggaaaatgactcaagagcaataaatcagtgccaaagcttccctgcgcatctgaatagacacaagtgaagcccgtgtgcgcacagtgcagaggccgagcctgtatttccaggtagacgtggactttattgactgtgaattcatttacctgtaacttctgacatttcactctgtgcaaataaagaacatgaggataaaaaaaaaaaaaaaaaa

SEQ ID NO: 819 - protein, 185 aa, Homo sapien
MVKLGNNFAEKGTKQPLLEDGFDTIPLMTPLDVNQLQFPPPDKVVVKTKTEYEPDRKKGKARPPQIAEFTVSITEGVTERFKVSVLVLFALAFLTCVVFLVVYKVYKYDRACPDGFVLKNTQCIPEGLESYYAEQDSSAREKFYTVINHYNLAKQSITRSVSPWMSVLSEEKLSEQETEAAEKSA

SEQ ID NO: 820 - DNA, 1528 bp, Homo sapien
gagggaagtgtcgactgcgccggcgggaacagacatgcctgcggccaagaagcagaagctgagcagtgacgagaacagcaatccagaactctctggagacgagaatgatgacgctgtcagtatagaaagtggtacaaacactgaacgccctgatacacctacaaacacgccaaatgcacctggaaggaaaagttggggaaagggaaaatggaagtcaaagaaatgcaaatattctttcaaatgtgtaaatagtctcaaggaagatcataaccaaccattgtttggagttcagtttaactggcacagtaaagaaggagatccattagtgtttgcaactgtaggaagcaacagagttaccttgtatgaatgtcattcacaaggagaaatccggttgttgcaatcttacgtggatgctgatgctgatgaaaacttttacacttgtgcatggacctatgatagcaatacgagccatcctctgctggctgtagctggatctagaggcataattaggataataaatcctataacaatgcagtgtataaagcactatgttggccatggaaatgctatcaatgagctgaaattccatccaagagatccaaatcttctcctgtcagtaagtaaagatcatgctttacgattatggaatatccagacggacactctggtggcaatatttggaggcgtagaagggcacagagatgaagttctaagtgctgattatgatcttttgggtgaaaaaataatgtcctgtggtatggatcattctcttaaactttggaggatcaattcaaagagaatgatgaatgcaattaaggaatcttatgattataatccaaataaaactaacaggccatttatttctcagaaaatccattttcctgatttttctaccagagacatacataggaattatgttgattgtgtgcgatggttaggcgatttgatactttctaagtcttgtgaaaatgccattgtgtgctggaaacctggcaagatggaagatgatatagataaaattaaacccagtgaatctaatgtgactattcttgggcgatttgattacagccagtgtgacatttggtacatgaggttttctatggatttctggcaaaagatgcttgcattgggcaatcaagttggcaaactttatgtttgggatttagaagtagaagatcctcataaagccaaatgtacaacactgactcatcataaatgtggtgctgctattcgacaaaccagttttagcagggatagcagcattcttatagctgtttgtgatgatgccagtatttggcgctgggatcgacttcgataaaatacttttgcctaatcaaaattaaaatgtgtttgttgtctgtgtaaaataaaattaatgtatcttgctagtaagggcacgtagagcatttagagttgtctttcagcattcaatcaggctgagctgaatgtagtgatgtttacattgtttacattctttgtactgtcttcctgctcagactctactgcttttaataaaaatttatttttg

SEQ ID NO: 821 - protein, 427 aa, Homo sapien
MPAAKKQKLSSDENSNPELSGDENDDAVSIESGTNTERPDTPTNTPNAPGRKSWGKGKWKSKKCKYSFKCVNSLKEDHNQPLFGVQFNWHSKEGDPLVFATVGSNRVTLYECHSQGEIRLLQSYVDADADENFYTCAWTYDSNTSHPLLAVAGSRGIIRIINPITMQCIKHYVGHGNAINELKFHPRDPNLLLSVSKDHALRLWNIQTDTLVAIFGGVEGHRDEVLSADYDLLGEKIMSCGMDHSLKLWRINSKRMMNAIKESYDYNPNKTNRPFISQKIHFPDFSTRDIHRNYVDCVRWLGDLILSKSCENAIVCWKPGKMEDDIDKIKPSESNVTILGRFDYSQCDIWYMRFSMDFWQKMLALGNQVGKLYVWDLEVEDPHKAKCTTLTHHKCGAAIRQTSFSRDSSILIAVCDDASIWRWDRLR

SEQ ID NO: 822 - DNA, 1794 bp, Homo sapien
gcacgaggcgagctggagtgatctttattcacaatgtctttacaaaggctcctgcaacacagcagcaatggcaatttggcggacttctgcgctgggccagcgtatagctcttactccacactcaccggcagccttacgatgaacgataatagaaggattcaaatgctagcagacacggtggctactctgcctcggggacgaaagcagcttgctttgaccagatcaagttctttaagtgacttttcctggtctcaaagaaagcttgttactgtggagaagcaggataatgaaacatttggatttgaaattcagtcttacaggccccagaatcagaatgcctgctcctcggaaatgttcactttgatatgcaaaatacaggaggacagcccagctcactgtgctggcctgcaagctggtgatgtccttgcaaatatcaatggtgtgagcacagaaggttttacctacaaacaagtcgttgacctgatcagatcgtccggaaacctgctaacgatagagactcttaatggaacaatgattctgaaaagaacggagcttgaagcaaagctgcaggttttaaagcaaactttgaaacaaaaatgggtggagtacagatctctgcagttacaggaacatcgtctgcttcatggtgatgcagctaattgccccagtttggaaaacatggacttggatgaattgtctttgtttggacccctgcctgggccaggcccagcccttgtggaccggaatcgattatccagtgagagcagctgtaagagctggctgagctccatgacgatggacagtgaagatggctaccagacgtgtgtgtctgaggactccagcaggggtgccttcagtcggcagacgagtacagatgatgagtgctttatccccaaggagggggatgattttctgaggaggtcatcttcaaggaggaaccggagcatcagtaacaccagcagcggatccatgtctcccttgtgggagggcaacttatcaagcatgtttgggaccctgccccggaagagcagaaagggaagtgtccgaaagcaactcttgaaatttatccctggccttcatcgtgctgtggaagaggaagaaagtcgcttttgacggattgtggtgtcctttcaaattagcttatttcacaaatatctctagactcacccagatcccagcttggtgggaaagtgcagaagaattgcaaaactgacatcccatttcacagcaatagtgacctttatttaaattgttgtgttatagtttatgcttcttaaatcatttttcaacctaaacagccaatttctaagcagacaggaaaactaaataataagttaattaatataacaaagatgcaggttcctgctcattccagtaatgtctttgaaagcaaaactaatatttattttctagattatccctgtgaataattgagaactttttggagtcaagtatgaataaaggtgtggcagaatataataatctggactattttctataggataattgctgggttataaaatcttaggtttgcttatgcccagtagctcctgcggaggcttaataataggcaattttgaatttgttcaaacctgtaatggcttgtaaacaaagatgaccatcagctgtttctcacatctatagtgacaataaagcgggaagtataagatttaataggaggggttaaggttcatgagaaccatggaaagatgtggtctgagatgggtgctgcaaagatcataataaagtcatttttatagacagtctaaacaaaaaaaaaaaaaaaaaaaaaaa

SEQ ID NO: 823 - protein, 359 aa, Homo sapien
MSLQRLLQHSSNGNLADFCAGPAYSSYSTLTGSLTMNDNRRIQMLADTVATLPRGRKQLALTRSSSLSDFSWSQRKLVTVEKQDNETFGFEIQSYRPQNQNACSSEMFTLICKIQEDSPAHCAGLQAGDVLANINGVSTEGFTYKQVVDLIRSSGNLLTIETLNGTMILKRTELEAKLQVLKQTLKQKWVEYRSLQLQEHRLLHGDAANCPSLENMDLDELSLFGPLPGPGPALVDRNRLSSESSCKSWLSSMTMDSEDGYQTCVSEDSSRGAFSRQTSTDDECFIPKEGDDFLRRSSSRRNRSISNTSSGSMSPLWEGNLSSMFGTLPRKSRKGSVRKQLLKFIPGLHRAVEEEESRF

SEQ ID NO: 824 - DNA, 3001 bp, Homo sapien
actttcctgccccttccccggccaagcccaactccggatctcgctctccaccggatctcacccgccacacccggacaggcggctggaggaggcgggcgtctaaaattctgggaagcagaacctggccggagccactagacagagccgggcctagcccagagacatggagagttgctacaacccaggtctggatggtattattgaatatgatgatttcaaattgaactcctccattgtggaacccaaggagccagccccagaaacagctgatggcccctacctggtgatcgtggaacagcctaagcagagaggcttccgatttcgatatggctgtgaaggcccctcccatggaggactgcccggtgcctccagtgagaagggccgaaagacctatcccactgtcaagatctgtaactacgagggaccagccaagatcgaggtggacctggtaacacacagtgacccacctcgtgctcatgcccacagtctggtgggcaagcaatgctcggagctggggatctgcgccgtttctgtggggcccaaggacatgactgcccaatttaacaacctgggtgtcctgcatgtgactaagaagaacatgatggggactatgatacaaaaacttcagaggcagcggctccgctctaggccccagggccttacggaggccgagcagcgggagctggagcaagaggccaaagaactgaagaaggtgatggatctgagtatagtgcggctgcgcttctctgccttccttagagccagtgatggctccttctccctgcccctgaagccagtcacctcccagcccatccatgatagcaaatctccgggggcatcaaacctgaagatttctcgaatggacaagacagcaggctctgtgcggggtggagatgaagtttatctgctttgtgacaaggtgcagaaagatgacattgaggttcggttctatgaggatgatgagaatggatggcaggcctttggggacttctctcccacagatgtgcataaacagtatgccattgtgttccggacacccccctatcacaagatgaagattgagcggcctgtaacagtgtttctgcaactgaaacgcaagcgaggaggggacgtgtctgattccaaacagttcacctattaccctctggtggaagacaaggaagaggtgcagcggaagcggaggaaggccttgcccaccttctcccagcccttcgggggtggctcccacatgggtggaggctctgggggtgcagccgggggctacggaggagctggaggaggtggcagcctcggtttcttcccctcctccctggcctacagcccctaccagtccggcgcgggccccatgcggtgctacccgggaggcgggggcggggcgcagatggccgccacggtgcccagcagggactccggggaggaagccgcggagccgagcgccccctccaggaccccccagtgcgagccgcaggccccggagatgctgcagcgagctcgagagtacaacgcgcgcctgttcggcctggcgcacgcagccccgagccctactcgactactgcgtcaccgcggacgccgcgcgctgctggcgggacagcgccacctgctgacggcgcaggacgagaacggagacacaccactgcacctagccatcatccacgggcagaccagtgtcattgagcagatagtctatgtcatccaccacgcccaggacctcggcgttgtcaacctcaccaaccacctgcaccagacgcccctgcacctggcggtgatcacggggcagacgagtgtggtgagctttctgctgcgggtaggtgcagacccagctctgctggatcggcatggagactcagccatgcatctggcgctgcgggcaggcgctggtgctcctgagctgctgcgtgcactgcttcagagtggagctcctgctgtgccccagctgttgcatatgcctgactttgagggactgtatccagtacacctggcggtccgagcccgaagccctgagtgcctggatctgctggtggacagtggggctgaagtggaggccacagagcggcaggggggacgaacagccttgcatctagccacagagatggaggagctggggttggtcacccatctggtcaccaagctccgggccaacgtgaacgctcgcacctttgcgggaaacacacccctgcacctggcagctggactggggtacccgaccctcacccgcctccttctgaaggctggtgctgacatccatgctgaaaacgaggagcccctgtgcccactgccttcaccccctacctctgatagcgactcggactctgaagggcctgagaaggacacccgaagcagcttccggggccacacgcctcttgacctcacttgcagcaccttggtgaagaccttgctgctaaatgctgctcagaacaccatggagccacccctgaccccgcccagcccagcagggccgggactgtcacttggtgatacagctctgcagaacctggagcagctgctagacgggccagaagcccagggcagctgggcagagctggcagagcgtctggggctgcgcagcctggtagacacgtaccgacagacaacctcacccagtggcagcctcctgcgcagctacgagctggctggcggggacctggcaggtctactggaggccctgtctgacatgggcctagaggagggagtgaggctgctgaggggtccagaaacccgagacaagctgcccagcacagaggtgaaggaagacagtgcgtacgggagccagtcagtggagcaggaggcagagaagctgggcccaccccctgagccaccaggagggctctcgcacgggcacccccagcctcaggtgactgacctgctgcctgcccccagcccccttcccggaccccctgtacagcgtccccacctatttcaaatcttatttaacaccccacacccacccctcagttgggacaaataaaggattctcatgggaaggggaggaccccgaattcct

SEQ ID NO: 825 - protein, 933 aa, Homo sapien
MESCYNPGLDGIIEYDDFKLNSSIVEPKEPAPETADGPYLVIVEQPKQRGFRFRYGCEGPSHGGLPGASSEKGRKTYPTVKICNYEGPAKIEVDLVTHSDPPRAHAHSLVGKQCSELGICAVSVGPKDMTAQFNNLGVLHVTKKNMMGTMIQKLQRQRLRSRPQGLTEAEQRELEQEAKELKKVMDLSIVRLRFSAFLRASDGSFSLPLKPVTSQPIHDSKSPGASNLKISRMDKTAGSVRGGDEVYLLCDKVQKDDIEVRFYEDDENGWQAFGDFSPTDVHKQYAIVFRTPPYHKMKIERPVTVFLQLKRKRGGDVSDSKQFTYYPLVEDKEEVQRKRRKALPTFSQPFGGGSHMGGGSGGAAGGYGGAGGGGSLGFFPSSLAYSPYQSGAGPMRCYPGGGGGAQMAATVPSRDSGEEAAEPSAPSRTPQCEPQAPEMLQRAREYNARLFGLAHAAPSPTRLLRHRGRRALLAGQRHLLTAQDENGDTPLHLAIIHGQTSVIEQIVYVIHHAQDLGVVNLTNHLHQTPLHLAVITGQTSVVSFLLRVGADPALLDRHGDSAMHLALRAGAGAPELLRALLQSGAPAVPQLLHMPDFEGLYPVHLAVRARSPECLDLLVDSGAEVEATERQGGRTALHLATEMEELGLVTHLVTKLRANVNARTFAGNTPLHLAAGLGYPTLTRLLLKAGADIHAENEEPLCPLPSPPTSDSDSDSEGPEKDTRSSFRGHTPLDLTCSTLVKTLLLNAAQNTMEPPLTPPSPAGPGLSLGDTALQNLEQLLDGPEAQGSWAELAERLGLRSLVDTYRQTTSPSGSLLRSYELAGGDLAGLLEALSDMGLEEGVRLLRGPETRDKLPSTEVKEDSAYGSQSVEQEAEKLGPPPEPPGGLSHGHPQPQVTDLLPAPSPLPGPPVQRPHLFQILFNTPHPPLSWDK

SEQ ID NO: 826 - DNA, 2201 bp, Homo sapien
gggggtgggaagagctgaagcaggcgctcttggctcggcgcggcccgctgcaatccgtggaggaacgcgccgccgagccaccatcatgcctgggcacttacaggaaggcttcggctgcgtggtcaccaaccgattcgaccagttatttgacgacgaatcggaccccttcgaggtgctgaaggcagcagagaacaagaaaaaagaagccggcgggggcggcgttgggggccctggggccaagagcgcagctcaggccgcggcccagaccaactccaacgcggcaggcaaacagctgcgcaaggagtcccagaaagaccgcaagaacccgctgccccccagcgttggcgtggttgacaagaaagaggagacgcagccgcccgtggcgcttaagaaagaaggaataagacgagttggaagaagacctgatcaacaacttcagggtgaagggaaaataattgatagaagaccagaaaggcgaccacctcgtgaacgaagattcgaaaagccacttgaagaaaagggtgaaggaggcgaattttcagttgatagaccgattattgaccgacctattcgaggtcgtggtggtcttggaagaggtcgagggggccgtggacgtggaatgggccgaggagatggatttgattctcgtggcaaacgtgaatttgataggcatagtggaagtgatagatctggcctgaagcacgaggacaaacgtggaggtagcggatctcacaactggggaactgtcaaagacgaattaactgacttggatcaatcaaatgtgactgaggaaacacctgaaggtgaagaacatcatccagtggcagacactgaaaataaggagaatgaagttgaagaggtaaaagaggagggtccaaaagagatgactttggatgagtggaaggctattcaaaataaggaccgggcaaaagtagaatttaatatccgaaaaccaaatgaaggtgctgatgggcagtggaagaagggatttgttcttcataaatcaaagagtgaagaggctcatgctgaagattcggttatggaccatcatttccggaagccagcaaatgatataacgtctcagctggagatcaattttggagaccttggccgcccaggacgtggcggcaggggaggacgaggtggacgtgggcgtggtgggcgcccaaaccgtggcagcaggaccgacaagtcaagtgcttctgctcctgatgtggatgacccagaggcattcccagctctggcttaactggatgccataagacaaccctggttcctttgtgaacccttctgttcaaagcttttgcatgcttaaggattccaaacgactaagaaattaaaaaaaaaaagactgtcattcataccattcacacctaaagactgaattttatctgttttaaaaatgaacttctcccgctacacagaagtaacaaatatggtagtcagttttgtatttagaaatgtattggtagcagggatgttttcataattttcagagattatgcattcttcatgaatacttttgtattgctgcttgcaaatatgcatttccaaacttgaaatataggtgtgaacagtgtgtaccagtttaaagctttcacttcatttgtgttttttaattaaggacttagaagttcccccaattacaaactggttttaaatattggacatactggttttaatacctgctttgcatattcacacatggtcaactgggacatgttaaactttgatttgtcaaattttatgctgtgtggaatactaactatatgtattttaacttagttttaatattttcattttgggggaaaaatcttttttcacttctcatgatagctgttatatatatatgctaaatctttatatacagaaatatcagtacttgaacaaattcaaagcacatttggtttattaacccttgctccttgcatggctcattaggttcaaattataactaatttacattttcagctatatttactttttaaatgcttgagtttcccattttaaaatctaaactagacatcttaattggtgaaagttgtttaaactacttattgttggtaggcacatcgtgtcaagtgaagtagttttataggtatgggttttttctcccccttcaccagggtgggtggaataagttgatttggccaatgtgtaatatttaaactgttctgtaaaataaaaaaaaaaaaaaaaaa

SEQ ID NO: 827 - protein, 387 aa, Homo sapien
MPGHLQEGFGCVVTNRFDQLFDDESDPFEVLKAAENKKKEAGGGGVGGPGAKSAAQAAAQTNSNAAGKQLRKESQKDRKNPLPPSVGVVDKKEETQPPVALKKEGIRRVGRRPDQQLQGEGKIIDRRPERRPPRERRFEKPLEEKGEGGEFSVDRPIIDRPIRGRGGLGRGRGGRGRGMGRGDGFDSRGKREFDRHSGSDRSGLKHEDKRGGSGSHNWGTVKDELTDLDQSNVTEETPEGEEHHPVADTENKENEVEEVKEEGPKEMTLDEWKAIQNKDRAKVEFNIRKPNEGADGQWKKGFVLHKSKSEEAHAEDSVMDHHFRKPANDITSQLEINFGDLGRPGRGGRGGRGGRGRGGRPNRGSRTDKSSASAPDVDDPEAFPALA

SEQ ID NO: 828 - DNA, 759 bp, Homo sapien
ctgtgctgtaaaaacaagagtaacatttttatattaaagttaaataaagttacaactttgaagagagtttctgcaagacatgacacaaagctgctagcagaaaatcaaaacgctgattaaaagaagcacggtatgatgaccaaacataaaaagtgttttataattgttggtgttttaataacaactaatattattactctgatagttaaactaactcgagattctcagagtttatgcccctatgattggattggtttccaaaacaaatgctattatttctctaaagaagaaggagattggaattcaagtaaatacaactgttccactcaacatgccgacctaactataattgacaacatagaagaaatgaattttcttaggcggtataaatgcagttctgatcactggattggactgaagatggcaaaaaatcgaacaggacaatgggtacatggagctacatttaccaaatcgtttggcatgagagggagtgaaggatgtgcctacctcagcgatgatggtgcagcaacagctagatgttacaccgaaagaaaatggatttgcaggaaaagaatacactaagttaatgtctaagataatggggaaaatagaaaataacattattaagtgtaaaaccagcaaagtacttttttaattaaacaaagttcgagttttgtacctgtctggttaattctgcttacgtgtcaggctacacataaaagccacttcaaagattggcaaaaaaaaaaaaaaaaaaaa

SEQ ID NO: 829 - protein, 149 aa, Homo sapien
MMTKHKKCFIIVGVLITTNIITLIVKLTRDSQSLCPYDWIGFQNKCYYFSKEEGDWNSSKYNCSTQHADLTIIDNIEEMNFLRRYKCSSDHWIGLKMAKNRTGQWVHGATFTKSFGMRGSEGCAYLSDDGAATARCYTERKWICRKRIH

SEQ ID NO: 830 - DNA, 3452 bp, Homo sapien; identical to SEQ ID NO: 644

SEQ ID NO: 831 - protein, 513 aa, Homo sapien; identical to SEQ ID NO: 645

SEQ ID NO: 832 - DNA, 1110 bp, Homo sapien
gacagagcccgggccacggagctccttgccagctctcctcctcgcacagccgctcgaaccgcctgctgagccccatggcccgcgccacgctctccgccgcccccagcaatccccggctcctgcgggtggcgctgctgctcctgctcctggtggccgccagccggcgcgcagcaggagcgcccctggccactgaactgcgctgccagtgcttgcagaccctgcagggaattcacctcaagaacatccaaagtgtgaaggtgaagtcccccggaccccactgcgcccaaaccgaagtcatagccacactcaagaatgggcagaaagcttgtctcaaccccgcatcgcccatggttaagaaaatcatcgaaaagatgctgaaaaatggcaaatccaactgaccagaaggaaggaggaagcttattggtggctgttcctgaaggaggccctgccttacaggaacagaagaggaaagagagacacagctgcagaggccacctggcttgcgcctaatgtgtttgagcatacttaggagaagtcttctatttatttatttatttatttatttgtttgttttagaagattctatgttaatattttatgtgtaaaataaggttatgattgaatctacttgcacactctcccattatatttattgtttattttaggtcaaacccaagttagttcaatcctgattcatatttaatttgaagatagaaggtttgcagatattctctagtcatttgttaatatttcttcgtgatgacatatcacatgtcagccactgtgatagaggctgaggaatccaagaaaatggccagtaagatcaatgtgacggcagggaaatgtatgtgtgtctattttgtaactgtaaagatgaatgtcagttgttatttattgaaatgatttcacagtgtgtggtcaacatttctcatgttgaagctttaagaactaaaatgttctaaatatcccttggcattttatgtctttcttgtaagatactgccttgtttaatgttaattatgcagtgtttccctctgtgttagagcagagaggtttcgatatttattgatgttttcacaaagaacaggaaaataaaatatttaaaaatat

SEQ ID NO: 833 - protein, 107 aa, Homo sapien
MARATLSAAPSNPRLLRVALLLLLLVAASRRAAGAPLATELRCQCLQTLQGIHLKNIQSVKVKSPGPHCAQTEVIATLKNGQKACLNPASPMVKKIIEKMLKNGKSN

SEQ ID NO: 834 - DNA, 1403 bp, Homo sapien
caaatccgtgctcctagatttgcaggttctgatactgtggttcgagctacactcgccgcctgggcagacactcgtccaaaccactggagtgtgctggtgatcgcagccagcccttcgcctctccatgaacccgtgagcctggggcaggtgccaggcgatggcgcggcctgtgagcgacaggaccccggcccctctgctgctgggcggcccggccgggacaccccctggcgggggagcgctgcttgggttgcggagccttctgcaggggaccagcaagcccaaagagccggccagctgtctcctgaaggaaaaggagcgcaaggcggccctgcctgcagccacaacccctgggccaggcctggagactgcgggcccggcggatgccccggctggggcagtggtgggcggagggtccccgcgggggcgcccggggccggtgcccgccccgggtctgttggcgccactgctgtgggagcgcacgctgccgttcggcgatgtggagtacgtagacctggacgccttcctgctggagcacgggctcccgcccagcccgccgccccccggtggcccgtcgccggagccgtcgcccgcgcggacgcccgcaccctccccagggccgggttcgtgcggctcggcttccccccgctcctctcctgggcacgcccccgcccgggctgccctcgggaccgccacgggccaccgcgcaggcctgacctctcgggacacacccagccctgtggacccagacaccgtggaggtgttgatgacctttgaacccgacccagctgatcttgccctatcaagcattcctggccacgagacctttgaccctcgaagacatcgcttctcagaagaggaacttaagccccagccaatcatgaagaaggcaagaaaaatccaggtgccggaggagcagaaggatgagaaatactggagccggcggtacaagaacaacgaggcagccaagcggtcccgtgacgcccggcggctcaaggagaaccagatatcggtgcgggcggccttcctggagaaggagaacgccctgctgcggcaggaagttgtggccgtgcgccaggagctgtcccactaccgcgccgtgctgtcccgataccaggcccagcacggggccctgtgaggctgccccacatccccacctggcaggcgtctcctccgcttgctgagacttacgccctgttcccttcctgccctgtgcccacgggccggccagctgggtgccccagggacgtgataatgcagataaatacatttatatttttaagaaaaagcgagcctcccccctcttgcgggggcggggagggttctctgtgtgtccccggcacgtcagggaccctatcctcccaccgcctccgttaacacgatcctgaataaatcttgagaacccc

SEQ ID NO: 835 - protein, 325 aa, Homo sapien
MARPVSDRTPAPLLLGGPAGTPPGGGALLGLRSLLQGTSKPKEPASCLLKEKERKAALPAATTPGPGLETAGPADAPAGAVVGGGSPRGRPGPVPAPGLLAPLLWERTLPFGDVEYVDLDAFLLEHGLPPSPPPPGGPSPEPSPARTPAPSPGPGSCGSASPRSSPGHAPARAALGTATGHRAGLTSRDTPSPVDPDTVEVLMTFEPDPADLALSSIPGHETFDPRRHRFSEEELKPQPIMKKARKIQVPEEQKDEKYWSRRYKNNEAAKRSRDARRLKENQISVRAAFLEKENALLRQEVVAVRQELSHYRAVLSRYQAQHGAL

SEQ ID NO: 836 - DNA, 1702 bp, Homo sapien
agactcaacaagagctccagcaaagactttcactgtagcttgacttgacctgagattaactagggaatcttgagaataaagatgagctctgaaaattgtttcgtagcagagaacagctctttgcatccggagagtggacaagaaaatgatgccaccagtccccatttctcaacacgtcatgaagggtccttccaagttcctgtcctgtgtgctgtaatgaatgtggtcttcatcaccattttaatcatagctctcattgccttatcagtgggccaatacaattgtccaggccaatacacattctcaatgccatcagacagccatgtttcttcatgctctgaggactgggttggctaccagaggaaatgctactttatttctactgtgaagaggagctggacttcagcccaaaatgcttgttctgaacatggtgctactcttgctgtcattgattctgaaaaggacatgaactttctaaaacgatacgcaggtagagaggaacactgggttggactgaaaaaggaacctggtcacccatggaagtggtcaaatggcaaagaatttaacaactggttcaacgttacagggtctgacaagtgtgtttttctgaaaaacacagaggtcagcagcatggaatgtgagaagaatttatactggatatgtaacaaaccttacaaataataaggaaacatgttcacttattgactattatagaatggaactcaaggaaatctgtgtcagtggatgctgctctgtggtccgaagtcttccatagagactttgtgaaaaaaaattttatagtgtcttgggaattttcttccaaacagaactatggaaaaaaaggaagaaattccaggaaaatctgcactgtgggcttttattgccatgagctagaagcatcacaggttgaccaataaccatgcccaagaatgagaagaatgactatgcaacctttggatgcactttatattattttgaatccagaaataatgaaataactaggcgtggacttactatttattgctgaatgactaccaacagtgagagcccttcatgcatttgcactactggaaggagttagatgttggtactagatactgaatgtaaacaaaggaattatggctggtaacataggtttttagtctaattgaatcccttaaactcagggagcatttataaatggacaaatgcttatgaaactaagatttgtaatatttctctctttttagagaaatttgccaatttactttgttatttttccccaaaaagaatgggatgatcgtgtatttatttttttacttcctcagctgtagacaggtccttttcgatggtacatatttctttgcctttataatcttttatacagtgtcttacagagaaaagacataagcaaagactatgaggaatatttgcaagacatagaatagtgttggaaaatgtgcaatatgtgatgtggcaaatctctattaggaaatattctgtaatcttcagacctagaataatactagtcttataataggtttgtgactttcctaaatcaattctattacgtgcaatacttcaatacttcatttaaaatatttttatgtgcaataaaatgtatttgtttgtattttgtgttcagtacaattataagctgtttttatatatgtgaaataaaagtagaataaacacaaaaaaaaaaaaaaaaaaaaaaaaaaaa

SEQ ID NO: 837 - protein, 199 aa, Homo sapien
MSSENCFVAENSSLHPESGQENDATSPHFSTRHEGSFQVPVLCAVMNVVFITILIIALIALSVGQYNCPGQYTFSMPSDSHVSSCSEDWVGYQRKCYFISTVKRSWTSAQNACSEHGATLAVIDSEKDMNFLKRYAGREEHWVGLKKEPGHPWKWSNGKEFNNWFNVTGSDKCVFLKNTEVSSMECEKNLYWICNKPYK

SEQ ID NO: 838 - DNA, 1027 bp, Homo sapien
gggcaagagttgggcaaaaaaatcaaggtatttggtcccggaacaaagcttatcattacagataaacaacttgatgcagatgtttcccccaagcccactatttttcttccttcaattgctgaaacaaagctccagaaggctggaacatacctttgtcttcttgagaaatttttccctgatgttattaagatacattggcaagaaaagaagagcaacacgattctgggatcccaggaggggaacaccatgaagactaacgacacatacatgaaatttagctggttaacggtgccagaaaagtcactggacaaagaacacagatgtatcgtcagacatgagaataataaaaacggagttgatcaagaaattatctttcctccaataaagacggatgtcatcacaatggatcccaaagacaattgttcaaaagatgcaaatgatacactactgctgcagctcacaaacacctctgcatattacatgtacctcctcctgctcctcaagagtgtggtctattttgccatcatcacctgctgtctgcttagaagaacggctttctgctgcaatggagagaaatcataacagacggtggcacaaggaggccatcttttcctcatcggttattgtccctagaagcgtcttctgaggatctagttgggctttctttctgggtttgggccatttcagttctcatgtgtgtactattctatcattattgtataacggttttcaaaccagtgggcacacagagaacctcactctgtaataacaatgaggaatagccacggcgatctccagcaccaatctctccatgttttccacagctcctccagccaacccaaatagcgcctgctatagtgtagacatcctgcggcttctagccttgtccctctcttagtgttctttaatcagataactgcctggaagcctttcattttacacgccctgaagcagtcttctttgctagttgaattatgtggtgtgtttttccgtaataagcaaaataaatttaaaaaaatgaaaagtt

SEQ ID NO: 839 - protein, 58 aa, Homo sapien
MQMFPPSPLFFFLQLLKQSSRRLEHTFVFLRNFSLMLLRYIGKKRRATRFWDPRRGTP

SEQ ID NO: 840 - DNA, 1284 bp, Homo sapien
ggctccttcgggaaacccagccccgtcaccgggctccgagcggctcgcaggcgagcgacagcggcctcagccccggcagcgcccagcggcggctgcggaaagcggagggagtccgacgcgggcgcgggcggggagcgtgcgtccgttcgcacaggcagcgggaggaggggcggcgcgaaccatggccggggacagcgagcagaccctgcagaaccaccagcagcccaacggcggcgagcccttccttataggcgtcagcgggggaacagctagcggcaagtcttccgtgtgtgctaagatcgtgcagctcctggggcagaatgaggtggactatcgccagaagcaggtggtcatcctgagccaggatagcttctaccgtgtccttacctcggagcagaaggccaaagccctgaagggccagttcaactttgaccacccggatgcctttgacaatgaactcattctcaaaacactcaaagaaatcactgaagggaaaacagtccagatccccgtgtatgactttgtctcccattcccggaaggaggagacagttactgtctatcccgcagacgtggtgctctttgaagggatcctggccttctactcccaggaggtacgagacctgttccagatgaagctttttgtggatacagatgcggacacccggctctcacgcagagtattaagggacatcagcgagagaggcagggatcttgagcagattttatctcagtacattacgttcgtcaagcctgcctttgaggaattctgcttgccaacaaagaagtatgctgatgtgatcatccctagaggtgcagataatctggtggccatcaacctcatcgtgcagcacatccaggacatcctgaatggagggccctccaaacggcagaccaatggctgtctcaacggctacaccccttcacgcaagaggcaggcatcggagtccagcagcaggccgcattgacccgtctccatcggaccccagcccctatctccaagagacagaggaggggtcaggaggcactgctcatctgtacatactgtttcctatgacattactgtatttaagaaaacaccatggagatgaaatgcctttgattttttttttctttttgtactttggaacgacaaaatgaaacagaacttgaccctgagcttaaataacaaaactgtgccaactactactggtgatgcctaattatgaatccaacgtgtaaccagttataaatacatatatatataaaaaaaaaaaaaaaaaaaaaaaaaaaaaaaaaaaaaaaa

SEQ ID NO: 841 - protein, 261 aa, Homo sapien
MAGDSEQTLQNHQQPNGGEPFLIGVSGGTASGKSSVCAKIVQLLGQNEVDYRQKQVVILSQDSFYRVLTSEQKAKALKGQFNFDHPDAFDNELILKTLKEITEGKTVQIPVYDFVSHSRKEETVTVYPADVVLFEGILAFYSQEVRDLFQMKLFVDTDADTRLSRRVLRDISERGRDLEQILSQYITFVKPAFEEFCLPTKKYADVIIPRGADNLVAINLIVQHIQDILNGGPSKRQTNGCLNGYTPSRKRQASESSSRPH

SEQ ID NO: 842 - DNA, 3175 bp, Homo sapien
tgcttaaaaaaacacaacaggattttcgaagaatcctttcttagaaaacaaacaaaaaaaccaaacaaaaacgtactttctccccactagtttacaccacaggaagcgagagagctgctgccactgctgctaccacaggaagacacagcagggagaagccctagtgcctctgccggctgcccaggacctggtatcggcccacagaccaagtcctccacagagggcgagccagggtggagaagagccagcccagtgacccaaacatccccgataaaacacccactgcttaagaggcaggctcggatggactatagctttgataccacagccgaagacccttgggttaggatttctgactgcatcaaaaacttatttagccccatcatgagtgagaaccatggccacatgcctctacagcccaatgccagcctgaatgaagaagaagggacacagggccacccagatgggaccccaccaaagctggacaccgccaatggcactcccaaagtttacaagtcagcagacagcagcactgtgaagaaaggtcctcctgtggctcccaagccagcctggtttcgccaaagcttgaaaggtttgaggaatcgtgcttcagagccaagagggctccctgatcctgccttgtccacccagccagcacctgcttccagggagcacctaggatcacacatccgggcctcctcctcctcctcctccatcaggcagagaatcagctcctttgaaacctttggctcctctcaactgcctgacaaaggagcccagagactgagcctccagccctcctctggggaggcagcaaaacctcttgggaagcatgaggaaggacggttttctggactcttggggcgaggggctgcacccactcttgtgccccagcagcctgagcaagtactgtcctcggggtcccctgcagcctccgaggccagagacccaggtgtgtctgagtcccctcccccagggcggcagcccaatcagaaaactttcccccctggcccggacccgctcctaaggctgctgtcaacacaggctgaggaatctcaaggcccagtgctcaagatgcctagccagcgagcacggagcttccccctgaccaggtcccagtcctgtgagacgaagctacttgacgaaaagaccagcaaactctattctatcagcagccaagtgtcatcggctgtcatgaaatccttgctgtgccttccatcttctatctcctgtgcccagactccctgcatccccaaggcaggggcatctccaacatcatcatccaacgaagactcagctgcaaatggttctgctgaaacatctgccttggacacggggttctcgctcaacctttcagagctgagagaatatacagagggtctcacggaagccaaggaagacgatgatggggaccacagttcccttcagtctggtcagtccgttatctccctgctgagctcagaagaattaaaaaaactcatcgaggaggtgaaggttctggatgaagcaacattaaagcaattagacggcatccatgtcaccatcttacacaaggaggaaggtgctggtcttgggttcagcttggcaggaggagcagatctagaaaacaaggtgattacggttcacagagtgtttccaaatgggctggcctcccaggaagggactattcagaagggcaatgaggttctttccatcaacggcaagtctctcaaggggaccacgcaccatgatgccttggccatcctccgccaagctcgagagcccaggcaagctgtgattgtcacaaggaagctgactccagaggccatgcccgacctcaactcctccactgactctgcagcctcagcctctgcagccagtgatgtttctgtagaatctacagcagaggccacagtctgcacggtgacactggagaagatgtcggcagggctgggcttcagcctggaaggagggaagggctccctacacggagacaagcctctcaccattaacaggattttcaaaggagcagcctcagaacaaagtgagacagtccagcctggagatgaaatcttgcagctgggtggcactgccatgcagggcctcacacggtttgaagcctggaacatcatcaaggcactgcctgatggacctgtcacgattgtcatcaggagaaaaagcctccagtccaaggaaaccacagctgctggagactcctaggcaggacatgctgaagccaaagccaataacacacagctaacacacagctcccataaccgctgattctcagggtctctgctgccgccccacccagatgggggaaagcacaggtgggcttcccagtggctgctgcccaggcccagaccttctaggacgccacccagcaaaaggttgttcctaaaataagggcagagtcacactggggcagctgatacaaattgcagactgtgtaaaaagagagcttaatgataatattgtggtgccacaaataaaatggatttattagaattccatatgacattcatgcctggcttcgcaaaatgtttcaagtactgtaactgtgtcatgattcacccccaaacagtgacatttatttttctcatgaatctgcaatgtgggcagagattggaatgggcagctcatctctgtcccacttggcatcagctggcgtcatgcaaagtcatgcaaaggctgggaccacctgagatcattcactcatacatctggccgttgatgttggctgggaactcacctggggctgctggcctgaatgcttataggtggcctctccttgtggcctgggctcctcacaacatggtgtctggattcccaggatgagcatcccaggatcgcaagagccacgtagaagctgcatcttgtttatacctttgccttggaagttgcatggcatcacctccaccatactccatcagttagagctgacacaaacctgcctgggtttaaggggagaggaaatattgctggggtcatttatgaaaaatacagtttgtcacatgaaacatttgcaaaattgtttttggttggattggagaagtaatcctagggaagggtggtggagccagtaaatagaggagtacaggtgaagcaccaagctcaaagcgtggacaggtgtgccgacagaaggaaccagcgtgtatatgagggtatcaaataaaattgctactacttacctacc

SEQ ID NO: 843 - protein, 631 aa, Homo sapien [sequence omitted]

SEQ ID NO: 844 - DNA, 3175 bp, Homo sapien; identical to SEQ ID NO: 842

SEQ ID NO: 845 - protein, 631 aa, Homo sapien [sequence omitted]

SEQ ID NO: 846 - DNA, 553 bp, Homo sapien
aagcagtggtaacaacgcagagtacgcgggaagcagtggtaacaacgcagagtacgcgggaagcagtggtaacaacgcagagtacgcgggaagcagtggtaacaacgcagagtacgcggaaagcagtggtaacaacgcagagtacgcggggccagcggaagtggctcctgtaaggcagcaaggtagcgtggccggcgcccgagctggggttgtgtccctgctgggctgccgttccagctggactgccgccatggaactcagcgccgaatacctccgcgagaagctgcagcgggacctggaggcggagcatgtggaggtggaggacacgaccctcaaccgttgctcctgtagcttccgagtcctggtggtgtcggccaagttcgaggggaaaccgctgcttcagagacacaggctggtgaacgcgtgcctagcagaagagctcccgcacatccatgcctttgaacagaaaaccctgaccccagaccagtgggcacgtgagcgacagaaatgagggactgggatctgcacagccattaaattataaatctggacg

SEQ ID NO: 847 - protein, 86 aa, Homo sapien
MELSAEYLREKLQRDLEAEHVEVEDTTLNRCSCSFRVLVVSAKFEGKPLLQRHRLVNACLAEELPHIHAFEQKTLTPDQWARERQK

SEQ ID NO: 848 - DNA, 2961 bp, Homo sapien
acatactccaccttcaaaaagtacatcaatattatatcattaaggaaatagtaaccttctcttctccaatatgcatgacatttttggacaatgcaattgtggcactggcacttatttcagtgaagaaaaactttgtggttctatggcattcatcatttgacaaatgcaagcatcttccttatcaatcagctcctattgaacttactagcactgactgtggaatccttaagggcccattacatttctgaagaagaaagctaagatgaaggacatgccactccgaattcatgtgctacttggcctagctatcactacactagtacaagctgtagataaaaaagtggattgtccacggttatgtacgtgtgaaatcaggccttggtttacacccagatccatttatatggaagcatctacagtggattgtaatgatttaggtcttttaactttcccagccagattgccagctaacacacagattcttctcctacagactaacaatattgcaaaaattgaatactccacagactttccagtaaaccttactggcctggatttatctcaaaacaatttatcttcagtcaccaatattaatgtaaaaaagatgcctcagctcctttctgtgtacctagaggaaaacaaacttactgaactgcctgaaaaatgtctgtccgaactgagcaacttacaagaactctatattaatcacaacttgctttctacaatttcacctggagcctttattggcctacataatcttcttcgacttcatctcaattcaaatagattgcagatgatcaacagtaagtggtttgatgctcttccaaatctagagattctgatgattggggaaaatccaattatcagaatcaaagacatgaactttaagcctcttatcaatcttcgcagcctggttatagctggtataaacctcacagaaataccagataacgccttggttggactggaaaacttagaaagcatctctttttacgataacaggcttattaaagtaccccatgttgctcttcaaaaagttgtaaatctcaaatttttggatctaaataaaaatcctattaatagaatacgaaggggtgattttagcaatatgctacacttaaaagagttggggataaataatatgcctgagctgatttccatcgatagtcttgctgtggataacctgccagatttaagaaaaatagaagctactaacaaccctagattgtcttacattcaccccaatgcatttttcagactccccaagctggaatcactcatgctgaacagcaatgctctcagtgccctgtaccatggtaccattgagtctctgccaaacctcaaggaaatcagcatacacagtaaccccatcaggtgtgactgtgtcatccgttggatgaacatgaacaaaaccaacattcgattcatggagccagattcactgttttgcgtggacccacctgaattccaaggtcagaatgttcggcaagtgcatttcagggacatgatggaaatttgtctccctcttatagctcctgagagctttccttctaatctaaatgtagaagctgggagctatgtttcctttcactgtagagctactgcagaaccacagcctgaaatctactggataacaccttctggtcaaaaactcttgcctaataccctgacagacaagttctatgtccattctgagggaacactagatataaatggcgtaactcccaaagaagggggtttatatacttgtatagcaactaacctagttggcgctgacttgaagtctgttatgatcaaagtggatggatcttttccacaagataacaatggctctttgaatattaaaataagagatattcaggccaattcagttttggtgtcctggaaagcaagttctaaaattctcaaatctagtgttaaatggacagcctttgtcaagactgaaaattctcatgctgcgcaaagtgctcgaataccatctgatgtcaaggtatataatcttactcatctgaatccatcaactgagtataaaatttgtattgatattcccaccatctatcagaaaaacagaaaaaaatgtgtaaatgtcaccaccaaaggtttgcaccctgatcaaaaagagtatgaaaagaataataccacaacacttatggcctgtcttggaggccttctggggattattggtgtgatatgtcttatcagctgcctctctccagaaatgaactgtgatggtggacacagctatgtgaggaattacttacagaaaccaacctttgcattaggtgagctttatcctcctctgataaatctctgggaagcaggaaaagaaaaaagtacatcactgaaagtaaaagcaactgttataggtttaccaacaaatatgtcctaaaaaccaccaaggaaacctactccaaaaatgaacaaaaaaaaaaaaaagcgaaagactgcagttgtgctaaaaacaaaacaaaacaaacaaacaaacaaaaaagtaaaaaaagattactttcgagagagaagtttaagcttcaccaatgctgctcctgaccaatggaaatatgtacaacttcagcattttaagtaactggcttcaaggggtactgtggcaaccaaataaaataactccattttctaaaactttcatgtaacttttatgtctggactacagttcaagtggacaaaaacatttctgtattttttttaagtaaataagagtagttgaactgagcaatacctcctcctgtgttgtattacacatattagccacgagtttttgcagtgaccagataaacttgaattgacacgtggtgtaataaaatggacaaattctgtagagtagacacagtgagtatgtggacctcttttataaggaaaaatacattttggattaaaatcaattgcttctgtcttgttttgtttctaaataaagaataatttctgggaaaaaaaaaaaaaaaaaaa

SEQ ID NO: 849 - protein, 708 aa, Homo sapien
MKDMPLRIHVLLGLAITTLVQAVDKKVDCPRLCTCEIRPWFTPRSIYMEASTVDCNDLGLLTFPARLPANTQILLLQTNNIAKIEYSTDFPVNLTGLDLSQNNLSSVTNINVKKMPQLLSVYLEENKLTELPEKCLSELSNLQELYINHNLLSTISPGAFIGLHNLLRLHLNSNRLQMINSKWFDALPNLEILMIGENPIIRIKDMNFKPLINLRSLVIAGINLTEIPDNALVGLENLESISFYDNRLIKVPHVALQKVVNLKFLDLNKNPINRIRRGDFSNMLHLKELGINNMPELISIDSLAVDNLPDLRKIEATNNPRLSYIHPNAFFRLPKLESLMLNSNALSALYHGTIESLPNLKEISIHSNPIRCDCVIRWMNMNKTNIRFMEPDSLFCVDPPEFQGQNVRQVHFRDMMEICLPLIAPESFPSNLNVEAGSYVSFHCRATAEPQPEIYWITPSGQKLLPNTLTDKFYVHSEGTLDINGVTPKEGGLYTCIATNLVGADLKSVMIKVDGSFPQDNNGSLNIKIRDIQANSVLVSWKASSKILKSSVKWTAFVKTENSHAAQSARIPSDVKVYNLTHLNPSTEYKICIDIPTIYQKNRKKCVNVTTKGLHPDQKEYEKNNTTTLMACLGGLLGIIGVICLISCLSPEMNCDGGHSYVRNYLQKPTFALGELYPPLINLWEAGKEKSTSLKVKATVIGLPTNMS

SEQ ID NO: 850 - DNA, 2041 bp, Homo sapien
gccacttcttctgggcccacgaggcagctgtcccatgctctgctgagcacggtggtgccatgcctctgcaactcctcctgttgctgatcctactgggccctggcaacagcttgcagctgtgggacacctgggcagatgaagccgagaaagccttgggtcccctgcttgcccgggaccggagacaggccaccgaatatgagtacctagattatgatttcctgccagaaacggagcctccagaaatgctgaggaacagcactgacaccactcctctgactgggcctggaacccctgagtctaccactgtggagcctgctgcaaggcgttctactggcctggatgcaggaggggcagtcacagagctgaccacggagctggccaacatggggaacctgtccacggattcagcagctatggagatacagaccactcaaccagcagccacggaggcacagaccactccactggcagccacagaggcacagacaactcgactgacggccacggaggcacagaccactccactggcagccacagaggcacagaccactccaccagcagccacggaagcacagaccactcaacccacaggcctggaggcacagaccactgcaccagcagccatggaggcacagaccactgcaccagcagccatggaagcacagaccactccaccagcagccatggaggcacagaccactcaaaccacagccatggaggcacagaccactgcaccagaagccacggaggcacagaccactcaacccacagccacggaggcacagaccactccactggcagccatggaggccctgtccacagaacccagtgccacagaggccctgtccatggaacctactaccaaaagaggtctgttcatacccttttctgtgtcctctgttactcacaagggcattcccatggcagccagcaatttgtccgtcaactacccagtgggggccccagaccacatctctgtgaagcagtgcctgctggccatcctaatcttggcgctggtggccactatcttcttcgtgtgcactgtggtgctggcggtccgcctctcccgcaagggccacatgtaccccgtgcgtaattactcccccaccgagatggtctgcatctcatccctgttgcctgatgggggtgaggggccctctgccacagccaatgggggcctgtccaaggccaagagcccgggcctgacgccagagcccagggaggaccgtgagggggatgacctcaccctgcacagcttcctcccttagctcactctgccatctgttttggcaagaccccacctccacgggctctcctgggccacccctgagtgcccagaccccaatccacagctctgggcttcctcggagacccctggggatggggatcttcagggaaggaactctggccacccaaacaggacaagagcagcctggggccaagcagacgggcaagtggagccacctctttcctccctccgcggatgaagcccagccacatttcagccgaggtccaaggcaggaggccatttacttgagacagattctctcctttttcctgtcccccatcttctctgggtccctctaacatctcccatggctctccccgcttctcctggtcactggagtctcctccccatgtacccaaggaagatggagctcccccatcccacacgcactgcactgccattgtcttttggttgccatggtcaccaaacaggaagtggacattctaagggaggagtactgaagagtgacggacttctgaggctgtttcctgctgctcctctgacttggggcagcttgggtcttcttgggcacctctctgggaaaacccagggtgaggttcagcctgtgagggctgggatgggtttcgtgggcccaaagggcagacctttctttgggactgtgtggaccaaggagcttccatctagtgacaagtgacccccagctatcgcctcttgccttcccctgtggccactttccagggtggactctgtcttgttcactgcagtatcccaactgcaggtccagtgcaggca

SEQ ID NO: 851 - protein, 402 aa, Homo sapien
MPLQLLLLLILLGPGNSLQLWDTWADEAEKALGPLLARDRRQATEYEYLDYDFLPETEPPEMLRNSTDTTPLTGPGTPESTTVEPAARRSTGLDAGGAVTELTTELANMGNLSTDSAAMEIQTTQPAATEAQTTPLAATEAQTTRLTATEAQTTPLAATEAQTTPPAATEAQTTQPTGLEAQTTAPAAMEAQTTAPAAMEAQTTPPAAMEAQTTQTTAMEAQTTAPEATEAQTTQPTATEAQTTPLAAMEALSTEPSATEALSMEPTTKRGLFIPFSVSSVTHKGIPMAASNLSVNYPVGAPDHISVKQCLLAILILALVATIFFVCTVVLAVRLSRKGHMYPVRNYSPTEMVCISSLLPDGGEGPSATANGGLSKAKSPGLTPEPREDREGDDLTLHSFLP

SEQ ID NO: 852 - DNA, 2243 bp, Homo sapien
ggacgtcgaggcattacaatcgcgaaaccaagccatagcatgaaacagcgagcttgcagcctcaccgacgagtctcaactaaaagggactcccggagctaggggtggggactcggcctcacacagtgagtgccggctattggacttttgtccagtgacagctgagacaacaaggaccacgggaggaggtgtaggagagaagcgccgcgaacagcgatcgcccagcaccaagtccgcttccaggctttcggtttctttgcctccatcttgggtgcgccttcccggcgtctaggggagcgaaggctgaggtggcagcggcaggagagtccggccgcgacaggacgaactcccccactggaaaggattctgaaagaaatgaagtcagccctcagaaatgaagttgactgcctgctggctttcctgttgactggcccggagctgtactgcaagacccttgtgagcttccctagtctaagagtaggatgtctgctgaagtcatccatcaggttgaagaagcacttgatacagatgagaaggagatgctgctctttttgtgccgggatgttgctatagatgtggttccacctaatgtcagggaccttctggatattttacgggaaagaggtaagctgtctgtcggggacttggctgaactgctctacagagtgaggcgatttgacctgctcaaacgtatcttgaagatggacagaaaagctgtggagacccacctgctcaggaaccctcaccttgtttcggactatagagtgctgatggcagagattggtgaggatttggataaatctgatgtgtcctcattaattttcctcatgaaggattacatgggccgaggcaagataagcaaggagaagagtttcttggaccttgtggttgagttggagaaactaaatttggttgccccagatcaactggatttattagaaaaatgcctaaagaacatccacagaatagacctgaagacaaaaatccagaagtacaagcagtctgttcaaggagcagggacaagttacaggaatgttctccaagcagcaatccaaaagagtctcaaggatccttcaaataacttcaggctccataatgggagaagtaaagaacaaagacttaaggaacagcttggcgctcaacaagaaccagtgaagaaatccattcaggaatcagaagcttttttgcctcagagcatacctgaagagagatacaagatgaagagcaagcccctaggaatctgcctgataatcgattgcattggcaatgagacagagcttcttcgagacaccttcacttccctgggctatgaagtccagaaattcttgcatctcagtatgcatggtatatcccagattcttggccaatttgcctgtatgcccgagcaccgagactacgacagctttgtgtgtgtcctggtgagccgaggaggctcccagagtgtgtatggtgtggatcagactcactcagggctccccctgcatcacatcaggaggatgttcatgggagattcatgcccttatctagcagggaagccaaagatgttttttattcagaactatgtggtgtcagagggccagctggagaacagcagcctcttggaggtggatgggccagcgatgaagaatgtggaattcaaggctcagaagcgagggctgtgcacagttcaccgagaagctgacttcttctggagcctgtgtactgcggacatgtccctgctggagcagtctcacagctcaccgtccctgtacctgcagtgcctctcccagaaactgagacaagaaagaaaacgcccactcctggatcttcacattgaactcaatggctacatgtatgattggaacagcagagtttctgccaaggagaaatattatgtctggctgcagcacactctgagaaagaaacttatcctctcctacacataagaaaccaaaaggctgggcgtagtggctcacacctgtaatcccagcactttgggaggccaaggagggcagatcacttcaggtcaggagttcgagaccagcctggccaacatggtaaacgctgtccctagtaaaaatgcaaaaattagctgggtgtgggtgtgggtacctgtgttcccagttacttgggaggctgaggtgggaggatcttttgaacccaggagttcagggtcatagcatgctgtgattgtgcctacgaatagccactgcataccaacctgggcaatatagcaagatcccatctctttaaaaaaaaaaaaaa

SEQ ID NO: 853 - protein, 480 aa, Homo sapien
MSAEVIHQVEEALDTDEKEMLLFLCRDVAIDVVPPNVRDLLDILRERGKLSVGDLAELLYRVRRFDLLKRILKMDRKAVETHLLRNPHLVSDYRVLMAEIGEDLDKSDVSSLIFLMKDYMGRGKISKEKSFLDLVVELEKLNLVAPDQLDLLEKCLKNIHRIDLKTKIQKYKQSVQGAGTSYRNVLQAAIQKSLKDPSNNFRLHNGRSKEQRLKEQLGAQQEPVKKSIQESEAFLPQSIPEERYKMKSKPLGICLIIDCIGNETELLRDTFTSLGYEVQKFLHLSMHGISQILGQFACMPEHRDYDSFVCVLVSRGGSQSVYGVDQTHSGLPLHHIRRMFMGDSCPYLAGKPKMFFIQNYVVSEGQLENSSLLEVDGPAMKNVEFKAQKRGLCTVHREADFFWSLCTADMSLLEQSHSSPSLYLQCLSQKLRQERKRPLLDLHIELNGYMYDWNSRVSAKEKYYVWLQHTLRKKLILSYT

SEQ ID NO: 854 - DNA, 1626 bp, Homo sapien
ggcacgaggccgccacccgagccggagcgggctgggccgccaaggcaagatggtggactacagcgtgtgggaccacattgaggtgtctgatgatgaagacgagacgcaccccaacatcgacacggccagtctcttccgctggcggcatcaggcccgggtggaacgcatggagcagttccagaaggagaaggaggaactggacaggggctgccgcgagtgcaagcgcaaggtggccgagtgccagaggaaactgaaggagctggaggtggccgagggcggcaaggcagagctggagcgcctgcaggccgaggcacagcagctgcgcaaggaggagcggagctgggagcagaagctggaggagatgcgcaagaaggagaagagcatgccctggaacgtggacacgctcagcaaagacggcttcagcaagagcatggtaaataccaagcccgagaagacggaggaggactcagaggaggtgagggagcagaaacacaagaccttcgtggaaaaatacgagaaacagatcaagcactttggcatgcttcgccgctgggatgacagccaaaagtacctgtcagacaacgtccacctggtgtgcgaggagacagccaattacctggtcatttggtgcattgacctagaggtggaggagaaatgtgcactcatggagcaggtggcccaccagacaatcgtcatgcaatttatcctggagctggccaagagcctaaaggtggacccccgggcctgcttccggcagttcttcactaagattaagacagccgatcgccagtacatggagggcttcaacgacgagctggaagccttcaaggagcgtgtgcggggccgtgccaagctgcgcatcgagaaggccatgaaggagtacgaggaggaggagcgcaagaagcggctcggccccggcggcctggaccccgtcgaggtctacgagtccctccctgaggaactccagaagtgcttcgatgtgaaggacgtgcagatgctgcaggacgccatcagcaagatggaccccaccgacgcaaagtaccacatgcagcgctgcattgactctggcctctgggtccccaactctaaggccagcgaggccaaggagggagaggaggcaggtcctggggacccattactggaagctgttcccaagacgggcgatgagaaggatgtcagtgtgtgacctgccccagctaccaccgccacctgcttccaggcccctatgtgccccttttcagaaaacagatagatgccatctcgcccgctcctgacttcctctacttgcgctgctcggcccagcctggggggcccgcccagccctccctggcctctccactgtctccactctccagcgcccattcaagtctctgctttgagtcaaggggcttcactgcctgcagccccccatcagcattatgccaaaggcccgggggtccggggaagggcagaggtcaccaggctggtctaccaggtagttggggagggtccccagccaaggggccggctctcgtcactgggctctgttttcactgttcgtctgctgtctgtgtcttctatttggcaaacagcaatgatcttccaataaaagatttcagatgctcaaaaaaaaaaaaaaaaaaaaaa

SEQ ID NO: 855 - protein, 378 aa, Homo sapien
MVDYSVWDHIEVSDDEDETHPNIDTASLFRWRHQARVERMEQFQKEKEELDRGCRECKRKVAECQRKLKELEVAEGGKAELERLQAEAQQLRKEERSWEQKLEEMRKKEKSMPWNVDTLSKDGFSKSMVNTKPEKTEEDSEEVREQKHKTFVEKYEKQIKHFGMLRRWDDSQKYLSDNVHLVCEETANYLVIWCIDLEVEEKCALMEQVAHQTIVMQFILELAKSLKVDPRACFRQFFTKIKTADRQYMEGFNDELEAFKERVRGRAKLRIEKAMKEYEEEERKKRLGPGGLDPVEVYESLPEELQKCFDVKDVQMLQDAISKMDPTDAKYHMQRCIDSGLWVPNSKASEAKEGEEAGPGDPLLEAVPKTGDEKDVSV

SEQ ID NO: 856 - DNA, 421 bp, Homo sapien
tttttgcaaccaacatggttctattaaaaactctctttgactatggcattcaaggacagcaatacaatcttttttttttttaacaaagcaactaatataaaaatctgcaaatgccatatattcatatctaggctattcttctcatataggcatgtcattagatagactttctttctattctttcctgaggtatttttttgtggtttacttttattgtactgctggatgcattatttttgatcatcctttcctaaaatgatttaaagacctgcaaataattttattgcataggacactattgatgacacatagaatgggagctgcaagtatgtggcattggaacaagccttacaaatattgcattttaagaatacacacattttttacagtttgtctcttttaaaaaatttgaagttatagc

SEQ ID NO: 857 - DNA, 4643 bp, Homo sapien
cctactctattcagatattctccagattcctaaagattagagatcatttctcattctcctaggagtactcacttcaggaagcaaccagataaaagagaggtgcaacggaagccagaacattcctcctggaaattcaacctgtttcgcagtttctcgaggaatcagcattcagtcaatccgggccgggagcagtcatctgtggtgaggctgattggctgggcaggaacagcgccggggcgtgggctgagcacagcgcttcgctctctttgccacaggaagcctgagctcattcgagtagcggctcttccaagctcaaagaagcagaggccgctgttcgtttcctttaggtctttccactaaagtcggagtatcttcttccaagatttcacgtcttggtggccgttccaaggagcgcgaggtcgggatggatcttgaaggggaccgcaatggaggagcaaagaagaagaacttttttaaactgaacaataaaagtgaaaaagataagaaggaaaagaaaccaactgtcagtgtattttcaatgtttcgctattcaaattggcttgacaagttgtatatggtggtgggaactttggctgccatcatccatggggctggacttcctctcatgatgctggtgtttggagaaatgacagatatctttgcaaatgcaggaaatttagaagatctgatgtcaaacatcactaatagaagtgatatcaatgatacagggttcttcatgaatctggaggaagacatgaccaggtatgcctattattacagtggaattggtgctggggtgctggttgctgcttacattcaggtttcattttggtgcctggcagctggaagacaaatacacaaaattagaaaacagttttttcatgctataatgcgacaggagataggctggtttgatgtgcacgatgttggggagcttaacacccgacttacagatgatgtctccaagattaatgaaggaattggtgacaaaattggaatgttctttcagtcaatggcaacatttttcactgggtttatagtaggatttacacgtggttggaagctaacccttgtgattttggccatcagtcctgttcttggactgtcagctgctgtctgggcaaagatactatcttcatttactgataaagaactcttagcgtatgcaaaagctggagcagtagctgaagaggtcttggcagcaattagaactgtgattgcatttggaggacaaaagaaagaacttgaaaggtacaacaaaaatttagaagaagctaaaagaattgggataaagaaagctattacagccaatatttctataggtgctgctttcctgctgatctatgcatcttatgctctggccttctggtatgggaccaccttggtcctctcaggggaatattctattggacaagtactcactgtattttctgtattaattggggcttttagtgttggacaggcatctccaagcattgaagcatttgcaaatgcaagaggagcagcttatgaaatcttcaagataattgataataagccaagtattgacagctattcgaagagtgggcacaaaccagataatattaagggaaatttggaattcagaaatgttcacttcagttacccatctcgaaaagaagttaagatcttgaagggtctgaacctgaaggtgcagagtgggcagacggtggccctggttggaaacagtggctgtgggaagagcacaacagtccagctgatgcagaggctctatgaccccacagaggggatggtcagtgttgatggacaggatattaggaccataaatgtaaggtttctacgggaaatcattggtgtggtgagtcaggaacctgtattgtttgccaccacgatagctgaaaacattcgctatggccgtgaaaatgtcaccatggatgagattgagaaagctgtcaaggaagccaatgcctatgactttatcatgaaactgcctcataaatttgacaccctggttggagagagaggggcccagttgagtggtgggcagaagcagaggatcgccattgcacgtgccctggttcgcaaccccaagatcctcctgctggatgaggccacgtcagccttggacacagaaagcgaagcagtggttcaggtggctctggataaggccagaaaaggtcggaccaccattgtgatagctcatcgtttgtctacagttcgtaatgctgacgtcatcgctggtttcgatgatggagtcattgtggagaaaggaaatcatgatgaactcatgaaagagaaaggcatttacttcaaacttgtcacaatgcagacagcaggaaatgaagttgaattagaaaatgcagctgatgaatccaaaagtgaaattgatgccttggaaatgtcttcaaatgattcaagatccagtctaataagaaaaagatcaactcgtaggagtgtccgtggatcacaagcccaagacagaaagcttagtaccaaagaggctctggatgaaagtatacctccagtttccttttggaggattatgaagctaaatttaactgaatggccttattttgttgttggtgtattttgtgccattataaatggaggcctgcaaccagcatttgcaataatattttcaaagattataggggtttttacaagaattgatgatcctgaaacaaaacgacagaatagtaacttgttttcactattgtttctagcccttggaattatttcttttattacatttttccttcagggtttcacatttggcaaagctggagagatcctcaccaagcggctccgatacatggttttccgatccatgctcagacaggatgtgagttggtttgatgaccctaaaaacaccactggagcattgactaccaggctcgccaatgatgctgctcaagttaaaggggctataggttccaggcttgctgtaattacccagaatatagcaaatcttgggacaggaataattatatccttcatctatggttggcaactaacactgttactcttagcaattgtacccatcattgcaatagcaggagttgttgaaatgaaaatgttgtctggacaagcactgaaagataagaaagaactagaaggtgctgggaagatcgctactgaagcaatagaaaacttccgaaccgttgtttctttgactcaggagcagaagtttgaacatatgtatgctcagagtttgcaggtaccatacagaaactctttgaggaaagcacacatctttggaattacattttccttcacccaggcaatgatgtatttttcctatgctggatgtttccggtttggagcctacttggtggcacataaactcatgagctttgaggatgttctgttagtattttcagctgttgtctttggtgccatggccgtggggcaagtcagttcatttgctcctgactatgccaaagccaaaatatcagcagcccacatcatcatgatcattgaaaaaacccctttgattgacagctacagcacggaaggcctaatgccgaacacattggaaggaaatgtcacatttggtgaagttgtattcaactatcccacccgaccggacatcccagtgcttcagggactgagcctggaggtgaagaagggccagacgctggctctggtgggcagcagtggctgtgggaagagcacagtggtccagctcctggagcggttctacgaccccttggcagggaaagtgctgcttgatggcaaagaaataaagcgactgaatgttcagtggctccgagcacacctgggcatcgtgtcccaggagcccatcctgtttgactgcagcattgctgagaacattgcctatggagacaacagccgggtggtgtcacaggaagagattgtgagggcagcaaaggaggccaacatacatgccttcatcgagtcactgcctaataaatatagcactaaagtaggagacaaaggaactcagctctctggtggccagaaacaacgcattgccatagctcgtgcccttgttagacagcctcatattttgcttttggatgaagccacgtcagctctggatacagaaagtgaaaaggttgtccaagaagccctggacaaagccagagaaggccgcacctgcattgtgattgctcaccgcctgtccaccatccagaatgcagacttaatagtggtgtttcagaatggcagagtcaaggagcatggcacgcatcagcagctgctggcacagaaaggcatctatttttcaatggtcagtgtccaggctggaacaaagcgccagtgaactctgactgtatgagatgttaaatactttttaatatttgtttagatatgacatttattcaaagttaaaagcaaacacttacagaattatgaagaggtatctgtttaacatttcctcagtcaagttcagagtcttcagagacttcgtaattaaaggaacagagtgagagacatcatcaagtggagagaaatcatagtttaaactgcattataaattttataacagaattaaagtagattttaaaagataaaatgtgtaattttgtttatattttcccatttggactgtaactgactgccttgctaaaagattatagaagtagcaaaaagtattgaaatgtttgcataaagtgtctataataaaactaaactttcatgtg

SEQ ID NO: 858 - protein, 1279 aa, Homo sapien
MDLEGDRNGGAKKKNFFKLNNKSEKDKKEKKPTVSVFSMFRYSNWLDKLYMVVGTLAAIIHGAGLPLMMLVFGEMTDIFANAGNLEDLMSNITNRSDINDTGFFMNLEEDMTRYAYYYSGIGAGVLVAAYIQVSFWCLAAGRQIHKIRKQFFHAIMRQEIGWFDVHDVGELNTRLTDDVSKINEGIGDKIGMFFQSMATFFTGFIVGFTRGWKLTLVILAISPVLGLSAAVWAKILSSFTDKELLAYAKAGAVAEEVLAAIRTVIAFGGQKKELERYNKNLEEAKRIGIKKAITANISIGAAFLLIYASYALAFWYGTTLVLSGEYSIGQVLTVFSVLIGAFSVGQASPSIEAFANARGAAYEIFKIIDNKPSIDSYSKSGHKPDNIKGNLEFRNVHFSYPSRKEVKILKGLNLKVQSGQTVALVGNSGCGKSTTVQLMQRLYDPTEGMVSVDGQDIRTINVRFLREIIGVVSQEPVLFATTIAENIRYGRENVTMDEIEKAVKEANAYDFIMKLPHKFDTLVGERGAQLSGGQKQRIAIARALVRNPKILLLDEATSALDTESEAVVQVALDKARKGRTTIVIAHRLSTVRNADVIAGFDDGVIVEKGNHDELMKEKGIYFKLVTMQTAGNEVELENAADESKSEIDALEMSSNDSRSSLIRKRSTRRSVRGSQAQDRKLSTKEALDESIPPVSFWRIMKLNLTEWPYFVVGVFCAIINGGLQPAFAIIFSKIIGVFTRIDDPETKRQNSNLFSLLFLALGIISFITFFLQGFTFGKAGEILTKRLRYMVFRSMLRQDVSWFDDPKNTTGALTTRLANDAAQVKGAIGSRLAVITQNIANLGTGIIISFIYGWQLTLLLLAIVPIIAIAGVVEMKMLSGQALKDKKELEGAGKIATEAIENFRTVVSLTQEQKFEHMYAQSLQVPYRNSLRKAHIFGITFSFTQAMMYFSYAGCFRFGAYLVAHKLMSFEDVLLVFSAVVFGAMAVGQVSSFAPDYAKAKISAAHIIMIIEKTPLIDSYSTEGLMPNTLEGNVTFGEVVFNYPTRPDIPVLQGLSLEVKKGQTLALVGSSGCGKSTVVQLLERFYDPLAGKVLLDGKEIKRLNVQWLRAHLGIVSQEPILFDCSIAENIAYGDNSRVVSQEEIVRAAKEANIHAFIESLPNKYSTKVGDKGTQLSGGQKQRIAIARALVRQPHILLLDEATSALDTESEKVVQEALDKAREGRTCIVIAHRLSTIQNADLIVVFQNGRVKEHGTHQQLLAQKGIYFSMVSVQAGTKRQ

SEQ ID NO: 859 - DNA, 6577 bp, Homo sapien
tgccgcttccgcggtcacatgactccagtctagctcgcattgcgctcccgccggcgagttctccccgcgcgccgttgcgaggagacggcgcatgtccgccgcgcttgcccctctgcagtaccccgccctcttctccaccacaatgagatctaagtgcgtgctgcgcgtgcgtacgtgaggtcgaaaagcgcactgggacggcagccaggaaacgtgtgggcctctctgctgcggtctccgagggccgaccgctgccggcgcgggtcgtgcgggctgactgtcgctctgcctttgacaggagaggctgcttcttgtagaggaaacagctttgaagtgtggagcgggaaaggagcagtttctgagctgcaaaaactagtttctaaacagagagttaattgttaaatccagtatggccacaggaggaggtccctttgaagatggcatgaatgatcaggatttaccaaactggagtaatgagaatgttgatgacaggctcaacaatatggattggggtgcccaacagaagaaagcaaatagatcatcagaaaagaataagaaaaagtttggtgtagaaagtgataaaagagtaaccaatgatatttctccggagtcgtcaccaggagttggaaggcgaagaacaaagactccacatacgttcccacacagtagatacatgagtcagatgtctgtcccagagcaggcagaattagagaaactgaaacagcggataaacttcagtgatttagatcagagaagcattggaagtgattcccaaggtagagcaacagctgctaacaacaaacgtcagcttagtgaaaaccgaaagcccttcaactttttgcctatgcagattaatactaacaagagcaaagatgcatctacaagtcccccaaacagagaaacgattggatcagcacagtgtaaagagttgtttgcttctgctttaagtaatgacctcttgcaaaactgtcaggtgtctgaagaagatgggaggggagaacctgcaatggagagcagccagattgtaagcaggcttgttcaaattcgcgattatattactaaagctagttccatgcgggaagatcttgtagagaaaaatgagagatctgctaatgttgagcgccttactcatctaatagatcaccttaaagaacaagagaagtcatatatgaaatttcttaaaaaaatccttgccagagatcctcagcaggagcctatggaagagatagaaaatttgaagaaacaacatgatttattaaaaagaatgttacaacagcaggagcaactaagaggagctctacagggacggcaggctgcacttctagctctgcaacataaagcagacgaagctattgcagtgatggatgattctgttgttgcagaaactgcaggtagcttatctggcgtcagtatcacatctgaactaaatgaagaattgaatgacttaattcagcgttttcataatcagcttcgtgattctcagcctccagctgttccagacaatagaagacaggcagaaagtctttcattaactagggaggtttcccagagcaggaaaccatcagcttcagaacgtttacctgatgagaaagtcgaactttttagcaaaatgagagtgctacaggaaaagaaacaaaaaatggacaaattgcttggagaacttcatacacttcgagatcagcatcttaacaattcatcatcctctccacaaaggagtgtcgatcagagaagtacttcagctccctctgcttgtctaggcttggcaccggttgtcaatggagaatccaatagcctcacatcatctgttccttatcctactgcttctctagtatctcagaatgagagtgaaaacgaaggccacctcaatccatctgaaaaactccagaagttaaatgaagttcgaaagagattgaatgagctaagagaattagttcattattatgaacaaacgtcagacatgatgacagatgctgtgaatgaaaacaggaaagatgaagaaactgaagagtcagaatatgattctgagcatgaaaattccgagcctgttactaacattcgaaatccacaagtagcttccacttggaatgaagtaaatagtcatagtaatgcacagtgtgtttctaataatagagatgggcgaacagttaattctaattgtgaaattaacaacagatctgctgccaacataagggctctaaacgtgcctccttctttagattgtcgatataatagagaaggggaacaggagattcatgttgcacaaggtgaagatgatgaggaggaggaggaagaagcagaagaggagggagtcagtggagcttcattatctagtcacaggagcagtctggttgatgagcatccagaagatgctgaatttgaacagaagatcaaccgacttatggctgcaaaacagaaacttagacagttacaagatcttgttgctatggtacaggatgatgatgcagctcaaggagttatctctgccagtgcatcaaatttggatgatttctacccagcagaagaagacaccaagcaaaattcaaataacactagaggaaatgccaataaaacacagaaagatactggagtaaatgaaaaggcaagagagaaattttatgaggctaaactacagcagcaacagagagagctaaaacaattgcaggaagaaagaaagaaactgattgacattcacgagaaaattcaagcattgcaaacggcatgccctgacttacagctgtcagctgctagtgtgggtaactgtcctaccaaaaaatatatgccagctgttacttcaaccccaactgttaatcaacacgagaccagtacaagcaaatctgtttttgagcctgaagattcttcaatagtagataatgagttgtggtcagaaatgagaagacatgaaatgttgagggaggagctgcgacagagaagaaagcagcttgaagctctgatggctgaacatcagaggaggcaaggtctagctgaaactgcatctccagtggctgtgtcattgagaagtgatggatctgagaacctatgtactcctcagcaaagtagaacagaaaaaacgatggcaacttggggagggtctacccagtgtgcactagatgaagaaggagatgaagacggttacctttctgaaggaattgttcggacagatgaagaggaggaagaagagcaagatgccagttccaatgataacttttctgtgtgtccttctaacagtgtgaatcataactcctacaatcgaaaggaaactaaaaatacgtggaagaacaattgccctttttcggcagatgaaaattatcgtcctttagccaagacaaggcaacagaatatcagcatgcaacggcaagaaaaccttcgttgggtgtcagagctctcttacgtagaagagaaagaacaatggcaagaacaaatccagctaaagaaacagcttgattttagtgtcagtatttgtcagactttgatgcaagaccagcagactctatcttgtctgctacaaactcttctcacgggtccttacagtgttatgcccagcaatgttgcatctcctcaagtacacttcataatgcaccagttgaaccagtgctatactcagctaacatggcaacagaataatgttcagaggttgaaacaaatgctaaatgaacttatgcgccaacgaaatcagcatccagaaaaacctggaggcaaggaaagaggcagtagtgcatcgcaccctccttctcccagtttattttgtcctttcagctttccaacacagcctgtaaatctcttcaatatacctggatttactaacttttcatcatttgcaccaggtatgaatttcagccctttatttccttctaattttggagatttttctcagaatatctctacacccagtgaacagcagcaacccttagccagaattctttcaggaaaaacagaatatatggcttttccaaaaccttttgaaagcagttcctctattggagcagagaaaccaaggaataaaaaactgcctgaagaggaggtggaaagcagtaggacaccatggttatatgaacaagaaggtgaagtagagaaaccatttatcaagactggattttcagtgtctgtagaaaaatctacaagtagtaaccgcaaaaatcaattagatacaaacggaagaagacgccagtttgatgaagaatcactggaaagctttagcagtatgcctgatccagtagatccaacaacagtgactaaaacattcaagacaagaaaagcgtctgcacaggccagcctggcatctaaagataaaactcccaagtcaaaaagtaagaagaggaattctactcagctgaaaagcagagttaaaaacatcaggtatgaaagtgccagtatgtctagcacatgtgaaccttgcaaaagtaggaacagacattcagcccagactgaagagcctcttcaagcaaaagtattcagcagaaagaatcatgagcaactggaaaaaataataaaatgtaataggtctacagaaatatcttcagaaactgggagtgatttttccatgtttgaagctttgcaggatactatttattctgaagtagctacattaatttctcaaaatgaatctcgtccacattttcttattgaactcttccatgagctgcagctactaaacacagactacttgagacagagggctttatatgcattgcaggacatagtatccagacatatttctgagagccatgaaaaaggagaaaatgtaaagtcagtaaactctggtacttggatagcatcaaactcagaacttactcctagtgagagccttgctactactgatgatgaaacttttgagaagaactttgaaagagaaacccataaaataagtgagcaaaatgatgctgataatgctagtgtcctgtctgtatcatcaaattttgagccttttgcaacagatgatctaggtaacaccgtgattcacttagatcaagcattagccagaatgagagaatatgagcgtatgaagactgaggctgaaagtaactcaaatatgagatgcacctgcaggattattgaggatggagatggtgctggtgcaggtactacagttaataatttagaagaaactcccgttattgaaaatcgtagttcacaacaacctgtaagtgaagtttctaccatcccatgtcctagaattgatactcagcagctggaccggcaaattaaagcaattatgaaagaagtcattccttttttgaaggagcacatggatgaagtatgctcctcgcagcttctaacttcagtaaggcgcatggttttgacccttacccagcaaaatgatgagagcaaagagtttgtaaagttctttcataaacaacttggaagtatattacaggattcactggcaaaatttgctggcagaaaactgaaagactgtggagaagatcttcttgtagagatatctgaagtgttgttcaatgaattggctttctttaagcttatgcaagatttggataataatagtataactgttaaacagagatgcaaaaggaaaatagaagcaactggagtgatacaatcttgtgccaaagaggctaaaaggattcttgaagatcatggctcacctgctggagagattgatgatgaagacaaagacaaggatgaaactgaaacagttaagcagactcaaacatctgaggtgtatgatggtcccaaaaatgtaagatctgatatttctgatcaagaggaagatgaagaaagtgaaggatgtccagtgtctattaatttgtctaaagctgaaactcaggctttaactaattatggaagtggagaagatgaaaatgaggatgaagaaatggaagaatttgaagaaggccctgtggatgtccagacttccctccaggctaacactgaagctactgaagaaaatgaacatgatgaacaggtcctacaacgtgactttaaaaagacagcagaaagcaaaaatgtccattggaacgagaagccactagtaaaaatgaccaaaaataactgtcctgtgaaacccagttacctcaatatcttggaagatgagcaacctttaaatagtgctgcccataaggagtcacctcctactgttgattcaactcaacagcctaaccctttgccgttacgtttacctgaaatggaacccttagtgcctagagtcaaagaagttaaatctgctcaggaaactcctgaaagctctctggctggaagtcctgatactgaatctccagtgttagtgaatgactatgaagcagaatctggtaatataagtcaaaagtctgatgaagaagattttgtaaaagttgaagatttaccactgaaactgacaatatattcagaggcagatctaagaaagaaaatggtagaagaagaacagaaaaaccatttatctggtgaaatgtgtgaaatgcagaccgaagaattagctggaaattctgagacactaaaagaacctgaaacggtgggagcccagagtatatgagatgtcttcagaggctcatctaactctgtccttacatactcaatgcatatatgaaaacaatactaaataaacatctgatctgtataaaaatct

SEQ ID NO: 860 - protein, 2000 aa, Homo sapien
MATGGGPFEDGMNDQDLPNWSNENVDDRLNNMDWGAQQKKANRSSEKNKKKFGVESDKRVTNDISPESSPGVGRRRTKTPHTFPHSRYMSQMSVPEQAELEKLKQRINFSDLDQRSIGSDSQGRATAANNKRQLSENRKPFNFLPMQINTNKSKDASTSPPNRETIGSAQCKELFASALSNDLLQNCQVSEEDGRGEPAMESSQIVSRLVQIRDYITKASSMREDLVEKNERSANVERLTHLIDHLKEQEKSYMKFLKKILARDPQQEPMEEIENLKKQHDLLKRMLQQQEQLRGALQGRQAALLALQHKADEAIAVMDDSVVAETAGSLSGVSITSELNEELNDLIQRFHNQLRDSQPPAVPDNRRQAESLSLTREVSQSRKPSASERLPDEKVELFSKMRVLQEKKQKMDKLLGELHTLRDQHLNNSSSSPQRSVDQRSTSAPSACLGLAPVVNGESNSLTSSVPYPTASLVSQNESENEGHLNPSEKLQKLNEVRKRLNELRELVHYYEQTSDMMTDAVNENRKDEETEESEYDSEHENSEPVTNIRNPQVASTWNEVNSHSNAQCVSNNRDGRTVNSNCEINNRSAANIRALNVPPSLDCRYNREGEQEIHVAQGEDDEEEEEEAEEEGVSGASLSSHRSSLVDEHPEDAEFEQKINRLMAAKQKLRQLQDLVAMVQDDDAAQGVISASASNLDDFYPAEEDTKQNSNNTRGNANKTQKDTGVNEKAREKFYEAKLQQQQRELKQLQEERKKLIDIHEKIQALQTACPDLQLSAASVGNCPTKKYMPAVTSTPTVNQHETSTSKSVFEPEDSSIVDNELWSEMRRHEMLREELRQRRKQLEALMAEHQRRQGLAETASPVAVSLRSDGSENLCTPQQSRTEKTMATWGGSTQCALDEEGDEDGYLSEGIVRTDEEEEEEQDASSNDNFSVCPSNSVNHNSYNRKETKNTWKNNCPFSADENYRPLAKTRQQNISMQRQENLRWVSELSYVEEKEQWQEQIQLKKQLDFSVSICQTLMQDQQTLSCLLQTLLTGPYSVMPSNVASPQVHFIMHQLNQCYTQLTWQQNNVQRLKQMLNELMRQRNQHPEKPGGKERGSSASHPPSPSLFCPFSFPTQPVNLFNIPGFTNFSSFAPGMNFSPLFPSNFGDFSQNISTPSEQQQPLARILSGKTEYMAFPKPFESSSSIGAEKPRNKKLPEEEVESSRTPWLYEQEGEVEKPFIKTGFSVSVEKSTSSNRKNQLDTNGRRRQFDEESLESFSSMPDPVDPTTVTKTFKTRKASAQASLASKDKTPKSKSKKRNSTQLKSRVKNIRYESASMSSTCEPCKSRNRHSAQTEEPLQAKVFSRKNHEQLEKIIKCNRSTEISSETGSDFSMFEALQDTIYSEVATLISQNESRPHFLIELFHELQLLNTDYLRQRALYALQDIVSRHISESHEKGENVKSVNSGTWIASNSELTPSESLATTDDETFEKNFERETHKISEQNDADNASVLSVSSNFEPFATDDLGNTVIHLDQALARMREYERMKTEAESNSNMRCTCRIIEDGDGAGAGTTVNNLEETPVIENRSSQQPVSEVSTIPCPRIDTQQLDRQIKAIMKEVIPFLKEHMDEVCSSQLLTSVRRMVLTLTQQNDESKEFVKFFHKQLGSILQDSLAKFAGRKLKDCGEDLLVEISEVLFNELAFFKLMQDLDNNSITVKQRCKRKIEATGVIQSCAKEAKRILEDHGSPAGEIDDEDKDKDETETVKQTQTSEVYDGPKNVRSDISDQEEDEESEGCPVSINLSKAETQALTNYGSGEDENEDEEMEEFEEGPVDVQTSLQANTEATEENEHDEQVLQRDFKKTAESKNVHWNEKPLVKMTKNNCPVKPSYLNILEDEQPLNSAAHKESPPTVDSTQQPNPLPLRLPEMEPLVPRVKEVKSAQETPESSLAGSPDTESPVLVNDYEAESGNISQKSDEEDFVKVEDLPLKLTIYSEADLRKKMVEEEQKNHLSGEMCE

SEQ ID NO: 861 - DNA, 1216 bp, Homo sapien
ggcagctgcacggctcctggccccggagcatgcgcgagagccgccccggagcgccccggagccccccgccgtcccgcccgcggcgtcccgcgccccgccgccagcgcacccccggacgctatggcccacccctccggctggccccttctgtaggatggtagcacacaaccaggtggcagccgacaatgcagtctccacagcagcagagccccgacggcggccagaaccttcctcctcttcctcctcctcgcccgcggcccccgcgcgcccgcggccgtgccccgcggtcccggccccggcccccggcgacacgcacttccgcacattccgttcgcacgccgattaccggcgcatcacgcgcgccagcgcgctcctggacgcctgcggattctactgggggcccctgagcgtgcacggggcgcacgagcggctgcgcgccgagcccgtgggcaccttcctggtgcgcgacagccgccagcggaactgctttttcgcccttagcgtgaagatggcctcgggacccacgagcatccgcgtgcactttcaggccggccgctttcacctggatggcagccgcgagagcttcgactgcctcttcgagctgctggagcactacgtggcggcgccgcgccgcatgctgggggccccgctgcgccagcgccgcgtgcggccgctgcaggagctgtgccgccagcgcatcgtggccaccgtgggccgcgagaacctggctcgcatccccctcaaccccgtcctccgcgactacctgagctccttccccttccagatttgaccggcagcgcccgccgtgcacgcagcattaactgggatgccgtgttattttgttattacttgcctggaaccatgtgggtaccctccccggcctgggttggagggagcggatgggtgtaggggcgaggcgcctcccgccctcggctggagacgaggccgcagaccccttctcacctcttgagggggtcctccccctcctggtgctccctctgggtccccctggttgttgtagcagcttaactgtatctggagccaggacctgaactcgcacctcctacctcttcatgtttacatatacccagtatctttgcacaaaccaggggttgggggagggtctctggctttatttttctgctgtgcagaatcctattttatattttttaaagtcagtttaggtaataaactttattatgaaagtttttttttt

SEQ ID NO: 862 - protein, 211 aa, Homo sapien
MVAHNQVAADNAVSTAAEPRRRPEPSSSSSSSPAAPARPRPCPAVPAPAPGDTHFRTFRSHADYRRITRASALLDACGFYWGPLSVHGAHERLRAEPVGTFLVRDSRQRNCFFALSVKMASGPTSIRVHFQAGRFHLDGSRESFDCLFELLEHYVAAPRRMLGAPLRQRRVRPLQELCRQRIVATVGRENLARIPLNPVLRDYLSSFPFQI

SEQ ID NO: 863 - DNA, 1574 bp, Homo sapien
cagacagaccaatcacgcgcattcttcggccacgacaagcgcgcctctgatcacgtgaccaggtccgctacccacgtgggggctcagcgtgcacccttctttgtgctcgggttaggaggagctaggctgccatcgggccggtgcagatacggggttgctcttttgctcataagaggggcttcgctggcagtctgaacggcaagcttgagtcaggacccttaattaagatcctcaattggctggagggcagatctcgcgagtagggcaacgcggtaaaaatattgcttcggtgggtgacgcggtacagctgcccaagggcgttcgtaacgggaatgccgaagcgtgggaaaaagggagcggtggcggaagacggggatgagctcaggacagagccagaggccaagaagagtaagacggccgcaaagaaaaatgacaaagaggcagcaggagagggcccagccctgtatgaggaccccccagatcagaaaacctcacccagtggcaaacctgccacactcaagatctgctcttggaatgtggatgggcttcgagcctggattaagaagaaaggattagattgggtaaaggaagaagccccagatatactgtgccttcaagagaccaaatgttcagagaacaaactaccagctgaacttcaggagctgcctggactctctcatcaatactggtcagctccttcggacaaggaagggtacagtggcgtgggcctgctttcccgccagtgcccactcaaagtttcttacggcataggcgatgaggagcatgatcaggaaggccgggtgattgtggctgaatttgactcgtttgtgctggtaacagcatatgtacctaatgcaggccgaggtctggtacgactggagtaccggcagcgctgggatgaagcctttcgcaagttcctgaagggcctggcttcccgaaagccccttgtgctgtgtggagacctcaatgtggcacatgaagaaattgaccttcgcaaccccaaggggaacaaaaagaatgctggcttcacgccacaagagcgccaaggcttcggggaattactgcaggctgtgccactggctgacagctttaggcacctctaccccaacacaccctatgcctacaccttttggacttatatgatgaatgctcgatccaagaatgttggttggcgccttgattactttttgttgtcccactctctgttacctgcattgtgtgacagcaagatccgttccaaggccctcggcagtgatcactgtcctatcaccctatacctagcactgtgacaccacccctaaatcactttgagcctgggaaataagccccctcaactaccattccttctttaaacactcttcagagaaatctgcattctatttctcatgtataaaactaggaatcctccaaccaggctcctgtgatagagttcttttaagcccaagattttttatttgagggttttttgttttttaaaaaaaaattgaacaaagactactaatgactttgtttgaattatccacatgaaaataaagagccatagtttcaaaaaaaaaaaaaaaaaaaaaaaaaaa

SEQ ID NO: 864 - protein, 318 aa, Homo sapien
MPKRGKKGAVAEDGDELRTEPEAKKSKTAAKKNDKEAAGEGPALYEDPPDQKTSPSGKPATLKICSWNVDGLRAWIKKKGLDWVKEEAPDILCLQETKCSENKLPAELQELPGLSHQYWSAPSDKEGYSGVGLLSRQCPLKVSYGIGDEEHDQEGRVIVAEFDSFVLVTAYVPNAGRGLVRLEYRQRWDEAFRKFLKGLASRKPLVLCGDLNVAHEEIDLRNPKGNKKNAGFTPQERQGFGELLQAVPLADSFRHLYPNTPYAYTFWTYMMNARSKNVGWRLDYFLLSHSLLPALCDSKIRSKALGSDHCPITLYLAL

SEQ ID NO: 865 - DNA, 698 bp, Mus musculus
ggcgccgccgcaaacgtcagtgtacgaggcagacggcggcagtgcggcttgctcttggaagttcaggctcggttgtcttttgggagccatggagagtgacttttatctgcgttactacgtggggcacaagggcaagttcggccacgagttcctggagtttgagtttcgaccggacgggaagttaagatatgccaacaacagcaattacaagaatgatgtcatgatcagaaaagaggcttatgtacataaaagcgtgatggaggaactgaagagaataattgacgacagtgaaattaccaaagaggatgatgcattgtggcctcctcctgaccgagtgggccggcaggagcttgaaatcgtcattggagatgaacacatttcttttacaacatcaaaaattggttcccttattgatgtcaatcaatccaaggatccagaaggcttacgagtattttattatcttgtccaggacctgaagtgtttggtcttcagtcttattggattacacttcaagattaaaccaatctagactgaatattggtgtggacatggggggtgggtgggagtagaaaattttgtgtatatcagggcagtatttttttatgaactataaatgattgtctttaataaatatgtgataaaatccaatttttattattttataaagacctgaacatgtgaaaaaaaaaaaaaaaaaa

SEQ ID NO: 866 - protein, 146 aa, Mus musculus
MESDFYLRYYVGHKGKFGHEFLEFEFRPDGKLRYANNSNYKNDVMIRKEAYVHKSVMEELKRIIDDSEITKEDDALWPPPDRVGRQELEIVIGDEHISFTTSKIGSLIDVNQSKDPEGLRVFYYLVQDLKCLVFSLIGLHFKIKPI

SEQ ID NO: 867 - DNA, 2430 bp, Homo sapien
catttcattggcgtttgagtcagcaaagaagtcaagatggccaaagttccagacatgtttgaagacctgaagaactgttacagtgaaaatgaagaagacagttcctccattgatcatctgtctctgaatcagaaatccttctatcatgtaagctatggcccactccatgaaggctgcatggatcaatctgtgtctctgagtatctctgaaacctctaaaacatccaagcttaccttcaaggagagcatggtggtagtagcaaccaacgggaaggttctgaagaagagacggttgagtttaagccaatccatcactgatgatgacctggaggccatcgccaatgactcagaggaagaaatcatcaagcctaggtcagcaccttttagcttcctgagcaatgtgaaatacaactttatgaggatcatcaaatacgaattcatcctgaatgacgccctcaatcaaagtataattcgagccaatgatcagtacctcacggctgctgcattacataatctggatgaagcagtgaaatttgacatgggtgcttataagtcatcaaaggatgatgctaaaattaccgtgattctaagaatctcaaaaactcaattgtatgtgactgcccaagatgaagaccaaccagtgctgctgaaggagatgcctgagatacccaaaaccatcacaggtagtgagaccaacctcctcttcttctgggaaactcacggcactaagaactatttcacatcagttgcccatccaaacttgtttattgccacaaagcaagactactgggtgtgcttggcaggggggccaccctctatcactgactttcagatactggaaaaccaggcgtaggtctggagtctcacttgtctcacttgtgcagtgttgacagttcatatgtaccatgtacatgaagaagctaaatcctttactgttagtcatttgctgagcatgtactgacccttgtaattctaaatgaatgtttacactctttgtaagagtggaaccaacactaacatataatgttgttatttaaagaacaccctatattttgcatagtaccaatcattttaattattattcttcataacaattttaggaggaccagagctactgactatggctaccaaaaagactctacccatattacagatgggcaaattaaggcataagaaaactaagaaatatgcacaatagcagttgaaacaagaagccacagacctaggatttcatgatttcatttcaactgtttgccttctacttttaagttgctgatgaactcttaatcaaatagcataagtttctgggacctcagttttatcattttcaaaatggagggaataatacctaagccttcctgccgcaacagttttttatgctaatcagggaggtcattttggtaaaatacttcttgaagccgagcctcaagatgaaggcaaagcacgaaatgttattttttaattattatttatatatgtatttataaatatatttaagataattataatatactatatttatgggaaccccttcatcctctgagtgtgaccaggcatcctccacaatagcagacagtgttttctgggataagtaagtttgatttcattaatacagggcattttggtccaagttgtgcttatcccatagccaggaaactctgcattctagtacttgggagacctgtaatcatataataaatgtacattaattaccttgagccagtaattggtccgatctttgactcttttgccattaaacttacctgggcattcttgtttcattcaattccacctgcaatcaagtcctacaagctaaaattagatgaactcaactttgacaaccatgagaccactgttatcaaagttgagttcatctaattttagcttgtagagacgggatttcaccatcttggccgtgctggtctcgaacttctgacctcgtgatccacccgcctcggcctcccaaagtgctgggattacaggcgtgagccatcgcgcccggcctggagtttctactgtgcaccaggcactacctttacatgtattgttttatttaatcctcagtcagccgtgtttggtaggtgcagttagtatatttccattttcatctgcgcaaacagattcaggaactttgtaatttacataaggtcacattcatcctaattcacaaaatcaagatttcacacctattcctttttctttccagtgcctgtgctttttctctcataccaaggagaagtaataagcctaacgttttaaacctcacaaaagtacatacagaaaagtaaatagcctaattttgcaactaatacaaatggcgctgtacttctttggtgatggtagatttataatttttgaagtatggtagattcaaatgaaccactgaaaaggcatttagtttcttgtcccaaataaaaaaaaaaaaaaaaaa

SEQ ID NO: 868 - protein, 271 aa, Homo sapien
MAKVPDMFEDLKNCYSENEEDSSSIDHLSLNQKSFYHVSYGPLHEGCMDQSVSLSISETSKTSKLTFKESMVVVATNGKVLKKRRLSLSQSITDDDLEAIANDSEEEIIKPRSAPFSFLSNVKYNFMRIIKYEFILNDALNQSIIRANDQYLTAAALHNLDEAVKFDMGAYKSSKDDAKITVILRISKTQLYVTAQDEDQPVLLKEMPEIPKTITGSETNLLFFWETHGTKNYFTSVAHPNLFIATKQDYWVCLAGGPPSITDFQILENQA

SEQ ID NO: 869 - DNA, 960 bp, Homo sapien
agcagctccaaccagggcagccttcctgagaagatgcaaccaatcctgcttctgctggccttcctcctgctgcccagggcagatgcaggggagatcatcgggggacatgaggccaagccccactcccgcccctacatggcttatcttatgatctgggatcagaagtctctgaagaggtgcggtggcttcctgatacaagacgacttcgtgctgacagctgctcactgttggggaagctccataaatgtcaccttgggggcccacaatatcaaagaacaggagccgacccagcagtttatccctgtgaaaagacccatcccccatccagcctataatcctaagaacttctccaacgacatcatgctactgcagctggagagaaaggccaagcggaccagagctgtgcagcccctcaggctacctagcaacaaggcccaggtgaagccagggcagacatgcagtgtggccggctgggggcagacggcccccctgggaaaacactcacacacactacaagaggtgaagatgacagtgcaggaagatcgaaagtgcgaatctgacttacgccattattacgacagtaccattgagttgtgcgtgggggacccagagattaaaaagacttcctttaagggggactctggaggccctcttgtgtgtaacaaggtggcccagggcattgtctcctatggacgaaacaatggcatgcctccacgagcctgcaccaaagtctcaagctttgtacactggataaagaaaaccatgaaacgctactaactacaggaagcaaactaagcccccgctgtaatgaaacaccttctctggagccaagtccagatttacactgggagaggtgccagcaactgaataaatacctctcccagtgtaaatctggagccaagtccagatttacactgggagaggtgccagcaactgaataaatacctcttagctgagtgg

SEQ ID NO: 870 - protein, 247 aa, Homo sapien
MQPILLLLAFLLLPRADAGEIIGGHEAKPHSRPYMAYLMIWDQKSLKRCGGFLIQDDFVLTAAHCWGSSINVTLGAHNIKEQEPTQQFIPVKRPIPHPAYNPKNFSNDIMLLQLERKAKRTRAVQPLRLPSNKAQVKPGQTCSVAGWGQTAPLGKHSHTLQEVKMTVQEDRKCESDLRHYYDSTIELCVGDPEIKKTSFKGDSGGPLVCNKVAQGIVSYGRNNGMPPRACTKVSSFVHWIKKTMKRY

SEQ ID NO: 871 - DNA, 2832 bp, Homo sapien
acagactgccaaatggaacagacaagcaggttgtcttgtgttaaagaaaatgagatatgagtcagttactcccggaggcaatgctgctgttcagctcttgtgtttttgtggccagggtcttcatgaacactaataggggtaccaggccctcttccttgttagaagaaatcaggataacaaaggtatattgggcacccctacaaaaggaatctgtatctgtatcaagatgatctgaagaacagcttctacctttaggaatgtctagtgttccaaaatgactagcatcttccattttgccattatcttcatgttaatacttcagatcagaatacaattatctgaagaaagtgaatttttagttgataggtcaaaaaacggtctcatccacgttcctaaagacctatcccagaaaacaacaatcttaaatatatcgcaaaattatatatctgagctttggacttctgacatcttatcactgtcaaaactgaggattttgataatttctcataatagaatccagtatcttgatatcagtgttttcaaattcaaccaggaattggaatacttggatttgtcccacaacaagttggtgaagatttcttgccaccctactgtgaacctcaagcacttggacctgtcatttaatgcatttgatgccctgcctatatgcaaagagtttggcaatatgtctcaactaaaatttctggggttgagcaccacacacttagaaaaatctagtgtgctgccaattgctcatttgaatatcagcaaggtcttgctggtcttaggagagacttatggggaaaaagaagaccctgagggccttcaagactttaacactgagagtctgcacattgtgttccccacaaacaaagaattccattttattttggatgtgtcagtcaagactgtagcaaatctggaactatctaatatcaaatgtgtgctagaagataacaaatgttcttacttcctaagtattctggcgaaacttcaaacaaatccaaagttatcaagtcttaccttaaacaacattgaaacaacttggaattctttcattaggatcctccagctggtttggcatacaactgtatggtatttctcaatttcaaacgtgaagctacagggtcagctggacttcagagattttgattattctggcacttccttgaaggccttgtctatacaccaagttgtcagcgatgtgttcggttttccgcaaagttatatctatgaaatcttttcgaatatgaacatcaaaaatttcacagtgtctggtacacgcatggtccacatgctttgcccatccaaaattagcccgttcctgcatttggatttttccaataatctcttaacagacacggtttttgaaaattgtgggcaccttactgagttggagacacttattttacaaatgaatcaattaaaagaactttcaaaaatagctgaaatgactacacagatgaagtctctgcaacaattggatattagccagaattctgtaagctatgatgaaaagaaaggagactgttcttggactaaaagtttattaagtttaaatatgtcttcaaatatacttactgacactattttcagatgtttacctcccaggatcaaggtacttgatcttcacagcaataaaataaagagcattcctaaacaagtcgtaaaactggaagctttgcaagaactcaatgttgctttcaattctttaactgaccttcctggatgtggcagctttagcagcctttctgtattgatcattgatcacaattcagtttcccacccatcagctgatttcttccagagctgccagaagatgaggtcaataaaagcaggggacaatccattccaatgtacctgtgagctaggagaatttgtcaaaaatatagaccaagtatcaagtgaagtgttagagggctggcctgattcttataagtgtgactacccggaaagttatagaggaaccctactaaaggactttcacatgtctgaattatcctgcaacataactctgctgatcgtcaccatcgttgccaccatgctggtgttggctgtgactgtgacctccctctgcatctacttggatctgccctggtatctcaggatggtgtgccagtggacccagacccggcgcagggccaggaacatacccttagaagaactccaaagaaatctccagtttcatgcatttatttcatatagtgggcacgattctttctgggtgaagaatgaattattgccaaacctagagaaagaaggtatgcagatttgccttcatgagagaaactttgttcctggcaagagcattgtggaaaatatcatcacctgcattgagaagagttacaagtccatctttgttttgtctcccaactttgtccagagtgaatggtgccattatgaactctactttgcccatcacaatctctttcatgaaggatctaatagcttaatcctgatcttgctggaacccattccgcagtactccattcctagcagttatcacaagctcaaaagtctcatggccaggaggacttatttggaatggcccaaggaaaagagcaaacgtggccttttttgggctaacttaagggcagccattaatattaagctgacagagcaagcaaagaaatagattacacatcaagtgaaaaatattcctcctgttgatattgctgcttttggaagttccaacaatgactttattttgcatcagcatagatgtaaacacaattgtgagtgtatgatgtaggtaaaaatatataccttcgggtcgcagttcaccatttatatgtggtattaaaaattaatgaaatgatataactttgattt

SEQ ID NO: 872 - protein, 786 aa, Homo sapien
MTSIFHFAIIFMLILQIRIQLSEESEFLVDRSKNGLIHVPKDLSQKTTILNISQNYISELWTSDILSLSKLRILIISHNRIQYLDISVFKFNQELEYLDLSHNKLVKISCHPTVNLKHLDLSFNAFDALPICKEFGNMSQLKFLGLSTTHLEKSSVLPIAHLNISKVLLVLGETYGEKEDPEGLQDFNTESLHIVFPTNKEFHFILDVSVKTVANLELSNIKCVLEDNKCSYFLSILAKLQTNPKLSSLTLNNIETTWNSFIRILQLVWHTTVWYFSISNVKLQGQLDFRDFDYSGTSLKALSIHQVVSDVFGFPQSYIYEIFSNMNIKNFTVSGTRMVHMLCPSKISPFLHLDFSNNLLTDTVFENCGHLTELETLILQMNQLKELSKIAEMTTQMKSLQQLDISQNSVSYDEKKGDCSWTKSLLSLNMSSNILTDTIFRCLPPRIKVLDLHSNKIKSIPKQVVKLEALQELNVAFNSLTDLPGCGSFSSLSVLIIDHNSVSHPSADFFQSCQKMRSIKAGDNPFQCTCELGEFVKNIDQVSSEVLEGWPDSYKCDYPESYRGTLLKDFHMSELSCNITLLIVTIVATMLVLAVTVTSLCIYLDLPWYLRMVCQWTQTRRRARNIPLEELQRNLQFHAFISYSGHDSFWVKNELLPNLEKEGMQICLHERNFVPGKSIVENIITCIEKSYKSIFVLSPNFVQSEWCHYELYFAHHNLFHEGSNSLILILLEPIPQYSIPSSYHKLKSLMARRTYLEWPKEKSKRGLFWANLRAAINIKLTEQAKK

SEQ ID NO: 873 - DNA, 2924 bp, Homo sapien
gtctgaggctcggccgcctgagccgcggacggtttgctgagcccgttagtgcgcccggccgagacacgccgccgccatgtcccgctacctgcgtccccccaacacgtctctgttcgtcaggaacgtggccgacgacaccaggtctgaagacttgcggcgtgaatttggtcgttatggtcctatagttgatgtgtatgttccacttgatttctacactcgccgtccaagaggatttgcttatgttcaatttgaggatgttcgtgatgctgaagacgctttacataatttggacagaaagtggatttgtggacggcagattgaaatacagtttgcccagggggatcgaaagacaccaaatcagatgaaagccaaggaagggaggaatgtgtacagttcttcacgctatgatgattatgacagatacagacgttctagaagccgaagttatgaaaggaggagatcaagaagtcggtcttttgattacaactatagaagatcgtatagtcctagaaacagtagaccgactggaagaccacggcgtagcagaagccattccgacaatgatagattcaaacaccgaaatcgatctttttcaagatctaaatccaattcaagatcacggtccaagtcccagcccaagaaagaaatgaaggctaaatcacgttctaggtctgcatctcacaccaaaactagaggcacctctaaaacagattccaaaacacattataagtctggctcaagatatgaaaaggaatcaaggaaaaaagaaccacctagatccaaatctcagtcaagatcacagtctaggtctaggtcaaaatctagatcaaggtcttggactagtcctaagtccagtggccactgatagtataaaccatggtcatttttaggcatgtatcattcatttactcatagtttggtttacttaaattatcaggaatacaatgttgcaatgatgcttaaaaaacacttgttagttttccctgtaccaggcaatggttataattaaaatgatatgctgttgagaagccactcttaagagtccagtttgtttaatgttatgggcagctaccaatttgtggtgtctctgtatatttttgtaaagattctcattttttatgcttgaagtatttggtgaaaagatgttggttgaccataatttgcaacattgtctcattaaaaataaactttcatattcatatttggtagaactgttaacctagaaatgtagcttgctaataagatagaatgatacaaaagtgaagtagtagccacagtacaacactgactgctcagacacatttaggttcagggtggacctttatgtcttgtcaagatgtctaggcccggctgggcgtggtggctcacacctgtaatcccagcactttgggaggccgaggcgggcggatcacgaggtcaggagttcgagaccagcctgaccaacacggtgaaaccccgtctctactaaaaatacaaaaattatccgggcatggtggcacatgcctgtaatctcagctactcaggaggctgaggcaagagaatcgcttgaacctgggaggtagaagttgcagtgagccaaaatcacgccactgcactccagcctgggcaacagagtgagactccgtctcaaaaaaaaaaaaaaaccggatgtctaggccaatgataattatttttgatgcagtgtggattagttcttttgttaaccccactgtcttggggaatgatgccagctgggaaattgagtttttgactgaaacatggagccttcactgctttttttctggttcctatgaagatttggaacatagaaaacacaaaaactcaccttaaaatttgagcaggtcgttgatggcaaaaataattttaaggaaaaaggaatattcttatgtagttattctaaagtttaaggagcgttgttgaccataatattgcttagttttcttactgctgttaagtaagtaaattgtttcaaagtaggttttgtgtgtgtgtgcctagtgtaaaagaactgaaattttgatgcttacagcacttggctcgtgcatttgtatcaaaatttgcctgcctctttatgagggaggcctgcttttcacacctcagtttatttaatacgaggcaagttgtaagacaacactcattctaggtgattctgtggtgccatgaaatttaaggtaatttggggaaaaggattagtcagttttaagcaagagtcacatcttttgagctttcgattatcagtgtagtacctgactaaaaatgaagtaatacccttaaaccatttataatttctagtatttctctgaaagatcgttttggggacaaaagtgacttgacatgtccaatttcatttcagaataaaaagctagcatctttaaaaatctcagattgcttgcttacagatacaagtacgaattatggacaaacgattccttttagaggattacttttttcaatttcggttttagtaatctaggctttgcctgtaaagaatacaacgatggattttaaatactgtttgtggaatgtgtttaaaggattgattctagaacctttgtatatttgatagtatttctaactttcatttctttactgtttgcagttaatgttcatgttctgctatgcaatcgtttatatgcacgtttctttaatttttttagattttcctggatgtatagtttaaacaacaaaaagtctatttaaaactgtagcagtagtttacagttctagcaaagaggaaagttgtggggttaaactttgtattttctttcttatagaggcttctaaaaaggtatttttatatgttctttttaacaaatattgtgtacaacctttaaaacatcaatgtttggatcaaaacaagacccagcttattttctgcttgctgtaaattaagcaaacatgctataataaaaacaaaatgaagg

SEQ ID NO: 874 - protein, 262 aa, Homo sapien
MSRYLRPPNTSLFVRNVADDTRSEDLRREFGRYGPIVDVYVPLDFYTRRPRGFAYVQFEDVRDAEDALHNLDRKWICGRQIEIQFAQGDRKTPNQMKAKEGRNVYSSSRYDDYDRYRRSRSRSYERRRSRSRSFDYNYRRSYSPRNSRPTGRPRRSRSHSDNDRFKHRNRSFSRSKSNSRSRSKSQPKKEMKAKSRSRSASHTKTRGTSKTDSKTHYKSGSRYEKESRKKEPPRSKSQSRSQSRSRSKSRSRSWTSPKSSGH

SEQ ID NO: 875 - DNA, 2733 bp, Homo sapien
cagtccccaaacctagaaataaactattggtatattctggtgaatttcctgtttccctttctgtctttttctattcatttttgttatcttttttttaaaaaaaggtaacctaaatggactcgtacagcttatatgcttgtacgttctgatgtcccccatgtcttcagaaatcttgttatagctgcctgtgttctacttttgtggatgcactataatttacttaactctcatcttgatggattttaaggatgtttccaattttttcatactagtaaaataactctgctaaagatatgaagcctggaattggcagagatattttaagactctagatacatactggcaaaatgttttccagaaacgtttgtattcaactactattgcagatgagaatacctgtctttcacctcagttataattctgatattataacgctaaaatctctgcaaatttgatgggtgaaaaagcatcttattgtaattgtaatttttgtgttagtaaggtggaatgttcttttttatattttttgtactggtcatattttaaggaacgtgataaagaagtaagcgatgatgaggctgaagaaaaggaagacaaagaagaagaaaaagaaaaagaagagaaagagtcggaagacaaacctgaaattgaagatgttggttctgatgaggaagaagaaaagaaggatggtgacaagaagaagaagaagaagattaaggaaaagtacatcgatcaagaagagctcaacaaaacaaagcccatctggaccagaaatcccgacgatattactaatgaggagtacggagaattctataagagcttgaccaatgactgggaagatcacttggcagtgaagcatttttcagttgaaggacagttggaattcagagcccttctatttgtcccacgacgtgctccttttgatctgtttgaaaacagaaagaaaaagaacaatatcaaattgtatgtacgcagagttttcatcatggataactgtgaggagctaatccctgaatatctgaacttcattagaggggtggtagactcggaggatctccctctaaacatatcccgtgagatgttgcaacaaagcaaaattttgaaagttatcaggaagaatttggtcaaaaaatgcttagaactctttactgaactggcggaagataaagagaactacaagaaattctatgagcagttctctaaaaacataaagcttggaatacacgaagactctcaaaatcggaagaagctttcagagctgttaaggtactacacatctgcctctggtgatgagatggtttctctcaaggactactgcaccagaatgaaggagaaccagaaacatatctattatatcacaggtgagaccaaggaccaggtagctaactcagcctttgtggaacgtcttcggaaacatggcttagaagtgatctatatgattgagcccattgatgagtactgtgtccaacagctgaaggaatttgaggggaagactttagtgtcagtcaccaaagaaggcctggaacttccagaggatgaagaagagaaaaagaagcaggaagagaaaaaaacaaagtttgagaacctctgcaaaatcatgaaagacatattggagaaaaaagttgaaaaggtggttgtgtcaaaccgattggtgacatctccatgctgtattgtcacaagcacatatggctggacagcaaacatggagagaatcatgaaagctcaagccctaagagacaactcaacaatgggttacatggcagcaaagaaacacctggagataaaccctgaccattccattattgagaccttaaggcaaaaggcagaggctgataagaacgacaagtctgtgaaggatctggtcatcttgctttatgaaactgcgctcctgtcttctggcttcagtctggaagatccccagacacatgctaacaggatctacaggatgatcaaacttggtctgggtattgatgaagatgaccctactgctgatgataccagtgctgctgtaactgaagaaatgccaccccttgaaggagatgacgacacatcacgcatggaagaagtagactaatctctggctgagggatgacttacctgttcagtactctacaattcctctgataatatattttcaaggatgtttttctttatttttgttaatattaaaaagtctgtatggcatgacaactactttaaggggaagataagatttctgtctactaagtgatgctgtgataccttaggcactaaagcagagctagtaatgctttttgagtttcatgttggtttattttcacagattggggtaacgtgcactgtaagacgtatgtaacatgatgttaactttgtgtggtctaaagtgtttagctgtcaagccggatgcctaagtagaccaaatcttgttattgaagtgttctgagctgtatcttgatgtttagaaaagtattcgttacatcttgtaggatctactttttgaacttttcattccctgtagttgacaattctgcatgtactagtcctctagaaataggttaaactgaagcaacttgatggaaggatctctccacagggcttgttttccaaagaaaagtattgtttggaggagcaaagttaaaagcctacctaagcatatcgtaaagctgttcaaaaataactcagacccagtcttgtggatggaaatgtagtgctcgagtcacattctgcttaaagttgtaacaaatacagatgagt

SEQ ID NO: 876 - protein, 539 aa, Homo sapien
MGEKASYCNCNFCVSKVECSFLYFLYWSYFKERDKEVSDDEAEEKEDKEEEKEKEEKESEDKPEIEDVGSDEEEEKKDGDKKKKKKIKEKYIDQEELNKTKPIWTRNPDDITNEEYGEFYKSLTNDWEDHLAVKHFSVEGQLEFRALLFVPRRAPFDLFENRKKKNNIKLYVRRVFIMDNCEELIPEYLNFIRGVVDSEDLPLNISREMLQQSKILKVIRKNLVKKCLELFTELAEDKENYKKFYEQFSKNIKLGIHEDSQNRKKLSELLRYYTSASGDEMVSLKDYCTRMKENQKHIYYITGETKDQVANSAFVERLRKHGLEVIYMIEPIDEYCVQQLKEFEGKTLVSVTKEGLELPEDEEEKKKQEEKKTKFENLCKIMKDILEKKVEKVVVSNRLVTSPCCIVTSTYGWTANMERIMKAQALRDNSTMGYMAAKKHLEINPDHSIIETLRQKAEADKNDKSVKDLVILLYETALLSSGFSLEDPQTHANRIYRMIKLGLGIDEDDPTADDTSAAVTEEMPPLEGDDDTSRMEEVD

SEQ ID NO: 877 - DNA, 756 bp, Homo sapien
gctggaggatgtggctgcagagcctgctgctcttgggcactgtggcctgcagcatctctgcacccgcccgctcgcccagccccagcacgcagccctgggagcatgtgaatgccatccaggaggcccggcgtctcctgaacctgagtagagacactgctgctgagatgaatgaaacagtagaagtcatctcagaaatgtttgacctccaggagccgacctgcctacagacccgcctggagctgtacaagcagggcctgcggggcagcctcaccaagctcaagggccccttgaccatgatggccagccactacaagcagcactgccctccaaccccggaaacttcctgtgcaacccagactatcacctttgaaagtttcaaagagaacctgaaggactttctgcttgtcatcccctttgactgctgggagccagtccaggagtgagaccggccagatgaggctggccaagccggggagctgctctctcatgaaacaagagctagaaactcaggatggtcatcttggagggaccaaggggtgggccacagccatggtgggagtggcctggacctgccctgggccacactgaccctgatacaggcatggcagaagaatgggaatattttatactgacagaaatcagtaatatttatatatttatatttttaaaatatttatttatttatttatttaagttcatattccatatttattcaagatgttttaccgtaataattattattaaaaatatgcttct

SEQ ID NO: 878 - protein, 144 aa, Homo sapien [sequence omitted]

SEQ ID NO: 879 - DNA, 988 bp, Homo sapien
aggggacaagtctaggaggtctctgaggttactgtacccatccctccttcatctccctccagcatttgtttctggaaggagtcaacaccaacagctctgacctgggcagccttcctgagaaaatgcagccattcctcctcctgttggcctttcttctgacccctggggctgggacagaggagatcatcgggggccatgaggccaagccccactcccgcccctacatggcctttgttcagtttctgcaagagaagagtcggaagaggtgtggcggcatcctagtgagaaaggactttgtgctgacagctgctcactgccagggaagctccataaatgtcaccttgggggcccacaatatcaaggaacaggagcggacccagcagtttatccctgtgaaaagacccatcccccatccagcctataatcctaagaacttctccaacgacatcatgctactgcagctggagagaaaggccaagtggaccacagctgtgcggcctctcaggctacctagcagcaaggcccaggtgaagccagggcagctgtgcagtgtggctggctggggttatgtctcaatgagcactttagcaaccacactgcaggaagtgttgctgacagtgcagaaggactgccagtgtgaacgtctcttccatggcaattacagcagagccactgagatttgtgtgggggatccaaagaagacacagaccggtttcaagggggactccggggggcccctcgtgtgtaaggacgtagcccaaggtattctctcctatggaaacaaaaaagggacacctccaggagtctacatcaaggtctcacacttcctgccctggataaagagaacaatgaagcgcctctaacagcaggcatgagactaaccttcctctgggcctgaccatctctgggacagaggcaagaatcccaaggggtgggcagtcggggttgcaggactgtaataaatggatctctggtgtaaatatgactg

SEQ ID NO: 880 - protein, 246 aa, Homo sapien
MQPFLLLLAFLLTPGAGTEEIIGGHEAKPHSRPYMAFVQFLQEKSRKRCGGILVRKDFVLTAAHCQGSSINVTLGAHNIKEQERTQQFIPVKRPIPHPAYNPKNFSNDIMLLQLERKAKWTTAVRPLRLPSSKAQVKPGQLCSVAGWGYVSMSTLATTLQEVLLTVQKDCQCERLFHGNYSRATEICVGDPKKTQTGFKGDSGGPLVCKDVAQGILSYGNKKGTPPGVYIKVSHFLPWIKRTMKRL

SEQ ID NO: 881 - DNA, 4297 bp, Homo sapien
cccggattttgcggggttcgtcgggcctgtggaagaagccccgccacggacttcggcagaggtagagcaggtctctctgcagccatgtcggccaaggcaatttcagagcagacgggcaaagaactcctttacaagttcatctgtaccacctcagccatccagaatcggttcaagtatgctcgggtcactcctgacacagactgggcccgcttgctgcaggaccacccctggctgctcagccagaacttggtagtcaagccagaccagctgatcaaacgtcgtggaaaacttggtctcgttggggtcgacctcactctggatggggtcaagtcctggctgaagccacggctgggacaggaagccacagttggcaaggccacaggcttcctcaagaactttctgatcgagcccttcgccccccacagtcaggctgaggagttctatgtctgcatctatgccacccgagaaggggactacgtcctgttccaccacgaggggggtgtggacgtgggtgatgtggacgccaaggcccagaagctgcttgttggcgtggatgagaaactgaatcctgaggacatcaaaaaacacctgttggtccacgcccctgacgacaagaaagaaattctggccagttttatctccggcctcttcaatttctacgaggacttgtacttcacctacctcgagatcaatccccttgtagtgaccaaagatggagtctatgtccttgacttggcggccaaggtggacgccactgccgactacatctgcaaagtgaagtggggtgacatcgagttccctccccccttcgggcgggtggcatatccagaggaagcctacattgcagacctcgatgccaaaagtggggcaagcctgaagctgaccttgctgaaccccaaagggaggatctggaccatggtggccgggggtggcgcctctgtcgtgtacagcgataccatctgtgatctagggggtgtcaacgagctggcaaactatggggagtactcaggcgcccccagcgagcagcagacctatgactatgccaagactatcctctccctcatgacccgagagaagcacccagatggcaagatcctcatcattggaggcagcatcgcaaacttcaccaacgtggctgccacgttcaagggcatcgtgagagcaattcgagattaccagggccccctgaaggagcacgaagtcacaatctttgtccgaagaggtggccccaactatcaggagggcttacgggtgatgggagaagtcgggaagaccactgggatccccatccatgtctttggcacagagactcacatgacggccattgtgggcatggcctgggcaccggccatccccaaccagccacccacagcggcccacactgcaaactttctcctcaacgcccagcgggagacatcgactccagcccccagcaggacagcatctttttatgagtccatggtcgatgaggtcagggccgatgaggtggcgcctgcaaagaaggccaagcctgccatgccacaagattcagtcccaagtccaagatccctgcaaggaaagagcaccaccctcttcagccgccacaccaaggccattgtgtggggcatgcagacccgggccgtgcaaggcatgctggactttgactatgtctgctcccgagacgagccctcagtggctgccatggtctatcctttcactggggaccacaagcagaagttttactgggggcacaaagagatcctgatccctgtcttcaagaacatggctgatgccatgaggaagcacccggaggtagatgtgctcatcaactttgcctctctccgctctgcctatgacagcaccatggagaccatgaactatgcccagatccggaccatcgccatcatagctgaaggcatccctgaggccctcacgagaaagctgatcaagaaggcggaccagaagggagtgaccatcatcggacctgccactgttggaggcatcaagcctgggtgctttaagattggcaacacaggtgggatgctggacaacatcctggcctccaaactgtacccccaggcagctgtggcctatgtctcacgttccggaggcatgtccaacgagctcaacaatatcatctctcggaccacggatggcgtctatgagggcgtggccattggtggggacaggtacccgggctccacattcatggatcatgtgttacgctatcaggacactccaggagtcaaaatgattgtggttcttggagagattgggggcactgaggaatataagatttcccggggcatcaaggagggccgcctcactaagcccatcgtctgctggtgcatcgggacgtgtgccaccatgttctcctctgaggtccagtttggccatgctggagcttgtgccaaccaggcttctgaaactgcagtagccaagaaccaggctttgaaggaagcaggagtgtttgtgccccggagctttgatgagcttggagagatcatccagtctgtatacgaagatctcgtggccaatggagtcattgtacctgcccaggaggtgccgcccccaaccgtgcccatggactactcctgggccagggagcttggtttgatccgcaaacctgcctcgttcatgaccagcatctgcgatgagcgaggacaggagctcatctacgcgggcatgcccatcactgaggtcttcaaggaagagatgggcattggcggggccctcggcctcctctggttccagaaaaggttgcctaagtactcttgccagttcattgagatgtgtctgatggtgacagctgatcacgggccagccgtctctggagcccacaacaccatcatttgtgcgcgcaccgcggtggagctggtctccagcctcacctcggggctgctcaccatcggggatcggtttgggggtgccttggatgcagcagccaagatgttcagtaaagcctttgacagtggcattatccccatggagtttgtgaacaagatgaagaaggaagggaagctgatcatgggcattggtcaccgagtgaagtcgataaacaacccagacatgcgagtgcagatcctcaaagattacgtcaggcagcacttccctgccactcctctgctcgattatgcactggaagtagagaagattaccacctcgaagaagccaaatcttatcctgaatgtagatggtctcatcggagtcgcatttgtagacatgcttagaaactgtgggtcctttactcgggaggaagctgatgaatatattgacattggagccctcaatggcatctttgtgctgggaaggagtatggggttcattggacactatcttgatcagaagaggctgaagcaggggctgtatcgtcatccgtgggatgatatttcatatgttcttccggaacacatgagcatgtaacagagccaggaaccctactgcagtaaactgaagacaagaactcttcccccaagaaaaagtgtcagacagctggcagtggagcctgctttatttagcaggggcctggaatgtaaacagccactggggtacaggcaccgaagaccaacatccacaggctaacaccccttcagtccacacaaagaagcttcatattttttttataagcatagaaataaaaaccaagccaatatttgtgactttgctctgctacctgctgtatttattatatggaagcatctaagtactgtcaggatggggtcttcctcattgtagggcgttaggatgttgctttctttttccattagttaaacatttttttctcctttggaggaagggaatgaaacatttatggcctcaagatactatacatttaaagcaccccaatgtctctctttttttttttttttacttcccttgcttcttccttatataacatgaagaacattgtattaatctgatttttaaagactttttgtatgttacgtgttaagggcttgtttggtatcccactgaaatgttctgtgttgcagaccagagtctgtttatgtcagggggagggggccattgcatccttagccattgtcacaaaatatgtggagtagtaacttaatatgtaaagttgtaacatacatacatttaaaatggaaatgcagaaagctgtgaaatgtcttgtgtcttatgttctctgtatttatgcagctgatttgtctgtctgtaactgaagtgtgggtccaaggactcctaactactttgcatctgtaatccacaaagattctgggcagctgccacctcagtctcttctctgtattatcatagtctggtttaaataaactatatagtaacaggaattcctgca

SEQ ID NO: 882 - protein, 1105 aa, Homo sapien
MSAKAISEQTGKELLYKFICTTSAIQNRFKYARVTPDTDWARLLQDHPWLLSQNLVVKPDQLIKRRGKLGLVGVDLTLDGVKSWLKPRLGQEATVGKATGFLKNFLIEPFAPHSQAEEFYVCIYATREGDYVLFHHEGGVDVGDVDAKAQKLLVGVDEKLNPEDIKKHLLVHAPDDKKEILASFISGLFNFYEDLYFTYLEINPLVVTKDGVYVLDLAAKVDATADYICKVKWGDIEFPPPFGRVAYPEEAYIADLDAKSGASLKLTLLNPKGRIWTMVAGGGASVVYSDTICDLGGVNELANYGEYSGAPSEQQTYDYAKTILSLMTREKHPDGKILIIGGSIANFTNVAATFKGIVRAIRDYQGPLKEHEVTIFVRRGGPNYQEGLRVMGEVGKTTGIPIHVFGTETHMTAIVGMAWAPAIPNQPPTAAHTANFLLNAQRETSTPAPSRTASFYESMVDEVRADEVAPAKKAKPAMPQDSVPSPRSLQGKSTTLFSRHTKAIVWGMQTRAVQGMLDFDYVCSRDEPSVAAMVYPFTGDHKQKFYWGHKEILIPVFKNMADAMRKHPEVDVLINFASLRSAYDSTMETMNYAQIRTIAIIAEGIPEALTRKLIKKADQKGVTIIGPATVGGIKPGCFKIGNTGGMLDNILASKLYPQAAVAYVSRSGGMSNELNNIISRTTDGVYEGVAIGGDRYPGSTFMDHVLRYQDTPGVKMIVVLGEIGGTEEYKISRGIKEGRLTKPIVCWCIGTCATMFSSEVQFGHAGACANQASETAVAKNQALKEAGVFVPRSFDELGEIIQSVYEDLVANGVIVPAQEVPPPTVPMDYSWARELGLIRKPASFMTSICDERGQELIYAGMPITEVFKEEMGIGGALGLLWFQKRLPKYSCQFIEMCLMVTADHGPAVSGAHNTIICARTAVELVSSLTSGLLTIGDRFGGALDAAAKMFSKAFDSGIIPMEFVNKMKKEGKLIMGIGHRVKSINNPDMRVQILKDYVRQHFPATPLLDYALEVEKITTSKKPNLILNVDGLIGVAFVDMLRNCGSFTREEADEYIDIGALNGIFVLGRSMGFIGHYLDQKRLKQGLYRHPWDDISYVLPEHMSM

SEQ ID NO: 883 - DNA, 2741 bp, Homo sapien
ggcacgagggagagagaactagtctcgagtttttttttttttttttgtgcaggtaggaaatgtctttattattggccttgagtcatcatgtagtgtctgacataggttacgtgtccagaggatctgcctggcacacgctagctacccctgcccactggagcagcccctctggccgacgccaggcctttgtccatcatgccagggaagccaaccccaccatcccacaagttcatgctaggggtgctgaggaacaaggctgtcctaggattggaccctccatcctggacaggggtcctggggaggatgaggctgaggcctggatgatcagtctctttttggtttcatgatcatttaaaaaacagaaaagacaaacatttcacagtctttaaaaaatagaagtctgaggagagaagccagagtcctgggccccgggaggcccctcgaggcctcagcattccctgtcccttgaggtctgtctgcaggcctggccacagcacacgtggcccgttattggagccaggcctacaccccagcaaccatgtccaagggacctgcagttggtattgatcttggcaccacctactcttgtgtgggtgttttccagcacggaaaagtcgagataattgccaatgatcagggaaaccgaaccactccaagctatgtcgcctttacggacactgaacggttgatcggtgatgccgcaaagaatcaagttgcaatgaaccccaccaacacagtttttgatgccaaacgtctgattggacgcagatttgatgatgctgttgtccagtctgatatgaaacattggccctttatggtggtgaatgatgctggcaggcccaaggtccaagtagaatacaagggagagaccaaaagcttctatccagaggaggtgtcttctatggttctgacaaagatgaaggaaattgcagaagcctaccttgggaagactgttaccaatgctgtggtcacagtgccagcttactttaatgactctcagcgtcaggctaccaaagatgctggaactattgctggtctcaatgtacttagaattattaatgagccaactgctgctgctattgcttacggcttagacaaaaaggttggagcagaaagaaacgtgctcatctttgacctgggaggtggcacttttgatgtgtcaatcctcactattgaggatggaatctttgaggtcaagtctacagctggagacacccacttgggtggagaagattttgacaaccgaatggtcaaccattttattgctgagtttaagcgcaagcataagaaggacatcagtgagaacaagagagctgtaagacgcctccgtactgcttgtgaacgtgctaagcgtaccctctcttccagcacccaggccagtattgagatcgattctctctatgaaggaatcgacttctatacctccattacccgtgcccgatttgaagaactgaatgctgacctgttccgtggcaccctggacccagtagagaaagcccttcgagatgccaaactagacaagtcacagattcatgatattgtcctggttggtggttctactcgtatccccaagattcagaagcttctccaagacttcttcaatggaaaagaactgaataagagcatcaaccctgatgaagctgttgcttatggtgcagctgtccaggcagccatcttgtctggagacaagtctgagaatgttcaagatttgctgctcttggatgtcactcctctttcccttggtattgaaactgctggtggagtcatgactgtcctcatcaagcgtaataccaccattcctaccaagcagacacagaccttcactacctattctgacaaccagcctggtgtgcttattcaggtttatgaaggcgagcgtgccatgacaaaggataacaacctgcttggcaagtttgaactcacaggcatacctcctgcaccccgaggtgttcctcagattgaagtcacttttgacattgatgccaatggtatactcaatgtctctgctgtggacaagagtacgggaaaagagaacaagattactatcactaatgacaagggccgtttgagcaaggaagacattgaacgtatggtccaggaagctgagaagtacaaagctgaagatgagaagcagagggacaaggtgtcatccaagaattcacttgagtcctatgccttcaacatgaaagcaactgttgaagatgagaaacttcaaggcaagattaacgatgaggacaaacagaagattctggacaagtgtaatgaaattatcaactggcttgataagaatcagactgctgagaaggaagaatttgaacatcaacagaaagagctggagaaagtttgcaaccccatcatcaccaagctgtaccagagtgcaggaggcatgccaggaggaatgcctgggggatttcctggtggtggagctcctccctctggtggtgcttcctcagggcccaccattgaagaggttgattaagccaaccaagtgtagatgtagcattgttccacacatttaaaacatttgaaggacctaaattcgtagcaaattctgtggcagttttaaaaagttaagctgctatagtaagttactgggcattctcaatacttgaatatggaacatatgcacaggggaaggaaataacattgcactttataaacactgtattgtaagtggaaaatgcaatgtcttaaataaaactatttaaaattggcaccataaaaaaaaaaaaaaaaaaaaa

SEQ ID NO: 884 - protein, 646 aa, Homo sapien
MSKGPAVGIDLGTTYSCVGVFQHGKVEIIANDQGNRTTPSYVAFTDTERLIGDAAKNQVAMNPTNTVFDAKRLIGRRFDDAVVQSDMKHWPFMVVNDAGRPKVQVEYKGETKSFYPEEVSSMVLTKMKEIAEAYLGKTVTNAVVTVPAYFNDSQRQATKDAGTIAGLNVLRIINEPTAAAIAYGLDKKVGAERNVLIFDLGGGTFDVSILTIEDGIFEVKSTAGDTHLGGEDFDNRMVNHFIAEFKRKHKKDISENKRAVRRLRTACERAKRTLSSSTQASIEIDSLYEGIDFYTSITRARFEELNADLFRGTLDPVEKALRDAKLDKSQIHDIVLVGGSTRIPKIQKLLQDFFNGKELNKSINPDEAVAYGAAVQAAILSGDKSENVQDLLLLDVTPLSLGIETAGGVMTVLIKRNTTIPTKQTQTFTTYSDNQPGVLIQVYEGERAMTKDNNLLGKFELTGIPPAPRGVPQIEVTFDIDANGILNVSAVDKSTGKENKITITNDKGRLSKEDIERMVQEAEKYKAEDEKQRDKVSSKNSLESYAFNMKATVEDEKLQGKINDEDKQKILDKCNEIINWLDKNQTAEKEEFEHQQKELEKVCNPIITKLYQSAGGMPGGMPGGFPGGGAPPSGGASSGPTIEEVD

SEQ ID NO: 885 - DNA, 1193 bp, Homo sapien
tgaagatcagctattagaagagaaagatcagttaagtcctttggacctgatcagcttgatacaagaactactgatttcaacttctttggcttaattctctcggaaacgatgaaatatacaagttatatcttggcttttcagctctgcatcgttttgggttctcttggctgttactgccaggacccatatgtaaaagaagcagaaaaccttaagaaatattttaatgcaggtcattcagatgtagcggataatggaactcttttcttaggcattttgaagaattggaaagaggagagtgacagaaaaataatgcagagccaaattgtctccttttacttcaaactttttaaaaactttaaagatgaccagagcatccaaaagagtgtggagaccatcaaggaagacatgaatgtcaagtttttcaatagcaacaaaaagaaacgagatgacttcgaaaagctgactaattattcggtaactgacttgaatgtccaacgcaaagcaatacatgaactcatccaagtgatggctgaactgtcgccagcagctaaaacagggaagcgaaaaaggagtcagatgctgtttcaaggtcgaagagcatcccagtaatggttgtcctgcctgcaatatttgaattttaaatctaaatctatttattaatatttaacattatttatatggggaatatatttttagactcatcaatcaaataagtatttataatagcaacttttgtgtaatgaaaatgaatatctattaatatatgtattatttataattcctatatcctgtgactgtctcacttaatcctttgttttctgactaattaggcaaggctatgtgattacaaggctttatctcaggggccaactaggcagccaacctaagcaagatcccatgggttgtgtgtttatttcacttgatgatacaatgaacacttataagtgaagtgatactatccagttactgccggtttgaaaatatgcctgcaatctgagccagtgctttaatggcatgtcagacagaacttgaatgtgtcaggtgaccctgatgaaaacatagcatctcaggagatttcatgcctggtgcttccaaatattgttgacaactgtgactgtacccaaatggaaagtaactcatttgttaaaattatcaatatctaatatatatgaataaagtgtaagttcacaact

SEQ ID NO: 886 - protein, 166 aa, Homo sapien
MKYTSYILAFQLCIVLGSLGCYCQDPYVKEAENLKKYFNAGHSDVADNGTLFLGILKNWKEESDRKIMQSQIVSFYFKLFKNFKDDQSIQKSVETIKEDMNVKFFNSNKKKRDDFEKLTNYSVTDLNVQRKAIHELIQVMAELSPAAKTGKRKRSQMLFQGRRASQ

SEQ ID NO: 887 - DNA, 2610 bp, Homo sapien
ggactgttaactgtttctggcaaacatgaagtcaggcctctggtatttctttctcttctgcttgcgcattaaagttttaacaggagaaatcaatggttctgccaattatgagatgtttatatttcacaacggaggtgtacaaattttatgcaaatatcctgacattgtccagcaatttaaaatgcagttgctgaaaggggggcaaatactctgcgatctcactaagacaaaaggaagtggaaacacagtgtccattaagagtctgaaattctgccattctcagttatccaacaacagtgtctctttttttctatacaacttggaccattctcatgccaactattacttctgcaacctatcaatttttgatcctcctccttttaaagtaactcttacaggaggatatttgcatatttatgaatcacaactttgttgccagctgaagttctggttacccataggatgtgcagcctttgttgtagtctgcattttgggatgcatacttatttgttggcttacaaaaaagaagtattcatccagtgtgcacgaccctaacggtgaatacatgttcatgagagcagtgaacacagccaaaaaatctagactcacagatgtgaccctataatatggaactctggcacccaggcatgaagcacgttggccagttttcctcaacttgaagtgcaagattctcttatttccgggaccacggagagtctgacttaactacatacatcttctgctggtgttttgttcaatctggaagaatgactgtatcagtcaatggggattttaacagactgccttggtactgccgagtcctctcaaaacaaacaccctcttgcaaccagctttggagaaagcccagctcctgtgtgctcactgggagtggaatccctgtctccacatctgctcctagcagtgcatcagccagtaaaacaaacacatttacaagaaaaatgttttaaagatgccaggggtactgaatctgcaaagcaaatgagcagccaaggaccagcatctgtccgcatttcactatcatactacctcttctttctgtagggatgagaattcctcttttaatcagtcaagggagatgcttcaaagctggagctattttatttctgagatgttgatgtgaactgtacattagtacatactcagtactctccttcaattgctgaaccccagttgaccattttaccaagactttagatgctttcttgtgccctcaattttctttttaaaaatacttctacatgactgcttgacagcccaacagccactctcaatagagagctatgtcttacattctttcctctgctgctcaatagttttatatatctatgcatacatatatacacacatatgtatataaaattcataatgaatatatttgcctatattctccctacaagaatatttttgctccagaaagacatgttcttttctcaaattcagttaaaatggtttactttgttcaagttagtggtaggaaacattgcccggaattgaaagcaaatttattttattatcctattttctaccattatctatgttttcatggtgctattaattacaagtttagttctttttgtagatcatattaaaattgcaaacaaaatcatctttaatgggccagcattctcatggggtagagcagaatattcatttagcctgaaagctgcagttactataggttgctgtcagactatacccatggtgcctctgggcttgacaggtcaaaatggtccccatcagcctggagcagccctccagacctgggtggaattccagggttgagagactcccctgagccagaggccactaggtattcttgctcccagaggctgaagtcaccctgggaatcacagtggtctacctgcattcataattccaggatctgtgaagagcacatatgtgtcagggcacaattccctctcataaaaaccacacagcctggaaattggccctggcccttcaagatagccttctttagaatatgatttggctagaaagattcttaaatatgtggaatatgattattcttagctggaatattttctctacttcctgtctgcatgcccaaggcttctgaagcagccaatgtcgatgcaacaacatttgtaactttaggtaaactgggattatgttgtagtttaacattttgtaactgtgtgcttatagtttacaagtgagacccgatatgtcattatgcatacttatattatcttaagcatgtgtaatgctggatgtgtacagtacagtacttaacttgtaatttgaatctagtatggtgttctgttttcagctgacttggacaacctgactggctttgcacaggtgttccctgagttgtttgcaggtttctgtgtgtggggtggggtatggggaggagaaccttcatggtggcccacctggcctggttgtccaagctgtgcctcgacacatcctcatcccaagcatgggacacctcaagatgaataataattcacaaaatttctgtgaaatcaaatccagttttaagaggagccacttatcaaagagattttaacagtagtaagaaggcaaagaataaacatttgatattcagcaactgaaaaaaaaaaa

SEQ ID NO: 888 - protein, 199 aa, Homo sapien
MKSGLWYFFLFCLRIKVLTGEINGSANYEMFIFHNGGVQILCKYPDIVQQFKMQLLKGGQILCDLTKTKGSGNTVSIKSLKFCHSQLSNNSVSFFLYNLDHSHANYYFCNLSIFDPPPFKVTLTGGYLHIYESQLCCQLKFWLPIGCAAFVVVCILGCILICWLTKKKYSSSVHDPNGEYMFMRAVNTAKKSRLTDVTL

SEQ ID NO: 889 - DNA, 2206 bp, Homo sapien
ggaggaggaggaggaggaggaagaagaggtagcggcaaggtcgcggtctgaggttccggtgctcgccgccgcccagctcccagccgaggctttctcaaccgcgtcaataaaaggccgccccgacccgcccccgcgccccgcagccctgccggacaccccgggctgcagctgagcgggcgcagacgggccgaggcgggcgccgggcgcgcagggaccgagggaccgagtgctccccatgagcgcacgtgggccgggcggtccgcaagcccggctgagagcgcgccatggggcaggcgggctgcaaggggctctgcctgtcgctgttcgactacaagaccgagaagtatgtcatcgccaagaacaagaaggtgggcctgctgtaccggctgctgcaggcctccatcctggcgtacctggtcgtatgggtgttcctgataaagaagggttaccaagacgtcgacacctccctgcagagtgctgtcatcaccaaagtcaagggcgtggccttcaccaacacctcggatcttgggcagcggatctgggatgtcgccgactacgtcattccagcccagggagagaacgtcttttttgtggtcaccaacctgattgtgacccccaaccagcggcagaacgtctgtgctgagaatgaaggcattcctgatggcgcgtgctccaaggacagcgactgccacgctggggaagcggttacagctggaaacggagtgaagaccggccgctgcctgcggagagagaacttggccaggggcacctgtgagatctttgcctggtgcccgttggagacaagctccaggccggaggagccattcctgaaggaggccgaagacttcaccattttcataaagaaccacatccgtttccccaaattcaacttctccaaaagcaatgtgatggacgtcaaggacagatctttcctgaaatcatgccactttggccccaagaaccactactgccccatcttccgactgggctccgtgatccgctgggccgggagcgacttccaggatatagccctggagggtggcgtgataggaattaatattgaatggaactgtgatcttgataaagctgcctctgagtgccaccctcactattcttttagccgtctggacaataaactttcaaagtctgtctcctccgggtacaacttcagatttgccagatattaccgagacgcagccggggtggagttccgcaccctgatgaaagcctacgggatccgctttgacgtgatggtgaacggcaagggtgctttcttctgcgacctggtactcatctacctcatcaaaaagagagagttttaccgtgacaagaagtacgaggaagtgaggggcctagaagacagttcccaggaggccgaggacgaggcatcggggctggggctatctgagcagctcacatctgggccagggctgctggggatgccggagcagcaggagctgcaggagccacccgaggcgaagcgtggaagcagcagtcagaaggggaacggatctgtgtgcccacagctcctggagccccacaggagcacgtgaattgcctctgcttacgttcaggccctgtcctaaacccagccgtctagcacccagtgatcccatgcctttgggaatcccaggatgctgcccaacgggaaatttgtacattgggtgctatcaatgccacatcacagggaccagccatcacagagcaaagtgacctccacgtctgatgctggggtcatcaggacggacccatcatggctgtctttttgccccaccccctgccgtcagttcttcctttctccgtggctggcttcccgcactagggaacgggttgtaaatggggaacatgacttccttccggagtccttgagcacctcagctaaggaccgcagtgccctgtagagttcctagattacctcactgggaatagcattgtgcgtgtccggaaaagggctccatttggttccagcccactcccctctgcaagtgccgcagcttccctcagagcatactctccagtggatccaagtactctctctcctaaagacaccaccttcctgccagctgtttgcccttaggccagtacacagaattaaagtgggggagatggcagacgctttctgggacctgcccaagatatgtattctctgacactcttatttggtcataaaacaataaatggtgtcaatttcaaaaaaaaaaaaaaa

SEQ ID NO: 890 - protein, 422 aa, Homo sapien
MGQAGCKGLCLSLFDYKTEKYVIAKNKKVGLLYRLLQASILAYLVVWVFLIKKGYQDVDTSLQSAVITKVKGVAFTNTSDLGQRIWDVADYVIPAQGENVFFVVTNLIVTPNQRQNVCAENEGIPDGACSKDSDCHAGEAVTAGNGVKTGRCLRRGNLARGTCEIFAWCPLETSSRPEEPFLKEAEDFTIFIKNHIRFPKFNFSKNNVMDVKDRSFLKSCHFGPKNHYCPIFRLGSIVRWAGSDFQDIALRGGVIGINIEWNCDLDKAASECHPHYSFSRLDNKLSKSVSSGYNFRFARYYRDAAGVEFRTLMKAYGIRFDVMVNGKGAFFCDLVLIYLIKKREFYRDKKYEEVRGLEDSSQEAEDEASGLGLSEQLTSGPGLLGMPEQQELQEPPEAKRGSSSQKGNGSVCPQLLEPHRST

SEQ ID NO: 891 - DNA, 1313 bp, Homo sapien
aattggaggagttgttgttaggccgtcccggagacccggtcgggagggaggaaggtggcaagatggtgttggaaagcactatggtgtgtgtggacaacagtgagtatatgcggaatggagacttcttacccaccaggctgcaggcccagcaggatgctgtcaacatagtttgtcattcaaagacccgcagcaaccctgagaacaacgtgggccttatcacactggctaatgactgtgaagtgctgaccacactcaccccagacactggccgtatcctgtccaagctacatactgtccaacccaagggcaagatcaccttctgcacgggcatccgcgtggcccatctggctctgaagcaccgacaaggcaagaatcacaagatgcgcatcattgcctttgtgggaagcccagtggaggacaatgagaaggatctggtgaaactggctaaacgcctcaagaaggagaaagtaaatgttgacattatcaattttggggaagaggaggtgaacacagaaaagctgacagcctttgtaaacacgttgaatggcaaagatggaaccggttctcatctggtgacagtgcctcctgggcccagtttggctgatgctctcatcagttctccgattttggctggtgaaggtggtgccatgctgggtcttggtgccagtgactttgaatttggagtagatcccagtgctgatcctgagctggccttggcccttcgtgtatctatggaagagcagcggcagcggcaggaggaggaggcccggcgggcagctgcagcttctgctgctgaggccgggattgctacgactgggactgaagactcagacgatgccctgctgaagatgaccatcagccagcaagagtttggccgcactgggcttcctgacctaagcagtatgactgaggaagagcagattgcttatgccatgcagatgtccctgcagggagcagagtttggccaggcggaatcagcagacattgatgccagctcagctatggacacatctgagccagccaaggaggaggatgattacgacgtgatgcaggaccccgagttccttcagagtgtcctagagaacctcccaggtgtggatcccaacaatgaagccattcgaaatgctatgggctccctggcctcccaggccaccaaggacggcaagaaggacaagaaggaggaagacaagaagtgagactggagggaaagggtagctgagtctgcttaggggactgcatgggaagcacggaatatagggttagatgtgtgttatctgtaaccattacagcctaaataaagcttggcaactttt

SEQ ID NO: 892 - protein, 377 aa, Homo sapien
MVLESTMVCVDNSEYMRNGDFLPTRLQAQQDAVNIVCHSKTRSNPENNVGLITLANDCEVLTTLTPDTGRILSKLHTVQPKGKITFCTGIRVAHLALKHRQGKNHKMRIIAFVGSPVEDNEKDLVKLAKRLKKEKVNVDIINFGEEEVNTEKLTAFVNTLNGKDGTGSHLVTVPPGPSLADALISSPILAGEGGAMLGLGASDFEFGVDPSADPELALALRVSMEEQRQRQEEEARRAAAASAAEAGIATTGTEDSDDALLKMTISQQEFGRTGLPDLSSMTEEEQIAYAMQMSLQGAEFGQAESADIDASSAMDTSEPAKEEDDYDVMQDPEFLQSVLENLPGVDPNNEAIRNAMGSLASQATKDGKKDKKEEDKK

SEQ ID NO: 893 - DNA, 3166 bp, Homo sapien
aagagctccagagagaagtcgaggaagagagagacggggtcagagagagcgcgcgggcgtgcgagcagcgaaagcgacaggggcaaagtgagtgacctgcttttgggggtgaccgccggagcgcggcgtgagccctcccccttgggatcccgcagctgaccagtcgcgctgacggacagacagacagacaccgcccccagccccagttaccacctcctccccggccggcggcggacagtggacgcggcggcgagccgcgggcaggggccggagcccgcccccggaggcggggtggagggggtcggagctcgcggcgtcgcactgaaacttttcgtccaacttctgggctgttctcgcttcggaggagccgtggtccgcgcgggggaagccgagccgagcggagccgcgagaagtgctagctcgggccgggaggagccgcagccggaggagggggaggaggaagaagagaaggaagaggagagggggccgcagtggcgactcggcgctcggaagccgggctcatggacgggtgaggcggcggtgtgcgcagacagtgctccagcgcgcgcgctccccagccctggcccggcctcgggccgggaggaagagtagctcgccgaggcgccgaggagagcgggccgccccacagcccgagccggagagggacgcgagccgcgcgccccggtcgggcctccgaaaccatgaactttctgctgtcttgggtgcattggagccttgccttgctgctctacctccaccatgccaagtggtcccaggctgcacccatggcagaaggaggagggcagaatcatcacgaagtggtgaagttcatggatgtctatcagcgcagctactgccatccaatcgagaccctggtggacatcttccaggagtaccctgatgagatcgagtacatcttcaagccatcctgtgtgcccctgatgcgatgcgggggctgctccaatgacgagggcctggagtgtgtgcccactgaggagtccaacatcaccatgcagattatgcggatcaaacctcaccaaggccagcacataggagagatgagcttcctacagcacaacaaatgtgaatgcagaccaaagaaagatagagcaagacaagaaaatccctgtgggccttgctcagagcggagaaagcatttgtttgtacaagatccgcagacgtgtaaatgttcctgcaaaaacacacactcgcgttgcaaggcgaggcagcttgagttaaacgaacgtacttgcagatgtgacaagccgaggcggtgagccgggcaggaggaaggagcctccctcagggtttcgggaaccagatctctctccaggaaagactgatacagaacgatcgatacagaaaccacgctgccgccaccacaccatcaccatcgacagaacagtccttaatccagaaacctgaaatgaaggaagaggagactctgcgcagagcactttgggtccggagggcgagactccggcggaagcattcccgggcgggtgacccagcacggtccctcttggaattggattcgccattttatttttcttgctgctaaatcaccgagcccggaagattagagagttttatttctgggattcctgtagacacacccacccacatacatacatttatatatatatatattatatatatataaaaataaatatctctattttatatatataaaatatatatattctttttttaaattaacagtgctaatgttattggtgtcttcactggatgtatttgactgctgtggacttgagttgggaggggaatgttcccactcagatcctgacagggaagaggaggagatgagagactctggcatgatcttttttttgtcccacttggtggggccagggtcctctcccctgcccaagaatgtgcaaggccagggcatgggggcaaatatgacccagttttgggaacaccgacaaacccagccctggcgctgagcctctctaccccaggtcagacggacagaaagacaaatcacaggttccgggatgaggacaccggctctgaccaggagtttggggagcttcaggacattgctgtgctttggggattccctccacatgctgcacgcgcatctcgcccccaggggcactgcctggaagattcaggagcctgggcggccttcgcttactctcacctgcttctgagttgcccaggaggccactggcagatgtcccggcgaagagaagagacacattgttggaagaagcagcccatgacagcgccccttcctgggactcgccctcatcctcttcctgctccccttcctggggtgcagcctaaaaggacctatgtcctcacaccattgaaaccactagttctgtccccccaggaaacctggttgtgtgtgtgtgagtggttgaccttcctccatcccctggtccttcccttcccttcccgaggcacagagagacagggcaggatccacgtgcccattgtggaggcagagaaaagagaaagtgttttatatacggtacttatttaatatccctttttaattagaaattagaacagttaatttaattaaagagtagggttttttttcagtattcttggttaatatttaatttcaactatttatgagatgtatcttttgctctctcttgctctcttatttgtaccggtttttgtatataaaattcatgtttccaatctctctctccctgatcggtgacagtcactagcttatcttgaacagatatttaattttgctaacactcagctctgccctccccgatcccctggctccccagcacacattcctttgaaagagggtttcaatatacatctacatactatatatatattgggcaacttgtatttgtgtgtatatatatatatatatgtttatgtatatatgtgatcctgaaaaaataaacatcgctattctgttttttatatgttcaaaccaaacaagaaaaaatagagaattctacatactaaatctctctccttttttaattttaatatttgttatcatttatttattggtgctactgtttatccgtaataattgtggggaaaagatattaacatcacgtctttgtctctagtgcagtttttcgagatattccgtagtacatatttatttttaaacaacgacaaagaaatacagatatatcttaaaaaaaaaaaa

SEQ ID NO: 894 - protein, 191 aa, Homo sapien
MNFLLSWVHWSLALLLYLHHAKWSQAAPMAEGGGQNHHEVVKFMDVYQRSYCHPIETLVDIFQEYPDEIEYIFKPSCVPLMRCGGCSNDEGLECVPTEESNITMQIMRIKPHQGQHIGEMSFLQHNKCECRPKKDRARQENPCGPCSERRKHLFVQDPQTCKCSCKNTHSRCKARQLELNERTCRCDKPRR

SEQ ID NO: 895 - DNA, 2662 bp, Homo sapien
gtctacaccagcggtgtcgctgcccgaaagtgagagaaggctgatattgctagctggaatccaggcctgggtgctgcatggtggcgcccctccccgtgaccaccgctgcgttttctcgggctttctctgaggagctgctcttgtgctgtttggcccctgcctactcggaatggaacaaagcatcgaacaaacaactgagatcctgttgtgcctatcacctgttgaagttgccagtcttaaggaaggaatcaatttctttcgcaataagagcactggcaaagactacgtcttgtacaagaataagagccgactgagggcatgcaagaatatgtgcaagcaccaaggaggcctgttcataaaagatatcgaggatttagccggaagttgttgaaatggatgaaaacaacggacttttgcttttagaactgaatcctcctaacccttgggacttacagcccagatctcctgaagagttggcttttggagaagtacagataacatatctcactcatgcctgcatggacctcaagttaggagacaagagaatggtgtttgacccttggttaatcggtcctgcttttgcccgtggatggtggttgctccatgagcctccatctgattggctggagaggctgtgccaggcagacctcatttacatcagtcatctgcactcagaccacctgagttaccccacactgaaaaagcttgctgggagaagaccagatattcccatttatgttggaaacacagaaaggcctgtattttggaatctgaatcagagcggtgtccagttgactaatatcaatgtcgtgccatttggaatatggcagcaggtggacaaaaatcttcgattcatgatcttgatggacggtgttcatcctgagatggacacttgcattattgtggagtacaaaggtcataaaatactcaatatagtagactgcaccagacccaatgggggaaggctgcctatgaaggttgctctaatgatgagtgattttgctggaggagcatcaggctttccaatgactttcagtggtggaaaatttacggaggaatggaaagcccaattcattaaaacagaaaggaagaagctcctgaactacaaggctcggctggtgaagaacctgcaaccccgaatttattgtccctttgctgggtattttgtggaatctcacccatcagacaagtacatcaaggaaacaaacaccaaaaatgacccaaatgaactcaacaatcttatcaagaaaaactctgatgtgataacatggacccctcgaccgggagccacccttgatctgggaagaatgctgaaggatcgaacagacagcaagggcatcatagagcctccagaggggacaaaaatttacaaggattcctgggattttgaaccttatttggaaatcttgaatgctgctctaggagatgaaatatttcttcactcatcctggataaaagaatacttcacttgggctggatttaaagattacaaccttgtggtcaggatgattgagacagatgaggacttcaatccttttcctggaggatatgactatttggttgactttttagatttatccttcccaaaagaaagaccacaacgagaacatccctatgaggaaatccatagccgggtggatgtcatcagacacgtggtgaagaatggtctactctgggatgagttgtatataggattccaaacacggctccagcgggatcctgacatataccatcacctgttttggaatcattttcaaataaaactccccctcacaccacccaactggaagtcattcctgatgtgctgtgagcagaatgggcctgcgattttgcaagaatgcaaaaccacatgaaaatttcaagaattcactgatctgatgcaaaataaaaatttatcattacatcttgaacccaggaagcttacagcaaagagactatgctttatgacgtcagcaatagataattccacgttgcctttgtgatttgtatatatagcttacatttgtggatcactacatagccagattcaaaaatattttacttgttccatccacagttctctacagaaagaaccaatgaacccaataggaacaaattctctgtggaaaacaaagcatagctgtagtagatacgaatccaatcacagaggaaacaggaagagaaaaacatccaagactacagtgaaaactggaaatggtctgttttcgtgatattcgtatgattaagatgcaaattttttcttaggaaaatgtgattgttaactagcattctgttttacatgttgacatttctaacacacacaccactgatttgaacttcaaaatttattttctgattatatatgctaggtctgattctgaagatacaagaattcaatggtggaatttgtctcctgaaatttctagattcataattagaagtgtttattaccaacttctcacttagattaacatcagtgatgtttgattattctggttaaccgctcacatgcataacaataatgctagaaattcaggaattataattttgtgatttatactgtgtggtaaattattcagttctcactgcaaataaatataatgtatatcaatgtaatgtaggtcagaatgtctatggtgagcaaataaaagattattttaaaatatgaaaaaaaaaaaaaaaa

SEQ ID NO: 896 - protein, 486 aa, Homo sapien
MDENNGLLLLELNPPNPWDLQPRSPEELAFGEVQITYLTHACMDLKLGDKRMVFDPWLIGPAFARGWWLLHEPPSDWLERLCQADLIYISHLHSDHLSYPTLKKLAGRRPDIPIYVGNTERPVFWNLNQSGVQLTNINVVPFGIWQQVDKNLRFMILMDGVHPEMDTCIIVEYKGHKILNIVDCTRPNGGRLPMKVALMMSDFAGGASGFPMTFSGGKFTEEWKAQFIKTERKKLLNYKARLVKNLQPRIYCPFAGYFVESHPSDKYIKETNTKNDPNELNNLIKKNSDVITWTPRPGATLDLGRMLKDRTDSKGIIEPPEGTKIYKDSWDFEPYLEILNAALGDEIFLHSSWIKEYFTWAGFKDYNLVVRMIETDEDFNPFPGGYDYLVDFLDLSFPKERPQREHPYEEIHSRVDVIRHVVKNGLLWDELYIGFQTRLQRDPDIYHHLFWNHFQIKLPLTPPNWKSFLMCCEQNGPAILQECKTT

SEQ ID NO: 897 - DNA, 2435 bp, Homo sapien
gcagcgccgcgactcgtgcgggtaggcgtctgcgctcggtttgagggctcggcgcggggtttcctgttcctccttctgcgcggctgcagctcgggacttcggcctgacccagcccccatggcttcagaagagctacagaaagatctagaagaggtaaaggtgttgctggaaaaggctactaggaaaagagtacgtgatgcccttacagctgaaaaatccaagattgagacagaaatcaagaacaagatgcaacagaaatcacagaagaaagcagaacttcttgataatgaaaaaccagctgctgtggttgctcccattacaacgggctatacggtgaaaatcagtaattatggatgggatcagtcagataagtttgtgaaaatctacattaccttaactggagttcatcaagttcccactgagaatgtgcaggtgcatttcacagagaggtcatttgatcttttggtaaagaatctaaatgggaagagttactccatgattgtgaacaatctcttgaaacccatctctgtggaaggcagttcaaaaaaagtcaagactgatacagttcttatattgtgtagaaagaaagtggaaaacacaaggtgggattacctgacccaggttgaaaaggagtgcaaagaaaaagagaagccctcctatgacactgaaacagatcctagtgagggattgatgaatgttctaaagaaaatttatgaagatggagacgatgatatgaagcgaaccattaataaagcctgggtggaatcaagagagaagcaagccaaaggagacacggaattttgagactttaaagtcgttttgggaactgtgatgtgatgtggaaatactgatgtttccagtaagggaatattggtgagctgcatatataaatttgacagatagctatttacatagccttctaagtaaaggcaatgaattctccatttcctactggaggatttatttaaataaaatatgcttattaaacactcctgcaaagatggttttattagtaccctggtcattttgttcaaggaagggttatattgcattctcacgtgaaatataaaaagcaagtcttgcccaataaaaacgctacattgtgtgtattttttgttcagctaagaattggaaaagtatttgcttgccttttaagttactgacatcagcttccaccagtgtaaaaattgagtaaaacctgaagttttgcataaaatgcaaatcggtgcctgtgcttgaaggttgctgtagagcatctgaccccttattaccaccttaagcaatgtatatgccatgcattaccatgcactaattcaatcacaggtgtttctatctagatttaaatatatttgtcaatgaatgtggaatagaaaatctaaacatgacaataatagacatatctttgtatggtaccagttagttttgccgtggatcagatggtttataaaagtaataaccataaagcaaaaaataatttgaaagcccgtctattcctatgctcaataaagttaagtttttcttcattagaacagttttatgatttatttgtctaggagtatgtcagaaaaatcaggcttttagtaggaattactcctattccccctgaagtcaggaccagtgcctgtgatctccattactttattttcctggaggtattagccaacacagttagatcagagaaagcaattgaagccaggcatgaaggctggcgcccgtaatcccagctactaaggctggaggatcacttcagcccaggagtttaaggctgcagtgagctatgatgatgccactgtactgcagcttgggtaacagattgagaacctgtctcattaaaaaaaaaaaaaaaaaaaaagccgttagacacacaggaaaaatccagaagggtaaactaaactaaagctacaattaatatgggaatttggaagaagtggtaggatttaaaatacagaaacagtttatgtataggatagctataagtaaatactgaaacacattatgcctctgtaattggggttgacacatgaacagaatagcagacacaatgcatatgaaagttacagaatatggtaaaagtggggtaaagatgggtttttaatgatactaagataactgaaaataggcatatagatatattccaagccgcctgacgatctaattgtaaaaagtaaagcatacaaatactagaagaaaatggaggaaaacgacattatatgtgacttaaaacctagaagaaataaataaaactattgatcaattttaactacataaaaatgtttataggacaagaaaaaccccaccataacccaaggcaaacaatgtattgacaggattccaataattaagaatacttcatacaaaaagaaatgtaaatgacctttaacatgtaaagatgctcaccttgttcagaagagaataaaccagtgtttttacctttc

SEQ ID NO: 898 - protein, 228 aa, Homo sapien
MASEELQKDLEEVKVLLEKATRKRVRDALTAEKSKIETEIKNKMQQKSQKKAELLDNEKPAAVVAPITTGYTVKISNYGWDQSDKFVKIYITLTGVHQVPTENVQVHFTERSFDLLVKNLNGKSYSMIVNNLLKPISVEGSSKKVKTDTVLILCRKKVENTRWDYLTQVEKECKEKEKPSYDTETDPSEGLMNVLKKIYEDGDDDMKRTINKAWVESREKQAKGDTEF

SEQ ID NO: 899 - DNA, 1168 bp, Homo sapien
tccaatcgacaagaagctggaaaagaatgatgttgtccttaaacaacctacagaatatcatctataacccggtaatcccgtttgttggcaccattcctgatcagctggatcctggaactttgattgtgatacgtgggcatgttcctagtgacgcagacagattccaggtggatctgcagaatggcagcagcatgaaacctcgagccgatgtggcctttcatttcaatcctcgtttcaaaagggccggctgcattgtttgcaatactttgataaatgaaaaatggggacgggaagagatcacctatgacacgcctttcaaaagagaaaagtcttttgagatcgtgattatggtgctgaaggacaaattccaggtggctgtaaatggaaaacatactctgctctatggccacaggatcggcccagagaaaatagacactctgggcatttatggcaaagtgaatattcactcaattggttttagcttcagctcggacttacaaagtacccaagcatctagtctggaactgacagagataagtagagaaaatgttccaaagtctggcacgccccagcttcctagtaatagaggaggagacatttctaaaatcgcacccagaactgtctacaccaagagcaaagattcgactgtcaatcacactttgacttgcaccaaaataccacctatgaactatgtgtcaaagaggctgccattcgctgcaaggttgaacacccccatgggccctggacgaactgtcgtcgttaaaggagaagtgaatgcaaatgccaaaagctttaatgttgacctactagcaggaaaatcaaaggatattgctctacacttgaacccacgcctgaatattaaagcatttgtaagaaattcttttcttcaggagtcctggggagaagaagagagaaatattacctctctcccatttagtcctgggatgtactttgagatgataatttattgtgatgttagagaattcaaggttgcagtaaatggcgtacacagcctggagtacaaacacagatttaaagagctcagcagtattgacacgctggaaattaatggagacatccacttactggaagtaaggagctggtagcctacctacacagctgctacaaaaaccaaaatacagaatggcttctgtgatactggccttgc

SEQ ID NO: 900 - protein, 359 aa, Homo sapien [sequence omitted]

SEQ ID NO: 901 - DNA, 3147 bp, Homo sapien
gtcgcgccattttgccggggtttgaatgtgaggcggagcggcggcaggagcggatagtgccagctacggtccgcggctggggttccctcctccgtttctgtatccccacgagatcctatagcaatggaactcagcgatgcaaatctgcaaacactaacagaatatttaaagaaaacacttgatcctgatcctgccatccgacgtccagctgagaaatttcttgaatctgttgaaggaaatcagaattatccactgttgcttttgacattactggagaagtcccaggataatgttatcaaagtatgtgcttcagtaacattcaaaaactatattaaaaggaactggagaattgttgaagatgaaccaaacaaaatttgtgaagccgatcgagtggccattaaagccaacatagtgcacttgatgcttagcagcccagagcaaattcagaagcagttaagtgatgcaattagcattattggcagagaagattttccacagaaatggcctgacttgctgacagaaatggtgaatcgctttcagagtggagatttccatgttattaatggagtcctccgtacagcacattcattatttaaaagataccgtcatgaatttaagtcaaacgagttatggactgaaattaagcttgttctggatgcctttgctttgcctttgactaatctttttaaggccactattgaactctgcagtacccatgcaaatgatgcctctgccctgaggattctgttttcttccctgatcctgatctcaaaattgttctatagtttaaactttcaggatctccctgaattttgggaaggtaatatggaaacttggatgaataatttccatactctcttaacattggataataagcttttacaaactgatgatgaagaggaagccggcttattggagctcttaaaatcccagatttgtgataatgccgcactctatgcacaaaagtacgatgaagaattccagcgatacctgcctcgttttgttacagccatctggaatttactagttacaacgggtcaagaggttaaatatgatttgttggtaagtaatgcaattcaatttctggcttcagtttgtgagagacctcattataagaatctatttgaggaccagaacacgctgacaagtatctgtgaaaaggttattgtgcctaacatggaatttagagctgctgatgaagaagcatttgaagataattctgaggagtacataaggagagatttggaaggatctgatattgatactagacgcagggctgcttgtgatctggtacgaggattatgcaagttttttgagggacctgtgacaggaatcttctctggttatgttaattccatgctgcaggaatacgcaaaaaatccatctgtcaactggaaacacaaagatgcagccatctacctagtgacatctttggcatcaaaagcccaaacacagaagcatggaattacacaagcaaatgaacttgtaaacctaactgagttctttgtgaatcacatcctccctgatttaaaatcagctaatgtgaatgaatttcctgtccttaaagctgacggtatcaaatatattatgatttttagaaatcaagtgccaaaagaacatcttttagtctcgattcctctcttgattaatcatcttcaagctggaagtattgttgttcatacttacgcagctcatgctcttgaacggctctttactatgcgagggcctaacaatgccactctctttacagctgcagaaatcgcaccgtttgttgagattctgctaacaaaccttttcaaagctctcacacttcctggctcttcagaaaatgaatatattatgaaagctatcatgagaagtttttctctcctacaagaagccataatcccctacatccctactctcatcactcagcttacacagaagctattagctgttagtaagaacccaagcaaacctcactttaatcactacatgtttgaagcaatatgtttatccataagaataacttgcaaagctaaccctgctgctgttgtaaattttgaggaggctttgtttttggtgtttactgaaatcttacaaaatgatgtgcaagaatttattccatacgtctttcaagtgatgtctttgcttctggaaacacacaaaaatgacatcccgtcttcctatatggccttatttcctcatctccttcagccagtgctttgggaaagaacaggaaatattcctgctctagtgaggcttcttcaagcattcttagaacgcggttcaaacacaatagcaagtgctgcagctgacaaaattcctgggttactaggtgtctttcagaagctgattgcatccaaagcaaatgaccaccaaggtttttatcttctaaacagtataatagagcacatgcctcctgaatcagttgaccaatataggaaacaaatcttcattctgctattccagagacttcagaattccaaaacaaccaagtttatcaagagttttttagtctttattaatttgtattgcataaaatatggggcactagcactacaagaaatatttgatggtatacaaccaaaaatgtttggaatggttttggaaaaaattattattcctgaaattcagaaggtatctggaaatgtagagaaaaagatctgtgcggttggcataaccaacttactaacagaatgtcccccaatgatggacactgagtataccaaactgtggactccattattacagtctttgattggtctttttgagttacccgaagatgataccattcctgatgaggaacattttattgacatagaagatacaccaggatatcagactgccttctcacagttggcatttgctgggaaaaaagagcatgatcctgtaggtcaaatggtgaataaccccaaaattcacctggcacagtcacttcacatgttgtctaccgcctgtccaggaagggttccatcaatggtgagcaccagcctgaatgcagaagcgctccagtatctccaagggtaccttcaggcagccagtgtgacactgctttaaactgcatttttctaatgggctaaacccagatggtttcctaggaaatcacaggcttctgagcacagctgcattaaaacaaaggaagttttccttttgaacttgtcacga

SEQ ID NO: 902 - protein, 971 aa, Homo sapien
MELSDANLQTLTEYLKKTLDPDPAIRRPAEKFLESVEGNQNYPLLLLTLLEKSQDNVIKVCASVTFKNYIKRNWRIVEDEPNKICEADRVAIKANIVHLMLSSPEQIQKQLSDAISIIGREDFPQKWPDLLTEMVNRFQSGDFHVINGVLRTAHSLFKRYRHEFKSNELWTEIKLVLDAFALPLTNLFKATIELCSTHANDASALRILFSSLILISKLFYSLNFQDLPEFWEGNMETWMNNFHTLLTLDNKLLQTDDEEEAGLLELLKSQICDNAALYAQKYDEEFQRYLPRFVTAIWNLLVTTGQEVKYDLLVSNAIQFLASVCERPHYKNLFEDQNTLTSICEKVIVPNMEFRAADEEAFEDNSEEYIRRDLEGSDIDTRRRAACDLVRGLCKFFEGPVTGIFSGYVNSMLQEYAKNPSVNWKHKDAAIYLVTSLASKAQTQKHGITQANELVNLTEFFVNHILPDLKSANVNEFPVLKADGIKYIMIFRNQVPKEHLLVSIPLLINHLQAGSIVVHTYAAHALERLFTMRGPNNATLFTAAEIAPFVEILLTNLFKALTLPGSSENEYIMKAIMRSFSLLQEAIIPYIPTLITQLTQKLLAVSKNPSKPHFNHYMFEAICLSIRITCKANPAAVVNFEEALFLVFTEILQNDVQEFIPYVFQVMSLLLETHKNDIPSSYMALFPHLLQPVLWERTGNIPALVRLLQAFLERGSNTIASAAADKIPGLLGVFQKLIASKANDHQGFYLLNSIIEHMPPESVDQYRKQIFILLFQRLQNSKTTKFIKSFLVFINLYCIKYGALALQEIFDGIQPKMFGMVLEKIIIPEIQKVSGNVEKKICAVGITNLLTECPPMMDTEYTKLWTPLLQSLIGLFELPEDDTIPDEEHFIDIEDTPGYQTAFSQLAFAGKKEHDPVGQMVNNPKIHLAQSLHMLSTACPGRVPSMVSTSLNAEALQYLQGYLQAASVTLL

SEQ ID NO: 903 - DNA, 3440 bp, Homo sapien
ggcacgaggagacaaagcagcgcccgtctgcttcgggcctctggaatttagcgctcgcccagctagccgcagaaatgactgctgtccatgcaggcaacataaacttcaagtgggatcctaaaagtctagagatcaggactctggcagttgagagactgttggagcctcttgttacacaggttacaacccttgtaaacaccaatagtaaagggccctctaataagaagagaggtcgttctaagaaggcccatgttttggctgcatctgttgaacaagcaactgagaatttcttggagaagggggataaaattgcgaaggagagccagtttctcaaggaggagcttgtggctgctgtagaagatgttcgaaaacaaggtgatttgatgaaggctgctgcaggagagttcgcagatgatccctgctcttctgtgaagcgaggcaacatggttcgggcagctcgagctttgctctctgctgttacccggttgctgattttggctgacatggcagatgtctacaaattacttgttcagctgaaagttgtggaagatggtatcttgaagttgaggaatgctggcaatgaacaagacttaggaatccagtataaagccctaaaacctgaagtggataagctgaacattatggcagccaaaagacaacaggaattgaaagatgttggccatcgtgatcagatggctgcagctagaggaatcctgcagaagaacgttccgatcctctatactgcatcccaggcatgcctacagcaccctgatgtcgcagcctataaggccaacagggacctgatatacaagcagctgcagcaggcggtcacaggcatttccaatgcagcccaggccactgcctcagacgatgcctcacagcaccagggtggaggaggaggagaactggcatatgcactcaataactttgacaaacaaatcattgtggaccccttgagcttcagcgaggagcgctttaggccttccctggaggagcgtctggaaagcatcattagtggggctgccttgatggccgactcgtcctgcacgcgtgatgaccgtcgtgagcgaattgtggcagagtgtaatgctgtccgccaggccctgcaggacctgctttcggagtacatgggcaatgctggacgtaaagaaagaagtgatgcactcaattctgcaatagataaaatgaccaagaagaccagggacttgcgtagacagctccgcaaagctgtcatggaccacgtttcagattctttcctggaaaccaatgttccacttttggtattgattgaagctgcaaagaatggaaatgagaaagaagttaaggagtatgcccaagttttccgtgaacatgccaacaaattgattgaggttgccaacttggcctgttccatctcaaataatgaagaaggtgtaaagcttgttcgaatgtctgcaagccagttagaagccctctgtcctcaggttattaatgctgcactggctttagcagcaaaaccacagagtaaactggcccaagagaacatggatctttttaaagaacaatgggaaaaacaagtccgtgttctcacagatgctgtcgatgacattacttccattgatgacttcttggctgtctcagagaatcacattttggaagatgtgaacaaatgtgtcattgctctccaagagaaggatgtggatggcctggaccgcacagctggtgcaattcgaggccgggcagcccgggtcattcacgtagtcacctcagagatggacaactatgagccaggagtctacacagagaaggttctggaagccactaagctgctctccaacacagtcatgccacgttttactgagcaagtagaagcagccgtggaagccctcagctcggaccctgcccagcccatggatgagaatgagtttatcgatgcttcccgcctggtatatgatggcatccgggacatcaggaaagcagtgctgatgataaggacccctgaggagttggatgactctgactttgagacagaagattttgatgtcagaagcaggacgagcgtccagacagaagacgatcagctgatagctggccagagtgcccgggcgatcatggctcagcttccccaggagcaaaaagcgaagattgcggaacaggtggccagcttccaggaagaaaagagcaagctggatgctgaagtgtccaaatgggacgacagtggcaatgacatcattgtgctggccaagcagatgtgcatgattatgatggagatgacagactttacccgaggtaaaggaccactcaaaaatacatcggatgtcatcagtgctgccaagaaaattgctgaggcaggatccaggatggacaagcttggccgcaccattgcagaccattgccccgactcggcttgcaagcaggacctgctggcctacctgcaacgcatcgccctctactgccaccagctgaacatctgcagcaaggtcaaggccgaggtgcagaatctcggcggggagcttgttgtctctggggtggacagcgccatgtccctgatccaggcagccaagaacttgatgaatgctgtggtgcagacagtgaaggcatcctacgtcgcctctaccaaataccaaaagtcacagggtatggcttccctcaaccttcctgctgtgtcatggaagatgaaggcaccagagaaaaagccattggtgaagagagagaaacaggatgagacacagaccaagattaaacgggcatctcagaagaagcacgtgaacccggtgcaggccctcagcgagttcaaagctatggacagcatctaagtctgcccaggccggccgcccccacccctcggggctcctgaatatcagtcactgttcgtcactcaaatgaatttgctaaatacaacactgatactagattccacagggaaatgggcagactgaaccagtccaggtggtgaattttccaagaacatagtttaagttgattaaaaatgcttttagaatgcaggagcctacttctagctgtattttttgtatgcttaaataaaaataaaaattcataaccaaagagaatcccacattagcttgttagtaatgctctgaccaagccgagatgcccattctcttagtgatggcggcgttagggtttgagagaagggaatttggctcaacttcagttgagagggtgcagtccagacagcttgactgcttttaaatgaccaaagatgacctgtggtaagcaacctgggcatcttaggaagcagtccctggagaaggcatgttcccagaaaggtctctggagggacaaactcactcagtaaaacataatgtatcatgaagaaaactgattctctatgacatgaaatgaaaattttaatgcattgttataattactaatgtacgctgctgcaggacattaataaagttgcttttttaggctaaaaaaaaaaaaaaaaaaaaaaa

SEQ ID NO: 904 - protein, 906 aa, Homo sapien
MTAVHAGNINFKWDPKSLEIRTLAVERLLEPLVTQVTTLVNTNSKGPSNKKRGRSKKAHVLAASVEQATENFLEKGDKIAKESQFLKEELVAAVEDVRKQGDLMKAAAGEFADDPCSSVKRGNMVRAARALLSAVTRLLILADMADVYKLLVQLKVVEDGILKLRNAGNEQDLGIQYKALKPEVDKLNIMAAKRQQELKDVGHRDQMAAARGILQKNVPILYTASQACLQHPDVAAYKANRDLIYKQLQQAVTGISNAAQATASDDASQHQGGGGGELAYALNNFDKQIIVDPLSFSEERFRPSLEERLESIISGAALMADSSCTRDDRRERIVAECNAVRQALQDLLSEYMGNAGRKERSDALNSAIDKMTKKTRDLRRQLRKAVMDHVSDSFLETNVPLLVLIEAAKNGNEKEVKEYAQVFREHANKLIEVANLACSISNNEEGVKLVRMSASQLEALCPQVINAALALAAKPQSKLAQENMDLFKEQWEKQVRVLTDAVDDITSIDDFLAVSENHILEDVNKCVIALQEKDVDGLDRTAGAIRGRAARVIHVVTSEMDNYEPGVYTEKVLEATKLLSNTVMPRFTEQVEAAVEALSSDPAQPMDENEFIDASRLVYDGIRDIRKAVLMIRTPEELDDSDFETEDFDVRSRTSVQTEDDQLIAGQSARAIMAQLPQEQKAKIAEQVASFQEEKSKLDAEVSKWDDSGNDIIVLAKQMCMIMMEMTDFTRGKGPLKNTSDVISAAKKIAEAGSRMDKLGRTIADHCPDSACKQDLLAYLQRIALYCHQLNICSKVKAEVQNLGGELVVSGVDSAMSLIQAAKNLMNAVVQTVKASYVASTKYQKSQGMASLNLPAVSWKMKAPEKKPLVKREKQDETQTKIKRASQKKHVNPVQALSEFKAMDSI

SEQ ID NO: 905 - DNA, 9886 bp, Homo sapien
gcgagaggagtcgggatctgcgctgcagccaccgccgcggttgatactactttgaccttccgagtgcagtgaggcatacatcacaatttggaattatgcattggtttatcaatttacttgtttattgtcaccctgctgcccagatatgacttcatgaggacagtgatgtgtgttctgaaattgtgaaccatgagtctagtacttaatgatctgcttatctgctgccgtcaactagaacatgatagagctacagaacgaaagaaagaagttgagaaatttaagcgcctgattcgagatcctgaaacaattaaacatctagatcggcattcagattccaaacaaggaaaatatttgaattgggatgctgtttttagatttttacagaaatatattcagaaagaaacagaatgtctgagaatagcaaaaccaaatgtatcagcctcaacacaagcctccaggcagaaaaagatgcaggaaatcagtagtttggtcaaatacttcatcaaatgtgcaaacagaagagcacctaggctaaaatgtcaagaactcttaaattatatcatggatacagtgaaagattcatctaatggtgctatttacggagctgattgtagcaacatactactcaaagacattctttctgtgagaaaatactggtgtgaaatatctcagcaacagtggttagaattgttctctgtgtacttcaggctctatctgaaaccttcacaagatgttcatagagttttagtggctagaataattcatgctgttaccaaaggatgctgttctcagactgacggattaaattccaaatttttggactttttttccaaggctattcagtgtgcgagacaagaaaagagctcttcaggtctaaatcatatcttagcagctcttactatcttcctcaagactttggctgtcaactttcgaattcgagtgtgtgaattaggagatgaaattcttcccactttgctttatatttggactcaacataggcttaatgattctttaaaagaagtcattattgaattatttcaactgcaaatttatatccatcatccgaaaggagccaaaacccaagaaaaaggtgcttatgaatcaacaaaatggagaagtattttatacaacttatatgatctgctagtgaatgagataagtcatataggaagtagaggaaagtattcttcaggatttcgtaatattgccgtcaaagaaaatttgattgaattgatggcagatatctgtcaccaggtttttaatgaagataccagatccttggagatttctcaatcttacactactacacaaagagaatctagtgattacagtgtcccttgcaaaaggaagaaaatagaactaggctgggaagtaataaaagatcaccttcagaagtcacagaatgattttgatcttgtgccttggctacagattgcaacccaattaatatcaaagtatcctgcaagtttacctaactgtgagctgtctccattactgatgatactatctcagcttctaccccaacagcgacatggggaacgtacaccatatgtgttacgatgccttacggaagttgcattgtgtcaagacaagaggtcaaacctagaaagctcacaaaagtcagatttattaaaactctggaataaaatttggtgtattacctttcgtggtataagttctgagcaaatacaagctgaaaactttggcttacttggagccataattcagggtagtttagttgaggttgacagagaattctggaagttatttactgggtcagcctgcagaccttcatgtcctgcagtatgctgtttgactttggcactgaccaccagtatagttccaggagcggtaaaaatgggaatagagcaaaatatgtgtgaagtaaatagaagcttttctttaaaggaatcaataatgaaatggctcttattctatcagttagagggtgacttagaaaatagcacagaagtgcctccaattcttcacagtaattttcctcatcttgtactggagaaaattcttgtgagtctcactatgaaaaactgtaaagctgcaatgaattttttccaaagcgtgccagaatgtgaacaccaccaaaaagataaagaagaactttcattctcagaagtagaagaactatttcttcagacaacttttgacaagatggactttttaaccattgtgagagaatgtggtatagaaaagcaccagtccagtattggcttctctgtccaccagaatctcaaggaatcactggatcgctgtcttctgggattatcagaacagcttctgaataattactcatctgagattacaaattcagaaactcttgtccggtgttcacgtcttttggtgggtgtccttggctgctactgttacatgggtgtaatagctgaagaggaagcatataagtcagaattattccagaaagccaactctctaatgcaatgtgcaggagaaagtatcactctgtttaaaaataagacaaatgaggaattcagaattggttccttgagaaatatgatgcagctatgtacacgttgcttgagcaactgtaccaagaagagtccaaataagattgcatctggctttttcctgcgattgttaacatcaaagctaatgaatgacattgcagatatttgtaaaagtttagcatccttcatcaaaaagccatttgaccgtggagaagtagaatcaatggaagatgatactaatggaaatctaatggaggtggaggatcagtcatccatgaatctatttaacgattaccctgatagtagtgttagtgatgcaaacgaacctggagagagccaaagtaccataggtgccattaatcctttagctgaagaatatctgtcaaagcaagatctacttttcttagacatgctcaagttcttgtgtttgtgtgtaactactgctcagaccaatactgtgtcctttagggcagctgatattcggaggaaattgttaatgttaattgattctagcacgctagaacctaccaaatccctccacctgcatatgtatctaatgcttttaaaggagcttcctggagaagagtaccccttgccaatggaagatgttcttgaacttctgaaaccactatccaatgtgtgttctttgtatcgtcgtgaccaagatgtttgtaaaactattttaaaccatgtccttcatgtagtgaaaaacctaggtcaaagcaatatggactctgagaacacaagggatgctcaaggacagtttcttacagtaattggagcattttggcatctaacaaaggagaggaaatatatattctctgtaagaatggccctagtaaattgccttaaaactttgcttgaggctgatccttattcaaaatgggccattcttaatgtaatgggaaaagactttcctgtaaatgaagtatttacacaatttcttgctgacaatcatcaccaagttcgcatgttggctgcagagtcaatcaatagattgttccaggacacgaagggagattcttccaggttactgaaagcacttcctttgaagcttcagcaaacagcttttgaaaatgcatacttgaaagctcaggaaggaatgagagaaatgtcccatagtgctgagaaccctgaaactttggatgaaatttataatagaaaatctgttttactgacgttgatagctgtggttttatcctgtagccctatctgcgaaaaacaggctttgtttgccctgtgtaaatctgtgaaagagaatggattagaacctcaccttgtgaaaaaggttttagagaaagtttctgaaacttttggatatagacgtttagaagactttatggcatctcatttagattatctggttttggaatggctaaatcttcaagatactgaatacaacttatcttcttttccttttattttattaaactacacaaatattgaggatttctatagatcttgttataaggttttgattccacatctggtgattagaagtcattttgatgaggtgaagtccattgctaatcagattcaagaggactggaaaagtcttctaacagactgctttccaaagattcttgtaaatattcttccttattttgcctatgagggtaccagagacagtgggatggcacagcaaagagagactgctaccaaggtctatgatatgcttaaaagtgaaaacttattgggaaaacagattgatcacttattcattagtaatttaccagagattgtggtggagttattgatgacgttacatgagccagcaaattctagtgccagtcagagcactgacctctgtgacttttcaggggatttggatcctgctcctaatccacctcattttccatcgcatgtgattaaagcaacatttgcctatatcagcaattgtcataaaaccaagttaaaaagcattttagaaattctttccaaaagccctgattcctatcagaaaattcttcttgccatatgtgagcaagcagctgaaacaaataatgtttataagaagcacagaattcttaaaatatatcacctgtttgttagtttattactgaaagatataaaaagtggcttaggaggagcttgggcctttgttcttcgagacgttatttatactttgattcactatatcaaccaaaggccttcttgtatcatggatgtgtcattacgtagcttctccctttgttgtgacttattaagtcaggtttgccagacagccgtgacttactgtaaggatgctctagaaaaccatcttcatgttattgttggtacacttataccccttgtgtatgagcaggtggaggttcagaaacaggtattggacttgttgaaatacttagtgatagataacaaggataatgaaaacctctatatcacgattaagcttttagatccttttcctgaccatgttgtttttaaggatttgcgtattactcagcaaaaaatcaaatacagtagaggacccttttcactcttggaggaaattaaccattttctctcagtaagtgtttatgatgcacttccattgacaagacttgaaggactaaaggatcttcgaagacaactggaactacataaagatcagatggtggacattatgagagcttctcaggataatccgcaagatgggattatggtgaaactagttgtcaatttgttgcagttatccaagatggcaataaaccacactggtgaaaaagaagttctagaggctgttggaagctgcttgggagaagtgggtcctatagatttctctaccatagctatacaacatagtaaagatgcatcttataccaaggcccttaagttatttgaagataaagaacttcagtggaccttcataatgctgacctacctgaataacacactggtagaagattgtgtcaaagttcgatcagcagctgttacctgtttgaaaaacattttagccacaaagactggacatagtttctgggagatttataagatgacaacagatccaatgctggcctatctacagccttttagaacatcaagaaaaaagtttttagaagtacccagatttgacaaagaaaacccttttgaaggcctggatgatataaatctgtggattcctctaagtgaaaatcatgacatttggataaagacactgacttgtgcttttttggacagtggaggcacaaaatgtgaaattcttcaattattaaagccaatgtgtgaagtgaaaactgacttttgtcagactgtacttccatacttgattcatgatattttactccaagatacaaatgaatcatggagaaatctgctttctacacatgttcagggatttttcaccagctgtcttcgacacttctcgcaaacgagccgatccacaacccctgcaaacttggattcagagtcagagcactttttccgatgctgtttggataaaaaatcacaaagaacaatgcttgctgttgtggactacatgagaagacaaaagagaccttcttcaggaacaatttttaatgatgctttctggctggatttaaattatctagaagttgccaaggtagctcagtcttgtgctgctcactttacagctttactctatgcagaaatctatgcagataagaaaagtatggatgatcaagagaaaagaagtcttgcatttgaagaaggaagccagagtacaactatttctagcttgagtgaaaaaagtaaagaagaaactggaataagtttacaggatcttctcttagaaatctacagaagtataggggagccagatagtttgtatggctgtggtggagggaagatgttacaacccattactagactacgaacatatgaacacgaagcaatgtggggcaaagccctagtaacatatgacctcgaaacagcaatcccctcatcaacacgccaggcaggaatcattcaggccttgcagaatttgggactctgccatattctttccgtctatttaaaaggattggattatgaaaataaagactggtgtcctgaactagaagaacttcattaccaagcagcatggaggaatatgcagtgggaccattgcacttccgtcagcaaagaagtagaaggaaccagttaccatgaatcattgtacaatgctctacaatctctaagagacagagaattctctacattttatgaaagtctcaaatatgccagagtaaaagaagtggaagagatgtgtaagcgcagccttgagtctgtgtattcgctctatcccacacttagcaggttgcaggccattggagagctggaaagcattggggagcttttctcaagatcagtcacacatagacaactctctgaagtatatattaagtggcagaaacactcccagcttctcaaggacagtgattttagttttcaggagcctatcatggctctacgcacagtcattttggagatcctgatggaaaaggaaatggacaactcacaaagagaatgtattaaggacattctcaccaaacaccttgtagaactctctatactggccagaactttcaagaacactcagctccctgaaagggcaatatttcaaattaaacagtacaattcagttagctgtggagtctctgagtggcagctggaagaagcacaagtattctgggcaaaaaaggagcagagtcttgccctgagtattctcaagcaaatgatcaagaagttggatgccagctgtgcagcgaacaatcccagcctaaaacttacatacacagaatgtctgagggtttgtggcaactggttagcagaaacgtgcttagaaaatcctgcggtcatcatgcagacctatctagaaaaggcagtagaagttgctggaaattatgatggagaaagtagtgatgagctaagaaatggaaaaatgaaggcatttctctcattagcccggttttcagatactcaataccaaagaattgaaaactacatgaaatcatcggaatttgaaaacaagcaagctctcctgaaaagagccaaagaggaagtaggtctccttagggaacataaaattcagacaaacagatacacagtaaaggttcagcgagagctggagttggatgaattagccctgcgtgcactgaaagaggatcgtaaacgcttcttatgtaaagcagttgaaaattatatcaactgcttattaagtggagaagaacatgatatgtgggtattccggctttgttccctctggcttgaaaattctggagtttctgaagtcaatggcatgatgaagagagacggaatgaagattccaacatataaatttttgcctcttatgtaccaattggctgctagaatggggaccaagatgatgggaggcctaggatttcatgaagtcctcaataatctaatctctagaatttcaatggatcacccccatcacactttgtttattatactggccttagcaaatgcaaacagagatgaatttctgactaaaccagaggtagccagaagaagcagaataactaaaaatgtgcctaaacaaagctctcagcttgatgaggatcgaacagaggctgcaaatagaataatatgtactatcagaagtaggagacctcagatggtcagaagtgttgaggcactttgtgatgcttatattatattagcaaacttagatgccactcagtggaagactcagagaaaaggcataaatattccagcagaccagccaattactaaacttaagaatttagaagatgttgttgtccctactatggaaattaaggtggaccacacaggagaatatggaaatctggtgactatacagtcatttaaagcagaatttcgcttagcaggaggtgtaaatttaccaaaaataatagattgtgtaggttccgatggcaaggagaggagacagcttgttaagggccgtgatgacctgagacaagatgctgtcatgcaacaggtcttccagatgtgtaatacattactgcagagaaacacggaaactaggaagaggaaattaactatctgtacttataaggtggttcccctctctcagcgaagtggtgttcttgaatggtgcacaggaactgtccccattggtgaatttcttgttaacaatgaagatggtgctcataaaagatacaggccaaatgatttcagtgcctttcagtgccaaaagaaaatgatggaggtgcaaaaaaagtcttttgaagagaaatatgaagtcttcatggatgtttgccaaaattttcaaccagttttccgttacttctgcatggaaaaattcttggatccagctatttggtttgagaagcgattggcttatacgcgcagtgtagctacttcttctattgttggttacatacttggacttggtgatagacatgtacagaatatcttgataaatgagcagtcagcagaacttgtacatatagatctaggtgttgcttttgaacagggcaaaatccttcctactcctgagacagttccttttagactcaccagagatattgtggatggcatgggcattacgggtgttgaaggtgtcttcagaagatgctgtgagaaaaccatggaagtgatgagaaactctcaggaaactctgttaaccattgtagaggtccttctatatgatccactctttgactggaccatgaatcctttgaaagctttgtatttacagcagaggccggaagatgaaactgagcttcaccctactctgaatgcagatgaccaagaatgcaaacgaaatctcagtgatattgaccagagtttcaacaaagtagctgaacgtgtcttaatgagactacaagagaaactgaaaggagtggaagaaggcactgtgctcagtgttggtggacaagtgaatttgctcatacagcaggccatagaccccaaaaatctcagccgacttttcccaggatggaaagcttgggtgtgatcttcagtatatgaattaccctttcattcagcctttagaaattatattttagcctttatttttaacctgccaacatactttaagtagggattaatatttaagtgaactattgtgggtttttttgaatgttggttttaatacttgatttaatcaccactcaaaaatgttttgatggtcttaaggaacatctctgctttcactctttagaaataatggtcattcgggctgggcgcagcggctcacgcctgtaatcccagcactttgggaggccgaggtgagcggatcacaaggtcaggagttcgagaccagcctggccaagagaccagcctggccagtatggtgaaaccctgtctctactaaaaatacaaaaattagccgagcatggtggcgggcacctgtagtcccagctactcgagaggctgaggcaggagaatctcttgaacctgggaggtgaaggttgctgtgggccaaaatcatgccattgcactccagcctgggtgacaagagcgaaactccatctcaaaaa

SEQ ID NO: 906 - protein, 1708 aa, Homo sapien
MTLHEPANSSASQSTDLCDFSGDLDPAPNPPHFPSHVIKATFAYISNCHKTKLKSILEILSKSPDSYQKILLAICEQAAETNNVYKKHRILKIYHLFVSLLLKDIKSGLGGAWAFVLRDVIYTLIHYINQRPSCIMDVSLRSFSLCCDLLSQVCQTAVTYCKDALENHLHVIVGTLIPLVYEQVEVQKQVLDLLKYLVIDNKDNENLYITIKLLDPFPDHVVFKDLRITQQKIKYSRGPFSLLEEINHFLSVSVYDALPLTRLEGLKDLRRQLELHKDQMVDIMRASQDNPQDGIMVKLVVNLLQLSKMAINHTGEKEVLEAVGSCLGEVGPIDFSTIAIQHSKDASYTKALKLFEDKELQWTFIMLTYLNNTLVEDCVKVRSAAVTCLKNILATKTGHSFWEIYKMTTDPMLAYLQPFRTSRKKFLEVPRFDKENPFEGLDDINLWIPLSENHDIWIKTLTCAFLDSGGTKCEILQLLKPMCEVKTDFCQTVLPYLIHDILLQDTNESWRNLLSTHVQGFFTSCLRHFSQTSRSTTPANLDSESEHFFRCCLDKKSQRTMLAVVDYMRRQKRPSSGTIFNDAFWLDLNYLEVAKVAQSCAAHFTALLYAEIYADKKSMDDQEKRSLAFEEGSQSTTISSLSEKSKEETGISLQDLLLEIYRSIGEPDSLYGCGGGKMLQPITRLRTYEHEAMWGKALVTYDLETAIPSSTRQAGIIQALQNLGLCHILSVYLKGLDYENKDWCPELEELHYQAAWRNMQWDHCTSVSKEVEGTSYHESLYNALQSLRDREFSTFYESLKYARVKEVEEMCKRSLESVYSLYPTLSRLQAIGELESIGELFSRSVTHRQLSEVYIKWQKHSQLLKDSDFSFQEPIMALRTVILEILMEKEMDNSQRECIKDILTKHLVELSILARTFKNTQLPERAIFQIKQYNSVSCGVSEWQLEEAQVFWAKKEQSLALSILKQMIKKLDASCAANNPSLKLTYTECLRVCGNWLAETCLENPAVIMQTYLEKAVEVAGNYDGESSDELRNGKMKAFLSLARFSDTQYQRIENYMKSSEFENKQALLKRAKEEVGLLREHKIQTNRYTVKVQRELELDELALRALKEDRKRFLCKAVENYINCLLSGEEHDMWVFRLCSLWLENSGVSEVNGMMKRDGMKIPTYKFLPLMYQLAARMGTKMMGGLGFHEVLNNLISRISMDHPHHTLFIILALANANRDEFLTKPEVARRSRITKNVPKQSSQLDEDRTEAANRIICTIRSRRPQMVRSVEALCDAYIILANLDATQWKTQRKGINIPADQPITKLKNLEDVVVPTMEIKVDHTGEYGNLVTIQSFKAEFRLAGGVNLPKIIDCVGSDGKERRQLVKGRDDLRQDAVMQQVFQMCNTLLQRNTETRKRKLTICTYKVVPLSQRSGVLEWCTGTVPIGEFLVNNEDGAHKRYRPNDFSAFQCQKKMMEVQKKSFEEKYEVFMDVCQNFQPVFRYFCMEKFLDPAIWFEKRLAYTRSVATSSIVGYILGLGDRHVQNILINEQSAELVHIDLGVAFEQGKILPTPETVPFRLTRDIVDGMGITGVEGVFRRCCEKTMEVMRNSQETLLTIVEVLLYDPLFDWTMNPLKALYLQQRPEDETELHPTLNADDQECKRNLSDIDQSFNKVAERVLMRLQEKLKGVEEGTVLSVGGQVNLLIQQAIDPKNLSRLFPGWKAWV

SEQ ID NO: 907 - DNA, 855 bp, Homo sapien
gcctgcgcggtagtgggacccgaccctgtctccagtgggcgtcttgggccccggctctattctgggctgcgggcctgggaagggctcgccgggtgccaaatgagctgtcctaactctgcggggctgcagcttcctgcatgatgctggggagcttggcgcctgacccaggatctagaaggcactctgggcaggccgcgctccgcccacgaaggtacccaaccctctgggatagatgcaggaagcgatggttaagacccattttcacccaacttctcgccgcaggtctggcttaccacacgctcctccccattcccagtgagccgctttttgcagcaccaggcgaacacttacaccagtgctttgtaaaggaatcttattgtccaccccgtgtcttggcaaaagaacagtgatcacacagattcctacttgggctctttcctttaatcttcggaggctgagtttgcccaactcaggtttaaccaccaaggactctgagagctggcaggtctgagtaaccctggtaacaattctcttcaccttatcaaaacctgagctaaaaccaatgcatcagctgatgatgacagcagagagtggcagggctgaggacccaaagtcatttcccaggctggcggagaataaactgccagggagaagaatgagaagacaggagacaaactgtttggaaagctaaatcttccctcttaatgaataaaggtttttgccttgtcttaaagtttctgagtcctaattttggcaaaataaataacttatggtaatctggaattgtattttgtaatattaagtgttttgaacctctaacatttacttcccaaaatcaaacttcagtttcaaaat

SEQ ID NO: 908 - protein, 90 aa, Homo sapien
MMLGSLAPDPGSRRHSGQAALRPRRYPTLWDRCRKRWLRPIFTQLLAAGLAYHTLLPIPSEPLFAAPGEHLHQCFVKESYCPPRVLAKEQ

SEQ ID NO: 909 - DNA, 2496 bp, Homo sapien
gttttgaaagttgatggagcgaactgcttttccaaagactcttttgaaaaactttttaagtaggccattctgactttaacatttctctttgtcttaacattagacaaaaagtaaccttcctgaagaggacatgtgattggaagttgtcaattgttgaagcattggtaactccagtctctaacgttttagaaaatcataacaagcggttctctaccctgtaaaggtgaactactgagttcttcattatgtctgatggagattatgattacctcatcaagtttttagctttgggagactctggtgtagggaagaccagtgtactttaccaatatacagatggtaaatttaactccaaatttatcacaacagtgggcattgatttcagggaaaaaagagtggtgtacagagccagtgggccggatggagccactggcagaggccagagaatccacctgcagttatgggacacagcagggcaggagaggtttcgtagcttaacgacagcgttcttcagagatgctatgggttttcttctactttttgatctgacaaatgagcaaagtttcctcaatgtcagaaactggataagccagctacagatgcatgcatattgtgaaaacccagatatagtgctgtgtggaaacaagagtgatctggaggaccagagagtagtgaaagaggaggaagccatagcactcgcagagaaatatggaatcccctactttgaaactagtgctgccaatgggacaaacataagccaagcaattgagatgcttctggacctgataatgaagcgaatggaacggtgtgtggacaagtcctggattcctgaaggagtggtgcgatcaaatggtcatgcctctacggatcagttaagtgaagaaaaggagaaaggggcatgtggctgttgagaagtcaagtaagtgacatagtagttcaggtggcccatgcctgggatcttctctatgattgatacatggcacagtgagagattaatgggcattgtgtacaaattgcttctcaccatccccattagacctacgaataaagcatccggttctaaaattaatttgttgcagctttgtaaatatttctttaagattcagcctgagagttaggagaaatatttcagagccaaaagtgccttatacaaccttagcctattatagtaaatcattcaaggattcagaattttgcagtcacagaagagtgtatttattatgtagaatgaatgagggtactgtcacctgccttaatgtaggtaggcccagagtcttacatttaagatcttacatgcagttataaaaccgccacagtcttcaatccagatttgaagactcatgccataggtgacattctaaaataccattaaagccacttaaatgttaaataagaatatacatgcacatcagctcaatgtctttgagtattaattttatgtaagcattctatttaacatgaatataggacaaatcatggctatatctatagaccttggataaactggattgaccaattatacactcacggtgacttttttattggtgggaaggggattggggtggggcaggctggcttaatgtaatatgagcaaccaaagtgggacttctgtctccccgctatattcccattgctctgaatggttgattgaagggtcagggaactagattttatggctttagttcactgtgattgtacatttatacttggcctatgtgctggccgcacctgaacatagctggtgcttatgccgagttatttgtgatgagtaaatatttagtttctttttcttcatatttataatgttgatctggcatcctcaggctgcagctttattagcttataaattactcatctctgtctttaccagcaggctctgtattgttgatatttgcaacttgttttgcttttccattggtggaattgaaataattagtttttaattacataagatgcctgtttgctatttggtggaagatagatgttcatattgaagcagtcacatttgtactgtagttcaataaaagaaaaatgaagtattctgtagcctatatttttcatagagctcatgagcatttactgtacttgctgggtcttgccaagatcatttattccgctgcattgccaaagtgtcttcataccaaattaaaggtggttttaatatatgtttcatggaagttgtttataaaattcaaaggtatttcatttaggtgaaaagtcttatttattaaagtggtttgaataaagtagatcaaaacttccagagatcttaatggctatataggaagaaatatcactcaccataatttaaataaagaataaaaatacatgtattttatggtggcaaatgtttggtagaactgtaattagaaaaatacaagtatatttgcgtgatggttacactagaagcccagactttacgactacacaatatattcatgtatctaaactgtacttgtaccccctaaatttatttttaaaaaaaaaaaaaaaaaa

SEQ ID NO: 910 - protein, 221 aa, Homo sapien
MSDGDYDYLIKFLALGDSGVGKTSVLYQYTDGKFNSKFITTVGIDFREKRVVYRASGPDGATGRGQRIHLQLWDTAGQERFRSLTTAFFRDAMGFLLLFDLTNEQSFLNVRNWISQLQMHAYCENPDIVLCGNKSDLEDQRVVKEEEAIALAEKYGIPYFETSAANGTNISQAIEMLLDLIMKRMERCVDKSWIPEGVVRSNGHASTDQLSEEKEKGACGC

SEQ ID NO: 911 - DNA, 1237 bp, Homo sapien
attcttgtctgttctgcctcactcccgagctctactgactcccaaaagagcgcccaagaagaaaatggccataagtggagtccctgtgctaggatttttcatcatagctgtgctgatgagcgctcaggaatcatgggctatcaaagaagaacatgtgatcatccaggccgagttctatctgaatcctgaccaatcaggcgagtttatgtttgactttgatggtgatgagattttccatgtggatatggcaaagaaggagacggtctggcggcttgaagaatttggacgatttgccagctttgaggctcaaggtgcattggccaacatagctgtggacaaagccaacctggaaatcatgacaaagcgctccaactatactccgatcaccaatgtacctccagaggtaactgtgctcacgaacagccctgtggaactgagagagcccaacgtcctcatctgtttcatcgacaagttcaccccaccagtggtcaatgtcacgtggcttcgaaatggaaaacctgtcaccacaggagtgtcagagacagtcttcctgcccagggaagaccaccttttccgcaagttccactatctccccttcctgccctcaactgaggacgtttacgactgcagggtggagcactggggcttggatgagcctcttctcaagcactgggagtttgatgctccaagccctctcccagagactacagagaacgtggtgtgtgccctgggcctgactgtgggtctggtgggcatcattattgggaccatcttcatcatcaagggagtgcgcaaaagcaatgcagcagaacgcagggggcctctgtaaggcacatggaggtgatgatgtttcttagagagaagatcactgaagaaacttctgctttaatgactttacaaagctggcaatattacaatccttgacctcagtgaaagcagtcatcttcagcgttttccagccctatagccaccccaagtgtggttatgcctcctcgattgctccgtactctaacatctagctggctttccctgtctattgccttttcctgtatctattttcctctatttcctatcattttattatcaccatgcaatgcctctggaataaaacatacaggagtctgtctctgctatggaatgccccatggggctctcttgtgtacttattgtttaaggtttcctcaaactgtgatttttctgaacacaataaactattttgatgatcttgggtggaaaa

SEQ ID NO: 912 - protein, 254 aa, Homo sapien
MAISGVPVLGFFIIAVLMSAQESWAIKEEHVIIQAEFYLNPDQSGEFMFDFDGDEIFHVDMAKKETVWRLEEFGRFASFEAQGALANIAVDKANLEIMTKRSNYTPITNVPPEVTVLTNSPVELREPNVLICFIDKFTPPVVNVTWLRNGKPVTTGVSETVFLPREDHLFRKFHYLPFLPSTEDVYDCRVEHWGLDEPLLKHWEFDAPSPLPETTENVVCALGLTVGLVGIIIGTIFIIKGVRKSNAAERRGPL

SEQ ID NO: 913 - DNA, 2000 bp, Homo sapien
tgcggccgcacctgcaggcgcagagtaggtatggaagatccctcgagatccattgtgctctaaagccgccgggggtccgtgtcctgtctcggttggccggacccgggcccgagcccgagcagtagccggcgccatgtcggtggtgggcatagacctgggcttccagagctgctacgtcgctgtggcccgcgccggcggcatcgagactatcgctaatgagtatagcgaccgctgcacgccggcttgcatttcttttggtcctaagaatcgttcaattggagcagcagctaaaagccaggtaatttctaatgcaaagaacacagtccaaggatttaaaagattccatggccgagcattctctgatccatttgtggaggcagaaaaatctaaccttgcatatgatattgtgcagtggcctacaggattaacaggtataaaggtgacatatatggaggaagagcgaaattttaccactgagcaagtgactgccatgcttttgtccaaactgaaggagacagccgaaagtgttcttaagaagcctgtagttgactgtgttgtttcggttccttgtttctatactgatgcagaaagacgatcagtgatggatgcaacacagattgctggtcttaattgcttgcgattaatgaatgaaaccactgcagttgctcttgcatatggaatctataagcaggatcttcctcgcttagaagagaaaccaagaaatgtagtttttgtagacatgggccactctgcttatcaagtttctgtatgtgcatttaatagaggaaaactgaaagttctggccactgcatttgacacgacattgggaggtagaaaatttgatgaagtgttagtaaatcacttctgtgaagaatttgggaagaaatacaagctagacattaagtccaaaatccgtgcattattacgactctctcaggagtgtgagaaactcaagaaattgatgagtgcaaatgcttcagatctccctttgagcattgaatgttttatgaatgatgttgatgtatctggaactatgaatagaggcaaatttctggagatgtgcaatgatctcttagctagagtggagccaccacttcgtagtgttttggaacaaaccaagttaaagaaagaagatatttatgcagtggagatagttggtggtgctacacgaatccctgcggtaaaagagaagatcagcaaatttttcggtaaagaacttagtacaacattaaatgctgatgaagctgtcactcgaggctgtgcattgcagtgtgccatcttatcgcctgctttcaaagtcagagaattttctatcactgatgtagtaccatatccaatatctctgagatggaattctccagctgaagaagggtcaagtgactgtgaagtcttttccaaaaatcatgctgctcctttctctaaagttcttacattttatagaaaggaacctttcactcttgaggcctactacagctctcctcaggatttgccctatccagatcctgctatagctcagttttcagttcagaaagtcactcctcagtctgatggctccagttcaaaagtgaaagtcaaagttcgagtaaatgtccatggcattttcagtgtgtccagtgcatctttagtggaggttcacaagtctgaggaaaatgaggagccaatggaaacagatcagaatgcaaaggaggaagagaagatgcaagtggaccaggaggaaccacatgttgaagagcaacagcagcagacaccagcagaaaataaggcagagtctgaagaaatggagacctctcaagctggatccaaggataaaaagatggaccaaccaccccaatgccaagaaggcaaaagtgaagaccagtactgtggacctgccaatcgagaatcagctatatggcagatagacagagagatgctcaacttgtacattgaaaatgagggtaagatgatcatgcaggataaactggagaaggagcggaatgatgctaagaacgcagtggagg

SEQ ID NO: 914 - protein, 701 aa, Homo sapien [sequence omitted]

SEQ ID NO: 915 - DNA, 1586 bp, Homo sapien
gaatcaggaagaccagctcctcctactgtcttctgtgttacgggatcagcgttccttgttgagtgggacctgagttttgagagggtcttctgctcctcttggtctggtcccttacttccaagagccccagagaggaaggcatgctgttggctctagctctgcttctagctttcctgcctcctgccagtcagaaatcttccaacttggaagggagaacaaagtcagtcaccaggccaactgggtcatcagctgtaatcacttgtgatcttcctgtagaaaatgccgtctacacccactggtacctacaccaggaggggaaggccccacagcgtcttctgtactatgactcctacaactccagggttgtgttggaatcaggaatcagtcgagaaaagtatcatacttatgcaagcacagggaagagccttaaatttatactggaaaatctaattgaacgtgactctggggtctattactgtgccacctggaaggattattataagaaactctttggcagtggaacaacacttgttgtcacagataaacaacttgatgcagatgtttcccccaagcccactatttttcttccttcgattgctgaaacaaaactccagaaggctggaacatatctttgtcttcttgagaaatttttcccagatattattaagatacattggcaagaaaagaagagcaacacgattctgggatcccaggaggggaacaccatgaagactaacgacacatacatgaaatttagctggttaacggtgccagaagagtcactggacaaagaacacagatgtatcgtcagacatgagaataataaaaacggaattgatcaagaaattatctttcctccaataaagacagatgtcaccacagtggatcccaaagacagttattcaaaagatgcaaatgatgtcaccacagtggatcccaaatacaattattcaaaggatgcaaatgatgtcatcacaatggatcccaaagacaattggtcaaaagatgcaaatgatacactactgctgcagctcacaaacacctctgcatattacatgtacctcctcctgctcctcaagagtgtggtctattttgccatcatcacctgctgtctgcttggaagaacggctttctgctgcaatggagagaaatcataacagacggtggcacaaggaggccatcttttcctcatcggttattgtccctagaagcgtcttctgaggatctagttgggctttctttctgggtttgggccatttcagttctcatgtgtgtactattctatcattattgtataatggttttcaaaccagtgggcacacagagaacctcagtctgtaataacaatgaggaatagccatggcgatctccagcaccaatctctccatgttttccacagctcctccagccaacccaaatagcgcctgctatagtgtagacagcctgcggcttctagccttgtccctctcttagtgttctttaatcagataactgcctggaagcctttcattttacacgccctgaagcagtcttctttgctagttgaattatgtggtgtgtttttccgtaataagcaaaataaattt

SEQ ID NO: 916 - protein, 338 aa, Homo sapien [sequence omitted]

SEQ ID NO: 917 - DNA, 3487 bp, Homo sapien
  Unsure 2733: Unknown base
  Unsure 2804: Unknown base
  Unsure 2876: Unknown base
gaattcctttttttgactgagtctccctctgtcacctaggctggagtgcagtggcacaatcttggctcgctgcaaccttcacccttcacctcccaggtcgaagcgattctcctgcctcagtctcccgagtagctgggattacaggcgtgcgccaccaaatctggctatttttttattattattattttgagtagagatggggtttcaccatgttggccagactggtcttgaactcttggcctcaaattatctgcccacctcggcctcccaaagtgctgggattacaggcatgagccaccatgcccagatgacaagactaattttttatccctttggtttattggctacaacatcttcttggaatcagaggtgaattttttcttaccttgggatgcctgagactaggggagtatagaattccaattggtaattaaggcatctttctgctcctgatcagaagggcaggttagttgggagaggtcagatggcacaacagaagtcaccttgtaagtaaggcaaagacttgaaggcattagcgtttctcattactaggtcaataacctgagggaatcaatggctttttgccgctctacctcttgtgtatctctttgacttttctttctctgtctagggcattcctgaacttgtcaatcagggacaggcattagagcccaaacaggatgctttccaaggccaagaagcagcagtaatgatggatcagaaggcaggattatatggacagacatacccagcacaggggcctccaatgcaaggaggctttcatcttcagggacaatcaccatcttttaactctatgatgaatcagatgaaccagcaaggcaattttcctctccaaggaatgcacccacgagccaacatcatgagaccccggacaaacacccccaagcaacttagaatgcagcttcagcagaggctgcagggccagcagtttttgaatcagagccgacaggcacttgaattgaaaatggaaaaccctactgctggtggtgctgcggtgatgaggcctatgatgcagccccaggtgagctcccaggagggttttcttaatgctcaaatgggcgcccaacggaggagagagctgctaagtcatcacttccgacaacagagggtggctatgatgatgcagcagcagcaacagcagcaacagcagcagcagcagcagcagcagcagcagcagcagcaacagcaacagcaacagcagcaacaggagcaaccccaggtcttcagcccacctcctaatgtgactgctcccccagcatggatggcttkyggcaggacccacaatgccacaagctcctccgcaacaagtttccaatatccaaccccaaattatgggaatggggaccaaccaacaaagatccagcctttgggtcgagtgtctaagtcctcccaatgcaatgatgtcgtcaagaatggtccctcccagaatcccatgatgcaacacccgcaggctgcatccatctatcagtcctcagaaatgaagggctggccatcaggaaatttggccaggaacagctccttttcccagcagcagtttgcccaccaggggaatcctgcagtgtatagtatggtgcacatgaatggcagcagtggtcacatgggacagatgaacatgaaccccatgcccatgtctggcatgcctatgggtcctgatcagaaatactgctgacatctctgcaccaggacctcttaaggaaaccactgtacaaatgacactgcactaggattattgggaaggaatcattgttcccaggccatccatcttgggaagaaaggaccagcttttgagctccatcaagggtattttaagtgatgtcatttgagcaggactggattttaagccgaagggcaatatccaacgtgtttttcccccctccttcctgctgtgtatcatggtgttcaaaacagaaatgttttttggcattccacctcctagggatataattctggagacatggagtgttactgatcataaaacttttgtgtcacttttttctgccttgctagccaaaatctcttaaatacacgtaggtgggccagagaacattggaagaatcaagagagattagaatatctggtttctctagttgcagtattggacaaagagcatagtcccagccttcaggtgtagtagttctgtgttgaccctttgtccagtggaattggtgattctgaattgtcctttactaatgttgttgagttgctctgtccctattatttgccctagcctttctcctaatggggttttcatttgccattcatgtccctgtaaaacttcacctccaggaactgtcatggatgtccaaatggctttgcagaaaggaaatgagatgacagtatttaatcgcagcagtagcaaacttttcacatgctaatgtgcagctgagtgcactttatttaaaaagaatggataaatgcaatattcttgaggtcttgagggaatagtgaaacacattcctggtttttgcctacacttacgtgttagacaagaactatgatttttttttttaaagtactggtgtcaccctttgcctatatggtagagcaataatgctttttaaaaataaacttctgaaaacccaaggccaggtactgcattctgaatcagaatctcgcagtgtttctgtgaatagatttttttgtaaatatgacctttaagatattgtattatgtaaaatatgtatataccttttttttgtaggtgcacagcgnctcatttttacagagtttgtgaagctaaatatttaacattgttgatttcagtaagctgtgtggtgaggctnccagtggaagagacatcccttgacttttgtggcctgggggaggggtagtgctccacagcttttccttccccnccccccagccttagatgcctcgctcttttcaatctcttaatctaaatgctttttaaagagattatttgtttagatgtaggcattttaattttttaaaaattcctctaccagaactaagcactttgttaatttggggggggagaatagatatggggagaaaaaacttaaaaaaaaaatcaggaattaaaaaaagcgagcaatttgaagagaatcttttggattttaagcagtccgaaataatagcaattcatgggctgtgtgtgtgtgtgtatgtgtgtgtgtgtgtgtgtgaatgtttaagtatgttaccttttcatcccctttaggagcgttttcagattttggttgctaagacctgaatcccatattgagatctcgagtagaatccttggtgtggtttctggtgtctgctcagctgtcccctcattctactaatgtgatgctttcattatgtccctgtggattagaatagtgtcagttatttcttaagtaactcagtacccagaacaaccagttttactgtgattcagagccacagtctaactgagcaccttttaaacccctccctcttctgccccctaccacttttctgctgttgcctctcggaattc

SEQ ID NO: 918 - protein, 326 aa, Homo sapien
  unsure 194: unknown amino acid
MMDQKAGLYGQTYPAQGPPMQGGFHLQGQSPSFNSMMNQMNQQGNFPLQGMHPRANIMRPRTNTPKQLRMQLQQRLQGQQFLNQSRQALELKMENPTAGGAAVMRPMMQPQVSSQEGFLNAQMGAQRRRELLSHHFRQQRVAMMMQQQQQQQQQQQQQQQQQQQQQQQQQQQQEQPQVFSPPPNVTAPPAWMAXGRTHNATSSSATSFQYPTPNYGNGDQPTKIQPLGRVSKSSQCNDVVKNGPSQNPMMQHPQAASIYQSSEMKGWPSGNLARNSSFSQQQFAHQGNPAVYSMVHMNGSSGHMGQMNMNPMPMSGMPMGPDQKYC

SEQ ID NO: 919 - DNA, 4264 bp, Homo sapien
atttcccgccagcaggagccgcgcggtagatgcggtgcttttaggagctccgtccgacagaacggttgggccttgccggctgtcggtatgtcgcgacagagcaccctgtacagcttcttccccaagtctccggcgctgagtgatgccaacaaggcctcggccagggcctcacgcgaaggcggccgtgccgccgctgcccccggggcctctccttccccaggcggggatgcggcctggagcgaggctgggcctgggcccaggcccttggcgcgatccgcgtcaccgcccaaggcgaagaacctcaacggagggctgcggagatcggtagcgcctgctgcccccaccagttgtgacttctcaccaggagatttggtttgggccaagatggagggttacccctggtggccttgtctggtttacaaccacccctttgatggaacattcatccgcgagaaagggaaatcagtccgtgttcatgtacagttttttgatgacagcccaacaaggggctgggttagcaaaaggcttttaaagccatatacaggttcaaaatcaaaggaagcccagaagggaggtcatttttacagtgcaaagcctgaaatactgagagcaatgcaacgtgcagatgaagccttaaataaagacaagattaagaggcttgaattggcagtttgtgatgagccctcagagccagaagaggaagaagagatggaggtaggcacaacttacgtaacagataagagtgaagaagataatgaaattgagagtgaagaggaagtacagcctaagacacaaggatctaggcgaagtagccgccaaataaaaaaacgaagggtcatatcagattctgagagtgacattggtggctctgatgtggaatttaagccagacactaaggaggaaggaagcagtgatgaaataagcagtggagtgggggatagtgagagtgaaggcctgaacagccctgtcaaagttgctcgaaagcggaagagaatggtgactggaaatggctctcttaaaaggaaaagctctaggaaggaaacgccctcagccaccaaacaagcaactagcatttcatcagaaaccaagaatactttgagagctttctctgcccctcaaaattctgaatcccaagcccacgttagtggaggtggtgatgacagtagtcgccctactgtttggtatcatgaaactttagaatggcttaaggaggaaaagagaagagatgagcacaggaggaggcctgatcaccccgattttgatgcatctacactctatgtgcctgaggatttcctcaattcttgtactcctgggatgaggaagtggtggcagattaagtctcagaactttgatcttgtcatctgttacaaggtggggaaattttatgagctgtaccacatggatgctcttattggagtcagtgaactggggctggtattcatgaaaggcaactgggcccattctggctttcctgaaattgcatttggccgttattcagattccctggtgcagaagggctataaagtagcacgagtggaacagactgagactccagaaatgatggaggcacgatgtagaaagatggcacatatatccaagtatgatagagtggtgaggagggagatctgtaggatcattaccaagggtacacagacttacagtgtgctggaaggtgatccctctgagaactacagtaagtatcttcttagcctcaaagaaaaagaggaagattcttctggccatactcgtgcatatggtgtgtgctttgttgatacttcactgggaaagtttttcataggtcagttttcagatgatcgccattgttcgagatttaggactctagtggcacactatcccccagtacaagttttatttgaaaaaggaaatctctcaaaggaaactaaaacaattctaaagagttcattgtcctgttctcttcaggaaggtctgatacccggctcccagttttgggatgcatccaaaactttgagaactctccttgaggaagaatattttagggaaaagctaagtgatggcattggggtgatgttaccccaggtgcttaaaggtatgacttcagagtctgattccattgggttgacaccaggagagaaaagtgaattggccctctctgctctaggtggttgtgtcttctacctcaaaaaatgccttattgatcaggagcttttatcaatggctaattttgaagaatatattcccttggattctgacacagtcagcactacaagatctggtgctatcttcaccaaagcctatcaacgaatggtgctagatgcagtgacattaaacaacttggagatttttctgaatggaacaaatggttctactgaaggaaccctactagagagggttgatacttgccatactccttttggtaagcggctcctaaagcaatggctttgtgccccactctgtaaccattatgctattaatgatcgtctagatgccatagaagacctcatggttgtgcctgacaaaatctccgaagttgtagagcttctaaagaagcttccagatcttgagaggctactcagtaaaattcataatgttgggtctcccctgaagagtcagaaccacccagacagcagggctataatgtatgaagaaactacatacagcaagaagaagattattgattttctttctgctctggaaggattcaaagtaatgtgtaaaattatagggatcatggaagaagttgctgatggttttaagtctaaaatccttaagcaggtcatctctctgcagacaaaaaatcctgaaggtcgttttcctgatttgactgtagaattgaaccgatgggatacagcctttgaccatgaaaaggctcgaaagactggacttattactcccaaagcaggctttgactctgattatgaccaagctcttgctgacataagagaaaatgaacagagcctcctggaatacctagagaaacagcgcaacagaattggctgtaggaccatagtctattgggggattggtaggaaccgttaccagctggaaattcctgagaatttcaccactcgcaatttgccagaagaatacgagttgaaatctaccaagaagggctgtaaacgatactggaccaaaactattgaaaagaagttggctaatctcataaatgctgaagaacggagggatgtatcattgaaggactgcatgcggcgactgttctataactttgataaaaattacaaggactggcagtctgctgtagagtgtatcgcagtgttggatgttttactgtgcctggctaactatagtcgagggggtgatggtcctatgtgtcgcccagtaattctgttgccggaagataccccccccttcttagagcttaaaggatcacgccatccttgcattacgaagactttttttggagatgattttattcctaatgacattctaataggctgtgaggaagaggagcaggaaaatggcaaagcctattgtgtgcttgttactggaccaaatatggggggcaagtctacgcttatgagacaggctggcttattagctgtaatggcccagatgggttgttacgtccctgctgaagtgtgcaggctcacaccaattgatagagtgtttactagacttggtgcctcagacagaataatgtcaggtgaaagtacattttttgttgaattaagtgaaactgccagcatactcatgcatgcaacagcacattctctggtgcttgtggatgaattaggaagaggtactgcaacatttgatgggacggcaatagcaaatgcagttgttaaagaacttgctgagactataaaatgtcgtacattattttcaactcactaccattcattagtagaagattattctcaaaatgttgctgtgcgcctaggacatatggcatgcatggtagaaaatgaatgtgaagaccccagccaggagactattacgttcctctataaattcattaagggagcttgtcctaaaagctatggctttaatgcagcaaggcttgctaatctcccagaggaagttattcaaaagggacatagaaaagcaagagaatttgagaagatgaatcagtcactacgattatttcgggaagtttgcctggctagtgaaaggtcaactgtagatgctgaagctgtccataaattgctgactttgattaaggaattatagactgactacattggaagctttgagttgacttctgaccaaaggtggtaaattcagacaacattatgatctaataaactttattttttaaaaatga

SEQ ID NO: 920 - protein, 1360 aa, Homo sapien
MSRQSTLYSFFPKSPALSDANKASARASREGGRAAAAPGASPSPGGDAAWSEAGPGPRPLARSASPPKAKNLNGGLRRSVAPAAPTSCDFSPGDLVWAKMEGYPWWPCLVYNHPFDGTFIREKGKSVRVHVQFFDDSPTRGWVSKRLLKPYTGSKSKEAQKGGHFYSAKPEILRAMQRADEALNKDKIKRLELAVCDEPSEPEEEEEMEVGTTYVTDKSEEDNEIESEEEVQPKTQGSRRSSRQIKKRRVISDSESDIGGSDVEFKPDTKEEGSSDEISSGVGDSESEGLNSPVKVARKRKRMVTGNGSLKRKSSRKETPSATKQATSISSETKNTLRAFSAPQNSESQAHVSGGGDDSSRPTVWYHETLEWLKEEKRRDEHRRRPDHPDFDASTLYVPEDFLNSCTPGMRKWWQIKSQNFDLVICYKVGKFYELYHMDALIGVSELGLVFMKGNWAHSGFPEIAFGRYSDSLVQKGYKVARVEQTETPEMMEARCRKMAHISKYDRVVRREICRIITKGTQTYSVLEGDPSENYSKYLLSLKEKEEDSSGHTRAYGVCFVDTSLGKFFIGQFSDDRHCSRFRTLVAHYPPVQVLFEKGNLSKETKTILKSSLSCSLQEGLIPGSQFWDASKTLRTLLEEEYFREKLSDGIGVMLPQVLKGMTSESDSIGLTPGEKSELALSALGGCVFYLKKCLIDQELLSMANFEEYIPLDSDTVSTTRSGAIFTKAYQRMVLDAVTLNNLEIFLNGTNGSTEGTLLERVDTCHTPFGKRLLKQWLCAPLCNHYAINDRLDAIEDLMVVPDKISEVVELLKKLPDLERLLSKIHNVGSPLKSQNHPDSRAIMYEETTYSKKKIIDFLSALEGFKVMCKIIGIMEEVADGFKSKILKQVISLQTKNPEGRFPDLTVELNRWDTAFDHEKARKTGLITPKAGFDSDYDQALADIRENEQSLLEYLEKQRNRIGCRTIVYWGIGRNRYQLEIPENFTTRNLPEEYELKSTKKGCKRYWTKTIEKKLANLINAEERRDVSLKDCMRRLFYNFDKNYKDWQSAVECIAVLDVLLCLANYSRGGDGPMCRPVILLPEDTPPFLELKGSRHPCITKTFFGDDFIPNDILIGCEEEEQENGKAYCVLVTGPNMGGKSTLMRQAGLLAVMAQMGCYVPAEVCRLTPIDRVFTRLGASDRIMSGESTFFVELSETASILMHATAHSLVLVDELGRGTATFDGTAIANAVVKELAETIKCRTLFSTHYHSLVEDYSQNVAVRLGHMACMVENECEDPSQETITFLYKFIKGACPKSYGFNAARLANLPEEVIQKGHRKAREFEKMNQSLRLFREVCLASERSTVDAEAVHKLLTLIKEL

SEQ ID NO: 921 - DNA, 1851 bp, Homo sapien
gaaaagccgccggtatttctccacctggctctcctctacctccaggcaggcgcacccgaggtccccctcccaccccaccttctgccctcccgcacacttggaccagtgctgttgacccggaagcggacatttctgcagctattctaagcacacgtcggcggagggagcgggacgtggccagcggtcagcggcgaaggaggcaggccctgcgcggggatcacggaagccctgtgattcaccatgaagttccagtacaaggaggtccatccctttgagtatcggaaaaaggaaggagaaaagatccggaagaaatatccggacagggtccccttgattgtagagaaggctccaaaagcaagggtgcctgatctggacaggaggaagtacctagtgccctccgaccttaccgatggccagttctaccttttaatccggaagagaatccacctgagacctgaggacgccttattcttctttgtcaacaacactatccctcccactagtgctaccatgggccaactatatgaggacagtcatgaggaagatgattttctgtatgtggcctacagtaatgagagtgtctatgggaaatgagtggttggaagcccagcagatggaagcacctggacttaggggtaggggaggggtgtgtgtgtgacttggggaaagagagggcggctcccaccgtgaggagacagaaggtgaagacatatagaaactttacaccgcacacaccgtcaacgcattttcacatgctcaactgatattttttgttgcttccttggcccagggagaaagcatgtcaggacagagctgttggattggctttgatagaggaatggggatgatgtaattttatggcattcctgagatttaatttttgtgcagtttcatagaaaggtcggtcaggaggtggacaagttggggtcagagatgatggcagtccagcagcaactccctgtgctcccttctctttgggcagagattctgtttttgacagttgcacaagacaggtagggaaaggggacttgtggtagtgggccatacctggggacgaaaagagacccactgtaattgatgcatcgtggcccccgatcttccgtatcccacacttcttttctcccatcccagttgcaatctcactcacaaacatcacagtaccaccccaggggcggcagtagacaccaacccagaaatttagacagggatctcttatctttggaaaataggggttaggcatgagggtggttatgattaagaagataattttgttgttaaatagcattaaactggaattgacagagtgagttgagcatctctgtctaacctgctctttctctctggtgctcctcatctcacccctaccttggaatttaataagcttcaggcatttccaattgcagactaaaaccacttctaccatctcctctagtattttccatgtatcaggacagagatgtcttatgtagggaaggggcaggtatgaagtgaggtagattatctatacctctcactcattcaggattctcgctcccatgctgctgtcccttcattctcacactcacaggaatgctatgtgatggccagctgcttcccttcttggttatccactgcagctgctagttagaaaggtttgcagggatgacttttagtaaatcatggggattttattgatttattatcacttataggattttgtggggtgggagtggggagcaggaattgcactcagacatgacatttcaattcatctctgcaaatgaaaagggttcttcctcttgggggaaatctgtgtgtcagttctgtcagctgcaagttcttgtgtaatgaagtcaatgctgtcaggccaag

SEQ ID NO: 922 - protein, 117 aa, Homo sapien
MKFQYKEVHPFEYRKKEGEKIRKKYPDRVPLIVEKAPKARVPDLDRRKYLVPSDLTDGQFYLLIRKRIHLRPEDALFFFVNNTIPPTSATMGQLYEDSHEEDDFLYVAYSNESVYGK

SEQ ID NO: 923 - DNA, 3221 bp, Homo sapien
tgtcaaaagcctgcacacgagacccccgtgggccaggactgacttcctccccacacagggctgggcggggcaagcaggaaggagcctgttacagtcaaggtgacgcatccttgccgggccagcccgaacagcagctgggtcggcaagcgacaggagcacgggtcatcttttccccagaggcgtcggaatggacctgtgccacccagagcccgcggagctgagcagcggggagacggaagagttacagaggatcaagtggcaccgaaagcagctcctggaggacatccagaagctgaaggatgagattgcagatgtgtttgcccaaatcgactgcttcgagagtgcggaggagagccggatggcccagaaggagaaggagctgtgtattgggcgcaagaagttcaacatggaccccgccaagggtatccagtatttcattgagcacaagctgctgacccctgacgtccaggacattgcacggttcctgtataaaggcgagggcctcaacaagacagccattggtacctacctgggggagagggatcccatcaacctgcaggtcctccaggccttcgtggactgccacgagttcgccaacctcaacctcgtccaggccctcaggcagttcctgtggagcttccggctgccgggcgaggcccagaagatagaccggatgatggaggcctttgccactcgatactgcctctgcaacccaggcgtcttccagtccacagacacctgctacgtgttgtccttctccatcatcatgctcaacaccagcctccacaatcccaacgtccgggacaggccgcctttcgagcgctttgtgtccatgaaccgcggcatcaacaatggtagcgacctgcccgaggaccagctgcggaacctcttcgacagcatcaagagtgagccattctccatccctgaggacgacggcaatgacctcactcacaccttcttcaatccagaccgggagggttggctgctcaagctagggggccgcgtgaagacgtggaaacggcgctggttcatcctgaccgacaactgcctctactacttcgagttcaccactgacaaggagccacggggaattatacctcttgagaacctctcggtgcagaaggtggatgaccccaagaagccattctgcctggagctctacaaccctagctgccgaggccagaaaatcaaggcctgcaagaccgatggcgacggcagggtggtggagggcaagcacgaatcgtaccgcatctcagccaccagtgccgaggaacgtgaccagtggatcgagtccatccgagccagcatcacccgtgtccccttctacgacctggtctctactcggaagaagaagattgccagcaagcagtgagattcctggaggtggcactgggggctggtcaccctgagagtcccatcgcctgcagcacctggagacccacctcccaccccagtgcactcttttgggccacagacatcattgctgttccccgttacctcgagctgactctagaggggaaggcagagctcaggagggtgggtgggagctgcagtgggctcagagtccagcaatgaggccccctggcctgggcacccagctgcaggcccctgccctacgtgcactacaggaaggggtgaggagagcagccagaggaaaaccagccccagaatgctgcaacttctcttctctctggacttcggtgtcctcggctctgaaggcgctctctgcacttagatgctgtcagccctcaacgtaggaggggccgtggggtccctaagtgattcttctccctggcaaggctcttccttttcagggatatctctgccaacccttcccctgtcctcgggttgggcttggccctctctgcctgagagagctcagcacacacacagctcagacccacggacaggaccccgggacagaaccccgggagcactgccctaggagcctggaccccacgagctcagtcccagctctgcctctgactcgctgtgtaccctctgccaagtcatgcccattctctagttcttgcaaaactgcagtgtttggactagaaacgtattggcccctgctagccctgtgctccagcttccagctggagatggcagccgttatttgcggagcccaggctgactccggattcaacgttgctggggagagaaaagcagtatagactccaccttccaggatgtccatttcggggagaggagcaggtgggaccctcaagaaaatgacggagaacatcccagacagatgggactcaagcaggatgggtgctatatccaagaagccaagaagggagagtttcgtgcactgtggttaacaggagggccgcctggaggcagtggctgagccagaaagtaacacagagctcatgcttggagagatagagtcttggccatggctttcctgcaagaccactgacgagcagtcccatggtgataaagggcagcccggcgggtcccagcatctcgagaccctctgcagaagtattatcagagtagagctgacttccagtacccgggcagccagctctgtctccagggaggcctggcctggaggaggagtccactaacaggaaacacttctcaccccctcacacaggcccaggggagcccctggagggaaattccttggcaggggaacaggaaatgtggtcgcctctgccccactgccagcctgagtgggcaaggaagcaggtggatcccccagaaggaaccgcagctcgcgaggcacctctcctcgtccccacccacccccacatttgcacaccttccacagggtcaggatggagtagctgccttgcgaggtggtgagactcctgtctctggaggtctgcaagcactggtagtgatattgcagcagacaaggtctgggttgggcgtctgcaggaggagaccttgtgggacatctgaggacatccgcagattcttgtcagcctgtgaactaggccctgcctctgtcacctcattggtccatgaaggagcagccaggggtggtggaaggagcactgggctaggggtcaggggtcagagattctgtcctgctcctgggatgcactggctactcccttagtctactcccttcccctctctggtcctcagcttcctccatcatggaggagatgggatcatggattttctgggcataagtggctgttctgggagtcattccaaagagagaataaaactcctgatccaaaaaaaaaaaaaaaaaaaaa

SEQ ID NO: 924 - protein, 394 aa, Homo sapien
MDLCHPEPAELSSGETEELQRIKWHRKQLLEDIQKLKDEIADVFAQIDCFESAEESRMAQKEKELCIGRKKFNMDPAKGIQYFIEHKLLTPDVQDIARFLYKGEGLNKTAIGTYLGERDPINLQVLQAFVDCHEFANLNLVQALRQFLWSFRLPGEAQKIDRMMEAFATRYCLCNPGVFQSTDTCYVLSFSIIMLNTSLHNPNVRDRPPFERFVSMNRGINNGSDLPEDQLRNLFDSIKSEPFSIPEDDGNDLTHTFFNPDREGWLLKLGGRVKTWKRRWFILTDNCLYYFEFTTDKEPRGIIPLENLSVQKVDDPKKPFCLELYNPSCRGQKIKACKTDGDGRVVEGKHESYRISATSAEERDQWIESIRASITRVPFYDLVSTRKKKIASKQ

SEQ ID NO: 925 - DNA, 2044 bp, Homo sapien
ccggtcggatgccggaccgggggcaccgctgaggcggtgggtccccgacctgcgagacaggtttggaagcccccgctgcgcccagtccgtgcggaccgcgaggccgcgggcgggtggaggcgcgtctccggcacgatgaaggatttgggggcagagcacttggcaggtcatgaaggggtccaacttctcgggttgttgaacgtctacctggaacaagaagagagattccaacctcgagaaaaagggctgagtttgattgaggctaccccggagaatgataacactttgtgtccaggattgagaaatgccaaagttgaagatttaaggagtttagccaacttttttggatcttgcactgaaacttttgtcctggctgtcaatattttggacaggttcttggctcttatgaaggtgaaacctaaacatttgtcttgcattggagtctgttcttttttgctggctgctagaatagttgaagaagactgcaatattccatccactcatgatgtgatccggattagtcagtgtaaatgtactgcttctgacataaaacggatggaaaaaataatttcagaaaaattgcactatgaattggaagctactactgccttaaactttttgcacttataccatactattatactttgtcatacttcagaaaggaaagaaatactgagccttgataaactagaagctcagctgaaagcttgcaactgccgactcatcttttcaaaagcaaaaccatctgtattagccttgtgccttctcaatttggaagtggaaactttgaaatctgttgaattactggaaattctcttgctagttaaaaaacattccaagattaatgacactgagttcttctactggagagagttggtttctaaatgcctagccgagtattcttctcctgaatgttgcaaaccagatcttaagaagttggtttggatcgtttcaaggcgcacagcccagaacctccacaacagctactatagtgttcctgagctgccaacgatacctgaggggggttgttttgatgaaagtgaaagtgaggactcttgtgaagatatgagttgtggagaggagagtctcagcagctctcctcccagtgatcaagagtgcaccttctttttcaacttcaaagtggcacaaacactgtgctttccatcttagaaatctgattgttctgtcagaatttatatttacagggtttcaaagcaataaatgggggaataggtagtttcctggtttagcccccatctagtcaggaattaatatactggaatacctaccttctatttgttattcagatcagatctggcctattttcatatttatcctaagccatcaaatggggtagtgcctcttaaaccattaacagtactttagacattggcactttatttttctcgtagatctttagctactttggggaggagggaaggtgctgataccttcaatttgttacttttcaagatttttaaaaataactagtgtagcttatcttaaacattttataaaaccttcagatgtctttaagcagattggaagtatgcaagtgcttccttagcagggacagtggataatccttaatggtttatcatagatttcaccctccccccttctcagaagagtgagtatgctcttaaatgtcaaacacatttttgttgttttgttttttaaatgatcagtgtctatttgatgtgatgcagatcttataaatttgggaattataatattgacatttctgtgatttttatatatgtaatgtcttaattgagatttgtgttaaggcagaaataattaggctagggctcttagttttcattcctattgccccaagtattgtcaaactatggtattattttaatgttactttaaaaatccataatctgctagttttgcatgtacttatatgaaaacagtgcagtaagttgaaaactcagtatctatggaattgataaatgttgatctggtgtagtatattttatccgcattttcttatattaaaaaatgttctgcatgattacattttatttgcctttgt

SEQ ID NO: 926 - protein, 344 aa, Homo sapien
MKDLGAEHLAGHEGVQLLGLLNVYLEQEERFQPREKGLSLIEATPENDNTLCPGLRNAKVEDLRSLANFFGSCTETFVLAVNILDRFLALMKVKPKHLSCIGVCSFLLAARIVEEDCNIPSTHDVIRISQCKCTASDIKRMEKIISEKLHYELEATTALNFLHLYHTIILCHTSERKEILSLDKLEAQLKACNCRLIFSKAKPSVLALCLLNLEVETLKSVELLEILLLVKKHSKINDTEFFYWRELVSKCLAEYSSPECCKPDLKKLVWIVSRRTAQNLHNSYYSVPELPTIPEGGCFDESESEDSCEDMSCGEESLSSSPPSDQECTFFFNFKVAQTLCFPS

SEQ ID NO: 927 - DNA, 1265 bp, Homo sapien
cgcaggcagggatacagttcctgcaaggggtcccggggggcgcgggaggcgcaggacgctaggctctgccgtcagcccgcaacagcgctcagtccagggagggaggcccgggtggggggcagccgtaagcccccgctcagcgtgcagccaccggggacttgcgcggccgtggcaccgctggagggggcggcctggggctggggctgcccggcggcgccgcgaccgccttccttcgctgcgtcctgcccgccccacgcctcgctcaccgccgccgcttctccctgccccgcagcgcgcagggaccatgtcggcggagaccgcgagcggccccacagaggaccaggtggaaatcctggagtacaacttcaacaaggtcgacaagcacccggattccaccacgctgtgcctcatcgcggccgaggcaggcctttccgaggaggagacccagaaatggtttaagcagcgcctggcaaagtggcggcgctcagaaggcctgccctcagagtgcagatccgtcacagactaaggagatggcaggcattgacagcttcactccatgaaggccatctctgtttctctcctccgcttaaccaagctgttgtggtttttcagcatagtgttgtatgttccattgctagctgtcctgctgtttaacacagtgttgtattttttttctaaatgtacataattagaaaagaaaataacaataggaagctatgtgtatcttctgtgtaaagcagtggcttcactggaaaaatggtgtggctagcatttccctttgagtcatgatgacagatggtgtgaaaaccatctaagtttgcttttgaccatcacctcccagtagcaatttgctttcataatccatttagcaatccaggcctctgttgaaaagataatatgagggagaagggaacacatttccttctgaacttacttccctaagtcactttccttatgtatcatctaatacaatgatggttgagtgaaaatacagaaggggtgtttgagtattcagatttcataaaacacttccttggaatatagctgcattaacttggaaagaagcctgttgggccagaagacagaaactccaactggcaaaaaagcaagcatctaagaaaaaaaaccaccaaagttcttgaatttactatatttaaatgcattggttaagtttattttgctaaataaagtgaactgctttttgtctctaaaatgatattctaaataaaaccttaactttttgttgaaaaaaaaaaaaaaaaaaa

SEQ ID NO: 928 - protein, 73 aa, Homo sapien
MSAETASGPTEDQVEILEYNFNKVDKHPDSTTLCLIAAEAGLSEEETQKWFKQRLAKWRRSEGLPSECRSVTD

SEQ ID NO: 929 - DNA, 2508 bp, Rattus norvegicus
cacctcgctgctccagcctctggggcgcattccaaccttccagcctgcgacctgcggagaaaaaaaattacttattttcttgccccatacataccttgaggcgagcaaaaaaattaaattttaaccatgagggaaatcgtgcacatccaggctggtcagtgtggcaaccagatcggtgccaagttctgggaggtgatcagtgatgaacatggcatcgaccccaccggcacctaccacggggacagcgacctgcagctggaccgcatctctgtgtactacaatgaagccacaggtggcaaatatgttcctcgtgccatcctggtggatctagaacctgggaccatggactctgttcgctcaggtccttttggccagatctttagaccagacaactttgtatttggtcagtctggggcaggtaacaactgggccaaaggccactacacagagggcgccgagctggttgattctgtcctggatgtggtacggaaggaggcagagagctgtgactgcctgcagggcttccagctgacccactcactgggcgggggcacaggctctggaatgggcactctccttatcagcaagatccgagaagaataccctgatcgcatcatgaataccttcagtgtggtgccttcacccaaagtgtctgacaccgtggtcgagccctacaatgccaccctctccgtccatcagttggtagagaatactgatgagacctattgcattgacaacgaggccctctatgatatctgcttccgcactctgaagctgaccacaccaacctacggggatctgaaccaccttgtctcagccaccatgagtggtgtcaccacctgcctccgtttccctggccagctcaatgctgacctccgcaagttggcagtcaacatggtccccttcccacgtctccatttctttatgcctggctttgcccctctcaccagccgtggaagccagcagtatcgagctctcacagtgccggaactcacccagcaggtcttcgatgccaagaacatgatggctgcctgtgacccccgccacggccgatacctcaccgtggctgctgtcttccgtggtcggatgtccatgaaggaggtcgatgagcagatgcttaacgtgcagaacaagaacagcagctactttgtggaatggatccccaacaatgtcaagacagccgtctgtgacatcccacctcgtggcctcaagatggcagtcaccttcattggcaatagcacagccatccaggagctcttcaagcgcatctcggagcagttcactgccatgttccgccggaaggccttcctccactggtacacaggcgagggcatggacgagatggagttcaccgaggctgagagcaacatgaacgacctcgtctctgagtatcagcagtaccaggatgccaccgcagaagaggaggaggatttcggtgaggaggccgaagaggaggcctaaggcagagcccccatcacctcaggcttctcagttcccttagccgtcttactcaactgcccctttcctctccctcagaatttgtgtttgctgcctctatcttgttttttgttttttcttctggggggggtctagaacagtgcctggcacatagtaggcgctcaataaatacttgtttgttgaatgtctcctctctctttccactctgggaaacctaggtttctgccattctgggtgaccctgtatttctttctggtgcccattccatttgtccagttaatacttcctcttaaaaatctccaagaagctgggtctccagatcccatttagaaccaaccaggtgctgaaaacacatgtagataatggccatcatcctaagcccaaagtagaaaatggtagaaggtagtgggtagaagtcactatataaggaaggggatgggattttccattctaaaagttttggagagggaaatccaggctattaaagtcactaaatttctaagtatgtccatttcccatctcagcttcaagggaggtgtcagcagtattatctccactttcaatctccctccaagctctactctggaggagtctgtcccactctgtcaagtggaatccttccctttccaactctacctccctcactcagctcctttcccctgatcagagaaagggatcaagggggttgggaggggggaaagagaccagccttggtccctaagcctccagaaacgtcttcttaatccccaccttttcttactcccaaaaaagaatgaacacccctgactctggagtggtgtatactgccacatcagtgtttgagtcagtccccagaggagaggggaaccctcctccatcttttttgcaacatctcatttcttccttttgctgttgcttcccccctcacacacttggttttgttctatcctacatttgagatttctattttatgttgaacttgctgctttttttcatattgaaaagatgacatcgccccaagagccaaaaataaatgggaattgaaaaaaaaaaaaaaaaaaaaaaaaaaaa

SEQ ID NO: 930 - protein, 444 aa, Rattus norvegicus
MREIVHIQAGQCGNQIGAKFWEVISDEHGIDPTGTYHGDSDLQLDRISVYYNEATGGKYVPRAILVDLEPGTMDSVRSGPFGQIFRPDNFVFGQSGAGNNWAKGHYTEGAELVDSVLDVVRKEAESCDCLQGFQLTHSLGGGTGSGMGTLLISKIREEYPDRIMNTFSVVPSPKVSDTVVEPYNATLSVHQLVENTDETYCIDNEALYDICFRTLKLTTPTYGDLNHLVSATMSGVTTCLRFPGQLNADLRKLAVNMVPFPRLHFFMPGFAPLTSRGSQQYRALTVPELTQQVFDAKNMMAACDPRHGRYLTVAAVFRGRMSMKEVDEQMLNVQNKNSSYFVEWIPNNVKTAVCDIPPRGLKMAVTFIGNSTAIQELFKRISEQFTAMFRRKAFLHWYTGEGMDEMEFTEAESNMNDLVSEYQQYQDATAEEEEDFGEEAEEEA

SEQ ID NO: 931 - DNA, 1983 bp, Homo sapien
gaattgaaccacccattttcctttcttagccaaatcaccaaaatgtccagttagaacaagaatttagcattctgcaaaagaagttaacagctgagataacgaggaaatattctgaaatggatcccaaatatttcatcttaattttgttttgtggacacctgaacaatacatttttttcaaagacagagacaattacaacagagaagcagtcacagcctaccttattcacatcatcaatgtcacaggtattggctaattctcaaaacacaacagggaatcctttgggtcaaccaacacaattcagcgacactttttctggacaatcaatatcacctgccaaagtcactgctggacaaccaacaccagctgtctatacctcttctgaaaaaccagaagcacatacttctgctggacaaccacttgcctacaacaccaaacaaccaacaccaatagccaacacctcctcccagcaagccgtgttcacctctgccagacaactaccatctgcccgtacttctaccacacaaccaccaaagtcatttgtctatacttttactcaacaatcatcatctgtccagatcccttctagaaaacaaataactgttcataatccatccacacaaccaacatcaactgtcaaaaattcacctaggagtacaccaggatttatcttagatactaccagtaacaaacaaaccccacaaaaaaacaattataattcaatagctgccatactaattggtgtacttctgacttctatgttggtagctataatcatcattgtactttggaaatgcttaaggaaaccagttttaaatgatcaaaattgggcaggtagatctccatttgctgatggagaaacccctgacatttgtatggataacatcagagaaaatgaaatatccacaaaacgtacatcaatcatttcacttacaccctggaaaccaagcaaaagcacacttttagcagatgacttagaaattaagttgtttgaatcaagtgaaaacattgaagactccaacaaccccaaaacagagaaaataaaagatcaagtaaatggtacatcagaagatagtgctgatggttcaacagttggaactgctgtttcttcttcagatgatgcaggtctgcctccaccacctccccttctggatttggaaggacaggaaagtaaccaatctgacaaacccacaatgacaattgtatctcctcttccaaatgattctactagtctccctccatctctggactgtctcaatcaagactgtggagatcataaatctgagataatacaatcatttccaccgcttgactcacttaacttgcccctgccaccagtagattttatgaaaaaccaagaagattccaaccttgagatccagtgtcaggagttctctattcctcccaactctgatcaagatcttaatgaatccctgccacctccacctgcagaactgttataaatattacaacttgctttttagctgatcttccatcctcaaatgactcttttttctttatatgttaacatatataaaatggcaactgatagtcaattttgatttttattcaggaactatctgaaatctgctcagagcctatgtgcatagatgaaacttttttttaaaaaaagttatttaacagtaatctatttactaattatagtacctatctttaaagtatagtacattttacatatgtaaatggtatgtttcaataatttaagaactctgaaacaatctacatatacttattacccagtacagttttttttcccctgaaaagctgtgtataaaattatggtgaataaacttttatgtttccatttcaaagaccagggtggagaggaataagagactaagtatatgcttcaagttttaaattaatacctcaagtattaaataaatattccaagtttgtgggaatgggagattaaaatgcatgtttgagagtaaaaaaaaaaaaaaaaaaaaaaaaaaaaaa

SEQ ID NO: 932 - protein, 448 aa, Homo sapien
MDPKYFILILFCGHLNNTFFSKTETITTEKQSQPTLFTSSMSQVLANSQNTTGNPLGQPTQFSDTFSGQSISPAKVTAGQPTPAVYTSSEKPEAHTSAGQPLAYNTKQPTPIANTSSQQAVFTSARQLPSARTSTTQPPKSFVYTFTQQSSSVQIPSRKQITVHNPSTQPTSTVKNSPRSTPGFILDTTSNKQTPQKNNYNSIAAILIGVLLTSMLVAIIIIVLWKCLRKPVLNDQNWAGRSPFADGETPDICMDNIRENEISTKRTSIISLTPWKPSKSTLLADDLEIKLFESSENIEDSNNPKTEKIKDQVNGTSEDSADGSTVGTAVSSSDDAGLPPPPPLLDLEGQESNQSDKPTMTIVSPLPNDSTSLPPSLDCLNQDCGDHKSEIIQSFPPLDSLNLPLPPVDFMKNQEDSNLEIQCQEFSIPPNSDQDLNESLPPPPAELL

SEQ ID NO: 933 - DNA, 4090 bp, Homo sapien
agtttccgggcccgggctgctctcggagccatgagctgcggccgcccccctcccgacgtggacggcatgatcaccctcaaggtggacaacctgacctaccgcacctctcccgacagcttgaggcgcgtgttcgagaagtacgggcgcgtgggcgacgtgtacatcccgcgggagccccacaccaaggcgccccggggcttcgctttcgtccgctttcacgaccggcgcgacgcccaagacgccgaggccgccatggacggggcggagctggacggacgcgagctgcgggtgcaggtggcgcgctatggccgccgggacctgccccgcagccgccagggagagccacgcggcaggtccagaggcggcggctacggacggcggagccgcagctacgggcggcggagccgcagccccaggcggcgacaccgcagccgatcccggggtcccagctgctccaggtcccgcagccgatctcgctataggggttctcgctatagccggtctccctacagccgatctccttacagccggtcgcgctacagccgctctccctacagcagatctcgctacagggaatctcgctacggcggatctcactacagctcatctggttacagtaactctcgctacagccgatatcacagcagccggtctcactcgaagtctgggtcctccactagctctcgctctgcatcaacctccaaatcgagctctgcgcgacgatccaagtcctcctcggtctccaggtctcgctcgcggtccaggtcttcatctatgaccaggagtcctccccgggtatccaagaggaaatccaagtcaaggtcgcgatccaagaggccccccaagtctcctgaagaggaaggacagatgtcctcttaagaaaatgatgcatcaggaagcaacgtgatggaggacttgggggaaaaggatcacatactcagtctatggaagcaacgtccctggaagaagaggctgcctattgaaaaggttgtgtcacacttttctacctttttgccagtttgaagctttgcatcaggtggcaaaattcattctatgtgccgttttgttgttattcacattttattgtaacttaggaggtgaacgacctaagattacgttattgggtttggatatttgaggcaaaaatttatttttatttctatagtgatgactgttttggtttgaaatgaacagattggtaacctaatttgtggcctcctgacttttaaggaaacgtgtgcagccattacacacagcctaacgctgtcaagacattgcttcaacattgccttcattccttaaaaacctacaaaaggtggtgtaaattaatatggataattttatttacctccaggtctaaaaggtagtgtgacccaaatttgtataaagatttttcatgtgaaaggactggggttttagcaaacacaggtctaatctcttttgtgtttttgtgcaccaggcccggctgcgtagcagttgagtgatgctggttagctattaaggtggcctgttgcagtgcagagtgctgagctgcttcctgttttcttctgattgctcctggggaaaacacgccttgtcctgaagaacaaatggctgtccagtttattaaaatgcctgtcaactgcacttccagtcacccaggccttgcagataaataatggagcatgcagtgagcacatctagctgacgataatcacaccttttcccccgtcttttctgaaaaattgtaaatctgatcatatcaacatgtatgaacttaaaatatggagaatgttatggaagaaatagtttataagtttgttaagtacttataacatggtttatctttttgattattaattttttacgctaaccattgtttctgtagttaaaattgttttcttggtgttatcttttctcagaataaaattagaaacttttgatggaaagtaggttgttttattttctgtatgacttttgaatatttgtacttttgagaaaattattagcaccaagtgtttctcaaaatataatttttaaaaaatccttaaaaaaaaaaaaaaaaaactcgagactagttctctctctcccaaggagaagcagaggatcaccacgctattctccccgtcatagcagatctcgctctcgtacataagatgattggtgacactttttgtagaacccatgttgtatacagttttcctttattcagtacaatcttttcattttttaattcaaactgttttgttcagaatgggctaaagtgttgaattgcattcttgtaatatccccttgctcctaacatctacattcccttcgtgtctttgataaattgtattttaagtgatgtcatagacaggattgtttaaatttagttaactccatactcttcagactgtgatattgtgtaaatgtctatctgccctggtttgtgtgaactgggatgttgggggtgtttgtggttatcttacctggggaagttcttatgtttatcttgcttttcatgtgtctttctgtagacatatctgaagagatggattaagaatgctttggattaaggattgtggagcacatttcaatcattttaggattgtcaaaaggaggattgaggaggatcagatcaataatggaggcaatggtatgactccaagtgctattgtcacagatgaaattggcagtattgaccttatactaaaaggcaggggttaaaaatgattatatacattttccttaaaacacttgcaaacattttattcagttgtctttagctacaattgctttgctttttaaaccttggcaattgtggcaaaattatattgcccattttgtagcaacttattttgctcccttccccccatttttgttttaatagggactaatgtgggaagaactggctaatttgtcacagtgcttagttacaactgttaatgtgtgacctgctgttggtgtacatgtgggtacagggtgtttttaaatccaacaagatagagtataatatcaatactgctaaatctgcatgtcctctgtgtgactgatagagcgttgctatttcatttttttaagacaaaatgaaagcaaaatatagagttccaatgtattggtgtagataatctagttgggaatacttttaagtctcaccttcccctttaaactaatattcataattggttcatatgtttaaaagactttaatttacaaattaaattgcaaatgggagcattagatttagttttagacttaggtgggtagcaatgccagtaaacttaaattacgtaacttcttgcaaccacgaaacctgtaatacgctgtacagtaacaagtgttggcattatcagttgaactgtaaatacaaaatgcttcttccaattagtctctatgatgattaagtttctaaaatttatctgaacaccattcagaaacttgttttggggaatttgatagttattgatgtgcatctgttaaactgatgacagacataactcatcattccccagaaaccttttttgattacagtatctaacattttgcctcctcttttttggttttgctggttataaaggtttggattggagagggctcactggatcccaatccttggagctggatcattggattcaaatcataatgtggataggatagggaggatgaattaccaggattcatggagcgggatcagattaccaggaacataggagtggattcctgccccaaccaaaccgcattcgtgtggatttttttattcaacttaattggctattccaaagattttttttttcctatttttgacgattggagcccttaagatgcacgatggaattgtgttttgcgttttttggtaaaaggagcaaagcgaggacctggagataaacgctggagcaatctccttggaaggattcagcacgagtagatggtaaacatttaaaggggaaagggggggtttgtttaaaatagtaaatcagtaagtcacttctaaatttaaagaaaacaaaattggagttgaagaataagtaggtttccaattggctattgcccgttttttttgaaaaaataaacatttttttaaaaaaaaaaaaaaaaaaaaaaaaaaaaaaaaaaaaaaaaaaaaaaaaaa

SEQ ID NO: 934 - protein, 282 aa, Homo sapien
MSCGRPPPDVDGMITLKVDNLTYRTSPDSLRRVFEKYGRVGDVYIPREPHTKAPRGFAFVRFHDRRDAQDAEAAMDGAELDGRELRVQVARYGRRDLPRSRQGEPRGRSRGGGYGRRSRSYGRRSRSPRRRHRSRSRGPSCSRSRSRSRYRGSRYSRSPYSRSPYSRSRYSRSPYSRSRYRESRYGGSHYSSSGYSNSRYSRYHSSRSHSKSGSSTSSRSASTSKSSSARRSKSSSVSRSRSRSRSSSMTRSPPRVSKRKSKSRSRSKRPPKSPEEEGQMSS

SEQ ID NO: 935 - DNA, 1937 bp, Homo sapien; identical to SEQ ID NO: 648

SEQ ID NO: 936 - protein, 255 aa, Homo sapien; identical to SEQ ID NO: 649

SEQ ID NO: 937 - DNA, 5068 bp, Homo sapien
atggctggcggagcctggggccgcctggcctgttacttggagttcctgaagaaggaggagctgaaggagttccagcttctgctcgccaataaagcgcactccaggagctcttcgggtgagacacccgctcagccagagaagacgagtggcatggaggtggcctcgtacctggtggctcagtatggggagcagcgggcctgggacctagccctccatacctgggagcagatggggctgaggtcactgtgcgcccaagcccaggaaggggcaggccactctccctcattcccctacagcccaagtgaaccccacctggggtctcccagccaacccacctccaccgcagtgctaatgccctggatccatgaattgccggcggggtgcacccagggctcagagagaagggttttgagacagctgcctgacacatctggacgccgctggagagaaatctctgcctcactcctctaccaagctcttccaagctccccagaccatgagtctccaagccaggagtcacccaacgcccccacatccacagcagtgctggggagctggggatccccacctcagcccagcctagcacccagagagcaggaggctcctgggacccaatggcctctggatgaaacgtcaggaatttactacacagaaatcagagaaagagagagagagaaatcagagaaaggcaggcccccatgggcagcggtggtaggaacgcccccacaggcgcacaccagcctacagccccaccaccacccatgggagccttctgtgagagagagcctctgttccacatggccctggaaaaatgaggattttaaccaaaaattcacacagctgctacttctacaaagacctcaccccagaagccaagatcccctggtcaagagaagctggcctgattatgtggaggagaatcgaggacatttaattgagatcagagacttatttggcccaggcctggatacccaagaacctcgcatagtcatactgcagggggctgctggaattgggaagtcaacactggccaggcaggtgaaggaagcctgggggagaggccagctgtatggggaccgcttccagcatgtcttctacttcagctgcagagagctggcccagtccaaggtggtgagtctcgctgagctcatcggaaaagatgggacagccactccggctcccattagacagatcctgtctaggccagagcggctgctcttcatcctcgatggtgtagatgagccaggatgggtcttgcaggagccgagttctgagctctgtctgcactggagccagccacagccggcggatgcactgctgggcagtttgctggggaaaactatacttcccgaggcatccttcctgatcacggctcggaccacagctctgcagaacctcattccttctttggagcaggcacgttgggtagaggtcctggggttctctgagtccagcaggaaggaatatttctacagatatttcacagatgaaaggcaagcaattagagcctttaggttggtcaaatcaaacaaagagctctgggccctgtgtcttgtgccctgggtgtcctggctggcctgcacttgcctgatgcagcagatgaagcggaaggaaaaactcacactgacttccaagaccaccacaaccctctgtctacattaccttgcccaggctctccaagctcagccattgggaccccagctcagagacctctgctctctggctgctgagggcatctggcaaaaaaagacccttttcagtccagatgacctcaggaagcatgggttagatggggccatcatctccaccttcttgaagatgggtattcttcaagagcaccccatccctctgagctacagcttcattcacctctgtttccaagagttctttgcagcaatgtcctatgtcttggaggatgagaaggggagaggtaaacattctaattgcatcatagatttggaaaagacgctagaagcatatggaatacatggcctgtttggggcatcaaccacacgtttcctattgggcctgttaagtgatgagggggagagagagatggagaacatctttcactgccggctgtctcaggggaggaacctgatgcagtgggtcccgtccctgcagctgctgctgcagccacactctctggagtccctccactgcttgtacgagactcggaacaaaacgttcctgacacaagtgatggcccatttcgaagaaatgggcatgtgtgtagaaacagacatggagctcttagtgtgcactttctgcattaaattcagccgccacgtgaagaagcttcagctgattgagggcaggcagcacagatcaacatggagccccaccatggtagtcctgttcaggtgggtcccagtcacagatgcctattggcagattctcttctccgtcctcaaggtcaccagaaacctgaaggagctggacctaagtggaaactcgctgagccactctgcagtgaagagtctttgtaagaccctgagacgccctcgctgcctcctggagaccctgcggttggctggctgtggcctcacagctgaggactgcaaggaccttgcctttgggctgagagccaaccagaccctgaccgagctggacctgagcttcaatgtgctcacggatgctggagccaaacacctttgccagagactgagacagccgagctgcaagctacagcgactgcagctggtcagctgtggcctcacgtctgactgctgccaggacctggcctctgtgcttagtgccagccccagcctgaaggagctagacctgcagcagaacaacctggatgacgttggcgtgcgactgctctgtgaggggctcaggcatcctgcctgcaaactcatacgcctggggctggaccagacaactctgagtgatgagatgaggcaggaactgagggccctggagcaggagaaacctcagctgctcatcttcagcagacggaaaccaagtgtgatgacccctactgagggcctggatacgggagagatgagtaatagcacatcctcactcaagcggcagagactcggatcagagagggcggcttcccatgttgctcaggctaatctcaaactcctggacgtgagcaagatcttcccaattgctgagattgcagaggaaagctccccagaggtagtaccggtggaactcttgtgcgtgccttctcctgcctctcaaggggacctgcatacgaagcctttggggactgacgatgacttctggggccccacggggcctgtggctactgaggtagttgacaaagaaaagaacttgtaccgagttcacttccctgtagctggctcctaccgctggcccaacacgggtctctgctttgtgatgagagaagcggtgaccgttgagattgaattctgtgtgtgggaccagttcctgggtgagatcaacccacagcacagctggatggtggcagggcctctgctggacatcaaggctgagcctggagctgtggaagctgtgcacctccctcactttgtggctctccaagggggccatgtggacacatccctgttccaaatggcccactttaaagaggaggggatgctcctggagaagccagccagggtggagctgcatcacatagttctggaaaaccccagcttctcccccttgggagtcctcctgaaaatgatccataatgccctgcgcttcattcccgtcacctctgtggtgttgctttaccaccgcgtccatcctgaggaagtcaccttccacctctacctgatcccaagtgactgctccattcggaaggccatagatgatctagaaatgaaattccagtttgtgcgaatccacaagccacccccgctgaccccactttatatgggctgtcgttacactgtgtctgggtctggttcagggatgctggaaatactccccaaggaactggagctctgctatcgaagccctggagaagaccagctgttctcggagttctacgttggccacttgggatcagggatcaggctgcaagtgaaagacaagaaagatgagactctggtgtgggaggccttggtgaaaccaggagatctcatgcctgcaactactctgatccctccagcccgcatagccgtaccttcacctctggatgccccgcagttgctgcactttgtggaccagtatcgagagcagctgatagcccgagtgacatcggtggaggttgtcttggacaaactgcatggacaggtgctgagccaggagcagtacgagagggtgctggctgagaacacgaggcccagccagatgcggaagctgttcagcttgagccagtcctgggaccggaagtgcaaagatggactctaccaagccctgaaggagacccatcctcacctcattatggaactctgggagaagggcagcaaaaagggactcctgccactcagcagctgaagtatcaacaccagcccttgacccttgagtcctggctttggctgacccttctttgggtctcagtttctttctctgcaaacaagttgccatctggtttgccttccagcactaaagtaatggaactttgatgatgcctttgctgggcattatgtgtccatgccagggatgccacagggggccccagtccaggtggcctaacagcatctcagggaatgtccatctggagctggcaagacccctgcagacctcatagagcctcatctggtggccacagcagccaagcctagagccctccggatcccatccaggcgcaaagaggaataggagggacatggaaccatttgcctctggctgtgtcacagggtgagccccaaaattggggttcagcgtgggaggccacgtggattcttggctttgtacaggaagatctacaagagcaagccaacagagtaaagtggaaggaagtttattcagaaaataaaggagtatcacagctcttttagaatttgtctagcaggctttccagtttttaccagaaaacccctataaattaaaaattttttacttaaatttaagaattaaaaaaatacaaaaaagaaaaaatgaaaataaaggaataagaagttacctactccaaaaaaaaaaa

SEQ ID NO: 938 - protein, 1473 aa, Homo sapien
MAGGAWGRLACYLEFLKKEELKEFQLLLANKAHSRSSSGETPAQPEKTSGMEVASYLVAQYGEQRAWDLALHTWEQMGLRSLCAQAQEGAGHSPSFPYSPSEPHLGSPSQPTSTAVLMPWIHELPAGCTQGSERRVLRQLPDTSGRRWREISASLLYQALPSSPDHESPSQESPNAPTSTAVLGSWGSPPQPSLAPREQEAPGTQWPLDETSGIYYTEIREREREKSEKGRPPWAAVVGTPPQAHTSLQPHHHPWEPSVRESLCSTWPWKNEDFNQKFTQLLLLQRPHPRSQDPLVKRSWPDYVEENRGHLIEIRDLFGPGLDTQEPRIVILQGAAGIGKSTLARQVKEAWGRGQLYGDRFQHVFYFSCRELAQSKVVSLAELIGKDGTATPAPIRQILSRPERLLFILDGVDEPGWVLQEPSSELCLHWSQPQPADALLGSLLGKTILPEASFLITARTTALQNLIPSLEQARWVEVLGFSESSRKEYFYRYFTDERQAIRAFRLVKSNKELWALCLVPWVSWLACTCLMQQMKRKEKLTLTSKTTTTLCLHYLAQALQAQPLGPQLRDLCSLAAEGIWQKKTLFSPDDLRKHGLDGAIISTFLKMGILQEHPIPLSYSFIHLCFQEFFAAMSYVLEDEKGRGKHSNCIIDLEKTLEAYGIHGLFGASTTRFLLGLLSDEGEREMENIFHCRLSQGRNLMQWVPSLQLLLQPHSLESLHCLYETRNKTFLTQVMAHFEEMGMCVETDMELLVCTFCIKFSRHVKKLQLIEGRQHRSTWSPTMVVLFRWVPVTDAYWQILFSVLKVTRNLKELDLSGNSLSHSAVKSLCKTLRRPRCLLETLRLAGCGLTAEDCKDLAFGLRANQTLTELDLSFNVLTDAGAKHLCQRLRQPSCKLQRLQLVSCGLTSDCCQDLASVLSASPSLKELDLQQNNLDDVGVRLLCEGLRHPACKLIRLGLDQTTLSDEMRQELRALEQEKPQLLIFSRRKPSVMTPTEGLDTGEMSNSTSSLKRQRLGSERAASHVAQANLKLLDVSKIFPIAEIAEESSPEVVPVELLCVPSPASQGDLHTKPLGTDDDFWGPTGPVATEVVDKEKNLYRVHFPVAGSYRWPNTGLCFVMREAVTVEIEFCVWDQFLGEINPQHSWMVAGPLLDIKAEPGAVEAVHLPHFVALQGGHVDTSLFQMAHFKEEGMLLEKPARVELHHIVLENPSFSPLGVLLKMIHNALRFIPVTSVVLLYHRVHPEEVTFHLYLIPSDCSIRKAIDDLEMKFQFVRIHKPPPLTPLYMGCRYTVSGSGSGMLEILPKELELCYRSPGEDQLFSEFYVGHLGSGIRLQVKDKKDETLVWEALVKPGDLMPATTLIPPARIAVPSPLDAPQLLHFVDQYREQLIARVTSVEVVLDKLHGQVLSQEQYERVLAENTRPSQMRKLFSLSQSWDRKCKDGLYQALKETHPHLIMELWEKGSKKGLLPLSS

SEQ ID NO: 939 - DNA, 3925 bp, Homo sapien
acagcacagacagattgacctattggggtgtttcgcgagtgtgagagggaagcgccgcggcctgtatttctagacctgcccttcgcctggttcgtggcgccttgtgaccccgggcccctgccgcctgcaagtcggaaattgcgctgtgctcctgtgctacggcctgtggctggactgcctgctgctgcccaactggctggcaagatgaagctctccctggtggccgcgatgctgctgctgctcagcgcggcgcgggccgaggaggaggacaagaaggaggacgtgggcacggtggtcggcatcgacctggggaccacctactcctgcgtcggcgtgttcaagaacggccgcgtggagatcatcgccaacgatcagggcaaccgcatcacgccgtcctatgtcgccttcactcctgaaggggaacgtctgattggcgatgccgccaagaaccagctcacctccaaccccgagaacacggtctttgacgccaagcggctcatcggccgcacgtggaatgacccgtctgtgcagcaggacatcaagttcttgccgttcaaggtggttgaaaagaaaactaaaccatacattcaagttgatattggaggtgggcaaacaaagacatttgctcctgaagaaatttctgccatggttctcactaaaatgaaagaaaccgctgaggcttatttgggaaagaaggttacccatgcagttgttactgtaccagcctattttaatgatgcccaacgccaagcaaccaaagacgctggaactattgctggcctaaatgttatgaggatcatcaacgagcctacggcagctgctattgcttatggcctggataagagggagggggagaagaacatcctggtgtttgacctgggtggcggaaccttcgatgtgtctcttctcaccattgacaatggtgtcttcgaagttgtggccactaatggagatactcatctgggtggagaagactttgaccagcgtgtcatggaacacttcatcaaactgtacaaaaagaagacgggcaaagatgtcaggaaagacaatagagctgtgcagaaactccggcgcgaggtagaaaaggccaaacgggccctgtcttctcagcatcaagcaagaattgaaattgagtccttctatgaaggagaagacttttctgagaccctgactcgggccaaatttgaagagctcaacatggatctgttccggtctactatgaagcccgtccagaaagtgttggaagattctgatttgaagaagtctgatattgatgaaattgttcttgttggtggctcgactcgaattccaaagattcagcaactggttaaagagttcttcaatggcaaggaaccatcccgtggcataaacccagatgaagctgtagcgtatggtgctgctgtccaggctggtgtgctctctggtgatcaagatacaggtgacctggtactgcttgatgtatgtccccttacacttggtattgaaactgtgggaggtgtcatgaccaaactgattccaaggaacacagtggtgcctaccaagaagtctcagatcttttctacagcttctgataatcaaccaactgttacaatcaaggtctatgaaggtgaaagacccctgacaaaagacaatcatcttctgggtacatttgatctgactggaattcctcctgctcctcgtggggtcccacagattgaagtcacctttgagatagatgtgaatggtattcttcgagtgacagctgaagacaagggtacagggaacaaaaataagatcacaatcaccaatgaccagaatcgcctgacacctgaagaaatcgaaaggatggttaatgatgctgagaagtttgctgaggaagacaaaaagctcaaggagcgcattgatactagaaatgagttggaaagctatgcctattctctaaagaatcagattggagataaagaaaagctgggaggtaaactttcctctgaagataaggagaccatggaaaaagctgtagaagaaaagattgaatggctggaaagccaccaagatgctgacattgaagacttcaaagctaagaagaaggaactggaagaaattgttcaaccaattatcagcaaactctatggaagtgcaggccctcccccaactggtgaagaggatacagcagaaaaagatgagttgtagacactgatctgctagtgctgtaatattgtaaatactggactcaggaacttttgttaggaaaaaattgaaagaacttaagtctcgaatgtaattggaatcttcacctcagagtggagttgaaactgctatagcctaagcggctgtttactgcttttcattagcagttgctcacatgtctttgggtgggggggagaagaagaattggccatcttaaaaagcaggtaaaaaacctgggttagggtgtgtgttcaccttcaaaatgttctatttaacaactgggtcatgtgcatctggtgtaggaagttttttctaccataagtgacaccaataaatgtttgttatttacactggtctaatgtttgtgagaagcttctaattagatcaattacttattttaggaaatttaagactagatactcgtgtgtggggtgaggggagggagtatttggtatgttgggataaggaaacacttctatttaatgcttccagggattttttttttttttttttaaccctcctgggcccaagtgatccttccacctcagtctcccagctaattgagaccacaggcttgttaccaccatgctcggcttttgcattaatctaagaaaaggggagagaagttaatccacatctttactcaggcaaggggcatttcacagtgcccaagagtggggttttcttgaacatacttggtttcctatttccccttatctttctaaaactgcctttctggtggctttttttaaaattattactaatgatgcttttatagctgcttggattctctgagaaatgatggggagtgagtgatcactggtattaactttatacacttggatttcatttgtaactttaggatgtaaaggtatattgtgaaccctagctgtgtcagaatctccatccctgaaatttctcattagtggtactggggtgggatcttggatggtgacattgaaactacactaaatcccctcactatgaatgggttgttaaaggcaatggtttgtgtcaaaactggtttaggattacttagattgtgttcctgaagaaaagagtccaggtaaatggtatgatcaataaaggacaggctggtgctaacataaaatccaatattgtaatcctagcactttgggaggccaaggcgggtggatcacaaggtcaagagatagagaccatctttgccaacatggtgaaactccatctctactgaaaatacaaaaattagctgggcgtggtagtgcaagctgaaggctgaggcaggagaatcactcgaacccgggaggcagaggttgcagtgagccgagatcacaccactgtactccagcccggcactccagcctggcgacaagagtgagactccacctcaaaaaaaaaaaaaagaatccaatactgcccaaggataggtattttatagatgggcaactggctgaaaggttaattctctagggctagtagaactggatcccaacaccaaactcttaattagacctaggcctcagctgcactgcccgaaaagcatttgggcagaccctgagcagaatactggtctcaggccaagcccaatacagccattaaagatgacctacagtgctgtgtaccctggggcaatagggttaaatggtagttagcaactagggctagtcttcccttacctcaaaggctctcactaccgtggaccacctagtctgtaactctttctgaggagctgttactgaatattaaaaagatagacttcaaaaaaaaaaaaaaaaaa

SEQ ID NO: 940 - protein, 654 aa, Homo sapien
MKLSLVAAMLLLLSAARAEEEDKKEDVGTVVGIDLGTTYSCVGVFKNGRVEIIANDQGNRITPSYVAFTPEGERLIGDAAKNQLTSNPENTVFDAKRLIGRTWNDPSVQQDIKFLPFKVVEKKTKPYIQVDIGGGQTKTFAPEEISAMVLTKMKETAEAYLGKKVTHAVVTVPAYFNDAQRQATKDAGTIAGLNVMRIINEPTAAAIAYGLDKREGEKNILVFDLGGGTFDVSLLTIDNGVFEVVATNGDTHLGGEDFDQRVMEHFIKLYKKKTGKDVRKDNRAVQKLRREVEKAKRALSSQHQARIEIESFYEGEDFSETLTRAKFEELNMDLFRSTMKPVQKVLEDSDLKKSDIDEIVLVGGSTRIPKIQQLVKEFFNGKEPSRGINPDEAVAYGAAVQAGVLSGDQDTGDLVLLDVCPLTLGIETVGGVMTKLIPRNTVVPTKKSQIFSTASDNQPTVTIKVYEGERPLTKDNHLLGTFDLTGIPPAPRGVPQIEVTFEIDVNGILRVTAEDKGTGNKNKITITNDQNRLTPEEIERMVNDAEKFAEEDKKLKERIDTRNELESYAYSLKNQIGDKEKLGGKLSSEDKETMEKAVEEKIEWLESHQDADIEDFKAKKKELEEIVQPIISKLYGSAGPPPTGEEDTAEKDEL

SEQ ID NO: 941 - DNA, 3727 bp, Homo sapien
cggccgccggcattcgccgcgtggttcccagcgacctgtatcccctcgtgctcggcttcctgcgcgataaccaactctcagaggtggccaataagttcgccaaagcgacaggagctacacagcaggatgccaatgcctcttccctcttagacatctatagcttctggctcaagtctgccaaggtcccagagcgaaagttacaggcaaatggaccagtggctaagaaagctaagaagaaggcctcatccagtgacagtgaggacagcagcgaggaggaggaggaagttcaagggcctccagcaaagaaggctgctgtacctgccaagcgagtcggtctgcctcctgggaaggctgcagccaaagcatcagagagtagcagcagtgaagagtccagtgatgatgatgatgaggaggaccaaaagaaacagcctgtccagaagggagttaagccccaagccaaggcagccaaagctcctcctaagaaggccaagagctctgattctgattctgactcaagctccgaggatgagccaccaaagaaccagaagccaaagataacacctgtgacagttaaagctcagactaaagcccctcccaaaccagctcgagcagcacctaaaatagccaatggtaaagcagccagtagcagcagtagcagcagcagcagcagtagcagtgatgactcagaggaggagaaggcagcagccacccccaagaaggtctggaccataacttctgtcagggcagagactgtacctaaaaagcaagttgtggccaaggccccagtgaaagcagctaccacccctacccggaagagttctagcagtgaggattcctccagtgacgaggaagaggagcaaaaaaaacccatgaaaaataaaccaggtccctacagttcagtccccccgccttctgctcccccaccaaagaagtctctgggaacccagcctcccaagaaggctgtggagaagcagcagcctgtggaaagcagtgaagacagcagtgatgagtctgattcaagttctgaagaagagaagaaacccccaactaaggcagtagtctctaaagcaaccactaaaccacctccagcaaagaaagcagcagagagctcttcagacagctcagactctgacagctctgaggatgatgaagctccttctaagccagctggtaccaccaagaattcttcaaataagccagctgtcaccaccaagtcacctgcagtgaagccagctgcagcccccaagcaacctgtgggcggtggccagaagcttctgacgagaaaggctgacagcagctccagtgaggaagagagcagctccagtgaggaggagaagacaaagaagatggtggccaccactaagcccaaggcgactgccaaagcagctctacctctgcctgccaagcaggctcctcagggtagtagggacagcagctctgattcagacagctccagcagtgaggaggaggaagagaagacatctaagtctgcagttaagaagaagccacagaaggtagcaggaggtgcagccccttccaagccagcctctgcaaagaaaggaaaggctgagagcagcaacagttcttcttctgatgactccagtgaggaagaggaagagaagctcaagggcaagggctctccaagaccacaagcccccaaggccaatggcacctctgcactgactgcccagaatggaaaagcagctaagaacagtgaggaggaggaagaagaaaagaaaaaggcggcagtggtagtttccaaatcaggttcattaaagaagcggaagcagaatgaggctgccaaggaggcagagactcctcaggccaagaagataaagcttcagacccctaacacatttccaaaaaggaagaaaggagaaaaaagggcatcatccccattccgaagggtcagggaggaggaaattgaggtggattcacgagttgcggacaactcctttgatgccaagcgaggtgcagccggagactggggagagcgagccaatcaggttttgaagttcaccaaaggcaagtcctttcggcatgagaaaaccaagaagaagcggggcagctaccggggaggctcaatctctgtccaggtcaattctattaagtttgacagcgagtgacctgaggccatcttcggtgaagcaagggtgatgatcggagactacttactttctccagtggacctgggaaccctcaggtctctaggtgagggtcttgatgaggacagaagtttagagtaggtcctaagactttacagtgtaacatcctctctggtccttttctgtgttcctagttttgtacagacttgtttttgagtgttgagtagcagggacaaaataagggaatgttattttttaagaaaattcattttcattgttgtctccttccttttctgtgaaagtcctcatactgagaaatttgtatattttatattaaatcacttactattgatttttgttgtgattttcaaaggtggattcccacagataaaatcttggctattgcccaaaacatagtaaagggtcacgtgtgactttttataataggaagaaaattctgcctttgtgagtgcacatgtccacatttcatccctccttccctcaaaaccctagagaggggcattaaagaattgttgatgtatatgcaatgtctgttaagcatgcactatgtatttcatcctcatttattgggtctgggactgaagtttttagccagcatggacctaacctactttttgggataaaattctctgttttgttacaggcaaaattctggtatggcgtgaatgccatgggtcattctgaatatatttttttctgtaattttatcattacacgatgtttgcaatacgtgctttgttttttaatttgaaagcaaacttttctactgttgaaagacattttttgacaacttgacccttcctagtattgagttctaagttgaggactgcatcttctcgttttttacagtatagagaacaaaatgacattagtttgaaaaatacatatcacttggtattgctgtcttggttgcagtggtgatacagaattggtttcattaattcctacatggttgagaatcactgatcaagaaagtggggggaaaaaaaacaaacgttaaaacctcaatcctcagtaggaaggtagattacattaggtgaaattataggtaatctatgtatgtgctaatggggttggaaagaaccttacagagcatattacctgataaactggagtgggtttgggagaacaaactaataggattattgtgtctcctagttggtacctgggagcaattgacatgcccccttcagaaccttaactgttagtagcagtggctgtaacaacacaaaccagtgaccagagataacagcttttaggccaagctggcctgacggtatggctgcaggaagtgactgagcagtagcggtactcagccagaccaagacggagagggaagagtccacagctttctggaagctaaggcattctggtggtagaaaagtgtgccccaagccttcatggacgagttataggtcttaagattagtctcctcttgtttggattccatacttgctaaataacctgataataacctggttttccatgtaactgcctctaggaagaaaatgtactgttcatgctgacacagatatttcagtctgcatggtaaaagttctaaatcttactacaaaataataaactggctggtttataatgtg

SEQ ID NO: 942 - DNA, 4826 bp, Homo sapien
tctcactatagggctcgagcggccgcccgggcaggtctgaccacagtggttccggggagaagccttccaggacccatgtgtaggcacaactgttttccctgatcaggatacttccggcactcaacagaggaaagaaattcctaagggaacactgctcagaaagtactgcagcatgtcttcaaatgcctgaggatcaagttggaaaactagaagcaacagaaaacacaataagcgcaatggcggcggccgcggcggagcagcaacagttctacctgctgctgggaaacctgctcagccccgacaatgtggtccggaaacaggcagaggaaacctatgagaatatcccaggccagtcaaagatcacattcctcttacaagccatcagaaatacaacagctgctgaagaggctagacaaatggccgccgttctcctaagacgtctcttgtcctctgcatttgatgaagtctatccagcacttccctctgatgttcagactgccatcaagagtgagctactcatgattattcagatggaaacacaatctagcatgaggaaaaaagtttgtgatattgcggcagaactggccaggaatttaatagatgaggatggcaataaccagtggcccgaaggtttgaagttcctttttgattcagtcagctctcaaaatgtgggactgcgggaagctgcccttcacattttctggaactttcctggaatttttgggaaccagcaacaacactatttagatgtcatcaaacgaatgttagttcagtgtatgcaagatcaggaacacccgtcgatcaggacgttatctgctagagctacagctgcatttatacttgcaaatgagcataatgttgctctgttcaaacattttgcagacttgctaccgggattcctacaggcggtaaatgactcgtgctaccagaatgatgattctgtcctaaaatccctcgttgagattgcagatactgttccaaagtatttgcgtcctcacttggaagcaactctacagctaagtctaaagttgtgtggagacactagcctcaacaatatgcaacgccagcttgcccttgaagtgatcgtcaccctctctgagactgcagctgctatgttaagaaaacataccaatattgttgcacagactattcctcagatgttagcaatgatggttgatttggaagaagatgaggactgggcaaatgcagatgaactagaagatgatgattttgacagcaatgcagttgcaggcgagagtgctctagatcgaatggcttgcggacttggtggaaagctcgttctgccgatgatcaaggaacacattatgcaaatgcttcaaaatcctgactggaaataccggcatgcaggattgatggccttatctgccattggtgaagggtgccaccagcaaatggaaggaattctaaatgagatcgtaaattttgttttactttttctccaggatcctcatccaagagtaaggtatgcagcctgtaatgccgtgggacagatggctacagattttgcacctggtttccaaaagaaatttcatgagaaggtgattgcagctctgctgcagaccatggaagaccaaggcaatcaacgtgtgcaggcccatgcagctgctgccctcattaactttactgaagactgtcccaagtcactacttattccatacttggataatttggtgaaacatctgcattccattatggtactgaagcttcaagagctgattcagaaaggcaccaagttagttttggaacaagttgtgacatccattgcatcagttgccgatactgcagaagaaaaatttgtcccctactatgatttatttatgccatcactgaagcacatcgttgagaatgcggttcaaaaagaactgagacttctgagaggaaaaactattgaatgcattagcctcattggtctggctgttgggaaggaaaaattcatgcaggatgcatcagatgtgatgcagcttttgttaaagacccagacagacttcaatgatatggaagatgatgatcctcagatctcttacatgatctcagcatgggccagaatgtgcaaaatccttggaaaagaatttcagcaataccttccagtggttatggggcctttaatgaagacggcttcaattaagcccgaagtagcccttttagatacccaagacatggagaatatgagtgatgatgatggttgggaatttgtgaaccttggagatcagcaaagctttggtattaaaactgcaggactagaagaaaaatcaactgcttgccagatgttggtttgctatgctaaggagttaaaggaaggctttgtggagtacaccgaacaggttgtcaaactgatggtccctttactgaaattttatttccacgatggtgttcgagtggcagcagcggaatccatgcctcttctcctggagtgtgcaagagtccgtggtcctgagtatctcacacagatgtggcattttatgtgtgatgctctaattaaggccattggtacagaaccagattcagacgtcctctcagaaataatgcattcttttgcaaagtgcattgaagtaatgggagatggatgccttaataatgaacactttgaagaactgggaggtatattgaaagcaaagcttgaagaacattttaaaaatcaagaattacgacaagttaaaagacaagatgaagactatgatgaacaggtcgaagagtcactacaagatgaggatgataatgatgtttatattctgaccaaagtgtcagatattttacactcaatattcagtagctacaaagaaaaggtgttaccatggtttgaacagctgcttccattaattgtcaacctcatttgtccacatagaccatggccagacagacaatggggattatgcatctttgatgatgtcatagaacactgtagtccagcctcatttaaatacgcagaatatttcttaagaccaatgctccaatatgtatgtgacaacagcccagaagtcaggcaagcagctgcatatggcctgggagtcatggcacagtacggtggagataattatcgccctttttgtacagaagcacttcccctgctggtaagagttattcagtctgcggattctaagaccaaagaaaatgtcaatgctacagagaactgcatctcagcagtagggaaaatcatgaagttcaagcctgactgtgtaaacgttgaagaggtccttccacactggttgtcttggcttccactacatgaagataaagaagaagctgttcagactttcaattatctgtgtgacctgattgaaagtaatcatccaattgttcttggcccaaacaataccaatctgcccaaaatatttagtataattgcggaaggagaaatgcacgaggcaattaaacatgaagatccttgtgccaaacgtctggccaatgtcgttcgccaagtacagacttctggaggactgtggactgagtgcatagcacagctcagtcctgagcagcaggccgccattcaggagctcctgaactctgcgtgaagggccttaatgtcacccaccagaaaactaactccaaataaacgcttaccctttcctttaggtttctttgttttgtttttgagcaaaagagatcggtagtgttgtgtgtaggccattcttctggagagccacaagcaggaagagcagcgctgtgttgcagaatggagtttccatggatttctaccagaccactgaaggagttcctggaagccctgcgtacgtagcactgaagactatttttctattggtataacccgcccacctgaaggggaaagggaaatcaaattaatttttctcgttagacataaggaaatttaaggaaaaacagctttaagaacagttactcagcgtagatgtgtgttcacacaaattgccttgcattcagtgttcattgtgaattgggagtgtgagtctttctgtagggtacaaagaagcctcctacccagcaaaccagtagacccaaaagttgaaaaaaactggatgacagacaacaagcatgaagatggcatatttgatgtcactttggttctttttcccagaaggcttatacagtgactcagtcgggaagctttccagcttcagcccttgaatgtgaagtgtcattggcatgtctggcagtagtctctcattcactcccaataaacaacattgaatacaaaagaggcttgtgtaaaaactcagtactgtctggcttggattcatttcatgttttttaatataagaatgatctaatatttttttaaagtaatagctatcagtaatagctgagtgttttttcccctaatattttccttgtgcaattcagacttaagcatcgagtttttaccatcttccactttaagctaagttatgatacctattccattcacaattggtgttctttttaaggtttgcaaatttcagccaattttgtagctaagattgttctgatcagctcaaaaagatttggcttagtgttttcattgcaaattataattgctgtagagccacacacaacttttgaacttttaattataagtgttatggctaaagttatttactgaaaatttcagtaaaatgtgtgaatgtttctttatgtattaacctcatagcagtaaatgacttgctgttgtttaatttttctaaggcatcttaatagacttctcttggaaaaacctttccaaggtgttaacatttttatagtttgtactaaatttaaccgtgatataaaaatgaattttatgcatagatcagaattttaaattaaaggttttttctttaaaaaaaaaaaaaaaaaaaaaaaaaaaaaaaaaaaaa

SEQ ID NO: 943 - protein, 1097 aa, Homo sapien
MAAAAAEQQQFYLLLGNLLSPDNVVRKQAEETYENIPGQSKITFLLQAIRNTTAAEEARQMAAVLLRRLLSSAFDEVYPALPSDVQTAIKSELLMIIQMETQSSMRKKVCDIAAELARNLIDEDGNNQWPEGLKFLFDSVSSQNVGLREAALHIFWNFPGIFGNQQQHYLDVIKRMLVQCMQDQEHPSIRTLSARATAAFILANEHNVALFKHFADLLPGFLQAVNDSCYQNDDSVLKSLVEIADTVPKYLRPHLEATLQLSLKLCGDTSLNNMQRQLALEVIVTLSETAAAMLRKHTNIVAQTIPQMLAMMVDLEEDEDWANADELEDDDFDSNAVAGESALDRMACGLGGKLVLPMIKEHIMQMLQNPDWKYRHAGLMALSAIGEGCHQQMEGILNEIVNFVLLFLQDPHPRVRYAACNAVGQMATDFAPGFQKKFHEKVIAALLQTMEDQGNQRVQAHAAAALINFTEDCPKSLLIPYLDNLVKHLHSIMVLKLQELIQKGTKLVLEQVVTSIASVADTAEEKFVPYYDLFMPSLKHIVENAVQKELRLLRGKTIECISLIGLAVGKEKFMQDASDVMQLLLKTQTDFNDMEDDDPQISYMISAWARMCKILGKEFQQYLPVVMGPLMKTASIKPEVALLDTQDMENMSDDDGWEFVNLGDQQSFGIKTAGLEEKSTACQMLVCYAKELKEGFVEYTEQVVKLMVPLLKFYFHDGVRVAAAESMPLLLECARVRGPEYLTQMWHFMCDALIKAIGTEPDSDVLSEIMHSFAKCIEVMGDGCLNNEHFEELGGILKAKLEEHFKNQELRQVKRQDEDYDEQVEESLQDEDDNDVYILTKVSDILHSIFSSYKEKVLPWFEQLLPLIVNLICPHRPWPDRQWGLCIFDDVIEHCSPASFKYAEYFLRPMLQYVCDNSPEVRQAAAYGLGVMAQYGGDNYRPFCTEALPLLVRVIQSADSKTKENVNATENCISAVGKIMKFKPDCVNVEEVLPHWLSWLPLHEDKEEAVQTFNYLCDLIESNHPIVLGPNNTNLPKIFSIIAEGEMHEAIKHEDPCAKRLANVVRQVQTSGGLWTECIAQLSPEQQAAIQELLNSA

SEQ ID NO: 944 - DNA, 2259 bp, Homo sapien
cagttgcttcagcgtcccggtgtggctgtgccgttggtcctgtgcggtcacttagccaagatgcctgaggaaacccagacccaagaccaaccgatggaggaggaggaggttgagacgttcgcctttcaggcagaaattgcccagttgatgtcattgatcatcaatactttctactcgaacaaagagatctttctgagagagctcatttcaaattcatcagatgcattggacaaaatccggtatgaaagcttgacagatcccagtaaattagactctgggaaagagctgcatattaaccttataccgaacaaacaagatcgaactctcactattgtggatactggaattggaatgaccaaggctgacttgatcaataaccttggtactatcgccaagtctgggaccaaagcgttcatggaagctttgcaggctggtgcagatatctctatgattggccagttcggtgttggtttttattctgcttatttggttgctgagaaagtaactgtgatcaccaaacataacgatgatgagcagtacgcttgggagtcctcagcagggggatcattcacagtgaggacagacacaggtgaacctatgggtcgtggaacaaaagttatcctacacctgaaagaagaccaaactgagtacttggaggaacgaagaataaaggagattgtgaagaaacattctcagtttattggatatcccattactctttttgtggagaaggaacgtgataaagaagtaagcgatgatgaggctgaagaaaaggaagacaaagaagaagaaaaagaaaaagaagagaaagagtcggaagacaaacctgaaattgaagatgttggttctgatgaggaagaagaaaagaaggatggtgacaagaagaagaagaagaagattaaggaaaagtacatcgatcaagaagagctcaacaaaacaaagcccatctggaccagaaatcccgacgatattactaatgaggagtacggagaattctataagagcttgaccaatgactgggaagatcacttggcagtgaagcatttttcagttgaaggacagttggaattcagagcccttctatttgtcccacgacgtgctccttttgatctgtttgaaaacagaaagaaaaagaacaacatcaaattgtatgtacgcagagttttcatcatggataactgtgaggagctaatccctgaatatctgaacttcattagaggggtggtagactcggaggatctccctctaaacatatcccgtgagatgttgcaacaaagcaaaattttgaaagttatcaggaagaatttggtcaaaaaatgcttagaactctttactgaactggcggaagataaagagaactacaagaaattctatgagcagttctctaaaaacataaagcttggaatacacgaagactctcaaaatcggaagaagctttcagagctgttaaggtactacacatctgcctctggtgatgagatggtttctctcaaggactactgcaccagaatgaaggagaaccagaaacatatctattatatcacaggtgagaccaaggaccaggtagctaactcagcctttgtggaacgtcttcggaaacatggcttagaagtgatctatatgattgagcccattgatgagtactgtgtccaacagctgaaggaatttgaggggaagactttagtgtcagtcaccaaagaaggcctggaacttccagaggatgaagaagagaaaaagaagcaggaagagaaaaaaacaaagtttgagaacctctgcaaaatcatgaaagacatattggagaaaaaagttgaaaaggtggttgtgtcaaaccgattggtgacatctccatgctgtattgtcacaagcacatatggctggacagcaaacatggagagaatcatgaaagctcaagccctaagagacaactcaacaatgggttacatggcagcaaagaaacacctggagataaaccctgaccattccattattgagaccttaaggcaaaaggcagaggctgataagaacgacaagtctgtgaaggatctggtcatcttgctttatgaaactgcgctcctgtcttctggcttcagtctggaagatccccagacacatgctaacaggatctacaggatgatcaaacttggtctgggtattgatgaagatgaccctactgctgatgataccagtgctgctgtaactgaagaaatgccaccccttgaaggagatgacgacacatcacgcatggaagaagtagactaa

SEQ ID NO: 945 - protein, 732 aa, Homo sapien
MPEETQTQDQPMEEEEVETFAFQAEIAQLMSLIINTFYSNKEIFLRELISNSSDALDKIRYESLTDPSKLDSGKELHINLIPNKQDRTLTIVDTGIGMTKADLINNLGTIAKSGTKAFMEALQAGADISMIGQFGVGFYSAYLVAEKVTVITKHNDDEQYAWESSAGGSFTVRTDTGEPMGRGTKVILHLKEDQTEYLEERRIKEIVKKHSQFIGYPITLFVEKERDKEVSDDEAEEKEDKEEEKEKEEKESEDKPEIEDVGSDEEEEKKDGDKKKKKKIKEKYIDQEELNKTKPIWTRNPDDITNEEYGEFYKSLTNDWEDHLAVKHFSVEGQLEFRALLFVPRRAPFDLFENRKKKNNIKLYVRRVFIMDNCEELIPEYLNFIRGVVDSEDLPLNISREMLQQSKILKVIRKNLVKKCLELFTELAEDKENYKKFYEQFSKNIKLGIHEDSQNRKKLSELLRYYTSASGDEMVSLKDYCTRMKENQKHIYYITGETKDQVANSAFVERLRKHGLEVIYMIEPIDEYCVQQLKEFEGKTLVSVTKEGLELPEDEEEKKKQEEKKTKFENLCKIMKDILEKKVEKVVVSNRLVTSPCCIVTSTYGWTANMERIMKAQALRDNSTMGYMAAKKHLEINPDHSIIETLRQKAEADKNDKSVKDLVILLYETALLSSGFSLEDPQTHANRIYRMIKLGLGIDEDDPTADDTSAAVTEEMPPLEGDDDTSRMEEVD

SEQ ID NO: 946 - DNA, 1580 bp, Homo sapien
atcccctccggttttcctcagtctccacgtacgtccctcaaagcgcgtcctaaaacccggataaccggagcgctccccatggaccacacggagggcttgcccgcggaggagccgcctgcgcatgctccatcgcctgggaaatttggtgagcggcctccacctaaacgacttactagggaagctatgcgaaattatttaaaagagcgaggggatcaaacagtacttattcttcatgcaaaagttgcacagaagtcatatggaaatgaaaaaaggtttttttgcccacctccttgtgtatatcttatgggcagcggatggaagaaaaaaaaagaacaaatggaacgcgatggttgttctgaacaagagtctcaaccgtgtgcatttattgggataggaaatagtgaccaagaaatgcagcagctaaacttggaaggaaagaactattgcacagccaaaacattgtatatatctgactcagacaagcgaaagcacttcattttttctgtaaagatgttctatggcaacagtgatgacattggtgtgttcctcagcaagcggataaaagtcatctccaaaccttccaaaaagaagcagtcattgaaaaatgctgacttatgcattgcctcaggaacaaaggtggctctgtttaatcgactacgatcccagacagttagtaccagatacttgcatgtagaaggaggtaattttcatgccagttcacagcagtggggagccttttttattcatctcttggatgatgatgaatcagaaggagaagaattcacagtccgagatgtctacatccattatggacaaacatgcaaacttgtgtgctcagttactggcatggcactcccaagattgataattatgaaagttgataagcataccgcattattggatgcagatgatcctgtgtcacaactccataaatgtgcattttaccttaaggatacagaaagaatgtatttgtgcctttctcaagaaagaataattcaatttcaggccactccatgtccaaaagaaccaaataaagagatgataaatgatggcgcttcctggacaatcattagcacagataaggcagagtatacattttatgagggaatgggccctgtccttgccccagtcactcctgtgcctgtggtagagagccttcagttgaatggcggtggggacgtagcaatgcttgaacttacaggacagaatttcactccaaatttacgagtgtggtttggggatgtagaagctgaaactatgtacaggtgtggagagagtatgctctgtgtcgtcccagacatttctgcattccgagaaggttggagatgggtccggcaaccagtccaggttccagtaactttggtccgaaatgatggaatcatttattccaccagccttacctttacctacacaccagaaccagggccacggccacattgcagtgtagcaggagcaatccttccagccaattcaagccaggtgccccctaacgaatcaaacacaaacagcgagggaagttacacaaacgccagcacaaattcaaccagtgtcacatcatctacagccacagtggtatccta

SEQ ID NO: 947 - protein, 500 aa, Homo sapien
MDHTEGLPAEEPPAHAPSPGKFGERPPPKRLTREAMRNYLKERGDQTVLILHAKVAQKSYGNEKRFFCPPPCVYLMGSGWKKKKEQMERDGCSEQESQPCAFIGIGNSDQEMQQLNLEGKNYCTAKTLYISDSDKRKHFIFSVKMFYGNSDDIGVFLSKRIKVISKPSKKKQSLKNADLCIASGTKVALFNRLRSQTVSTRYLHVEGGNFHASSQQWGAFFIHLLDDDESEGEEFTVRDVYIHYGQTCKLVCSVTGMALPRLIIMKVDKHTALLDADDPVSQLHKCAFYLKDTERMYLCLSQERIIQFQATPCPKEPNKEMINDGASWTIISTDKAEYTFYEGMGPVLAPVTPVPVVESLQLNGGGDVAMLELTGQNFTPNLRVWFGDVEAETMYRCGESMLCVVPDISAFREGWRWVRQPVQVPVTLVRNDGIIYSTSLTFTYTPEPGPRPHCSVAGAILPANSSQVPPNESNTNSEGSYTNASTNSTSVTSSTATVVS

SEQ ID NO: 948 - DNA, 7709 bp, Homo sapien
cgaaggacctgaaggaaagtggaaaagtccaaagtttaagatgccagagatgcattttaagactccaaagatatccatgccagatattgacctgaatctcacaggtccaaaaataaaaggagatgtggatgttacaggccctaaggtagagggagatctgaaaggtcctgaagttgacctcaaaggccccaaagtggacattgatgtcccagatgttaatgttcagggtccagactggcacctgaagatgcccaagatgaaaatgcctaagttcagtatgcctggcttcaaaggagagggcccagatggtggatgtgaagctgcccataggctgacattgatgtctcaggaccaaagtggacattgaaggccctgatgttaacattgaaggaccagagggaaagttgaaagggcctaagttcaagatgccagagatgaatatcaaagcccccaagatctccatgcctgatattgacttaaacctgaaaggacccaagtgaagggtgatgtggatgtttcccttcctaaagtggaaggtgacctcaagggcccagaagttgacatcaagggcccaaaagtggacattgacgcacctgatgttgatgttcatggcccagactggcacctaaagatgcccaagatgaaaatgcccaagttcagcatgcctggcttcaaagcagagggccctgaagctggaatgtgaacctgcccaaggctgacgttgatgtctcaggccccaaagtggatattaatgccccagatgtgggtgttcaaggcccagactggcacctgaagatgcccaaggtgaaaatgccaaagttcagcatgcctggcttcaaaggagagggcccagatggggatgtgaagctgcccaaggctgacattgatgtctcaggacccaaagtggacattgaaggccctgatgttaacattgaaggaccagagggaaagttgaaagggcctaagttcaagatgccagagatgaatatcaaagcccccaagatctccatgcctgatattgacttaaacctgaaaggacccaaagtgaagggtgatgtggatgtttcccttcctaaagtggaaggtgacctcaagggcccagaagttgacatcaagggcccaaaagtggacattgacgcacctgatgttgatgttcatggcccagactggcacctaaagatgcccaagataaaaatgcccaagatcagcatgcctggcttcaaaggagaaggtccagatgtggacgtgaacctgcccaaggctgacattgatgtctcaggaccgaaagtggatgttgaatgtcccgatgtgaatatcgaaggacctgaaggaaagtggaaaagtccaaagtttaagatgccagagatgcattttaagactccaaagatatccatgccagatattgacctgaatctcacaggtccaaaaataaaaggagatgtggatgttacaggccctaaggtagagggagatctgaaaggtcctgaagttgacctcaaaggccccaaagtggacattgatgtcccagatgttaatgttcagggtccagactggcacctgaagatgcccaagatgaaaatgcccaagttcagcatgcctggcttcaaagcagagggccctgaagtggatgtgaacctgcccaaggctgacgttgatgtctcaggccccaaagtggacgttgaaggccctgatgttaacattgaaggaccagagggaaagttgaaagggcccaagttcaagatgccagagatgaatatcaaagcccccaagatccccatgcctgactttgatttgcatctgaaaggtcccaaggtgaagggcgatgtggatatttctctgcccaaagtggaaggtgacctcaagggccctgaagttgacatcaggggtcccaaagtggacattgatgtcccggatgtgggcgttcaaggcccagactggcacctaaaaatgcccaaagtgaaaatgcccaaattcagcatgcctggcttcaaaggagagggcccagatgtggatgtgaacctgcccaaggctgaccttgatgtctcaggacccaaggtggacattgatgttccagatgtgaatatcgaaggcccagagggaaagttgaaaggtcccaaattcaaaatgcctgagatgaacatcaaagcccccaagatctccatgcctgacattgatcttaacctgaaaggtcccaaagtgaagggtgacatggatgtgtctctgccaaaagtggaaggtgacatgaaagttcctgacgtggatattaaaggccccaaagtggatattaatgccccagatgtggatgttcaaggcccagactggcacctgaagatgcctaaaataaaaatgcccaagatcagcatgcctggcttcaaaggagaaggtccagaagtggacgtgaacctgcccaaggctgaccttgacgtctcaggacccaaggtggacgttgatgttccagatgtgaatattgaaggtccagatgcgaaactgaagggccctaaattcaagatgccagagatgaacatcaaagcccccaagatctccatgcctgactttgatttgcatctgaaaggccctaaggtgaaaggagatgtggatgtttctctgcctaagatggaaggtgatctaaagggtcctgaagttgacatcaagggccccaaagtggacattaatgctccagatgtggatgttcaaggcccagactggcacctgaagatgcccaaggtgaaaatgcccaagttcagcatgcctggcttcaaaggagagggcccagatgtggatgtgaacctgcccaaggctgaccttgatgtctcaggacccaaggtggacattgatgttcctgatgtggatatccgaaggtccagaagggaaactgaaaggtcccaaattcaagatgcctgagatgagcatccaagcccccaagatctccatgcctgatattgacttaaacctgaaaggacccaaagtgaagggcgatgtggatgttacccttcctaaagtggaaggtgacctcaagggcccagaagctgacatcaagggcccaaaagtggacatcaacacccctgatgtggatgttcatggcccagactggcacctgaagatgcccaaggtgaaaatgcccaaattcagcatgcctggcttcaaaggagaaggtccagatgtggatgtgaacctgcccaaggctgacattgatgtctcaggacccaaagtggacgttgatgttcctgatgtgaatatcgaaggtccagatgcgaaactaaagggccccaagttcaagatgcctgagatgagcatcaaagcccccaagatctccatgcctgatattgacttaaacctgaaaggacccaaagtgaagggcgatgtggatgttacccttcctaaagtggaaggtgacctcaagggcccagaagctgacatcaagggcccaaaagtggacatcaacacccctgatgtggatgttcatggcccagactggcacctgaagatgcccaaggtgaaaatgcccaaattcagcatgcctggcttcaaaggagaaggtccagatgtggatgtgagcctgcccaaggccgacatcgatgtctcgggacccaaggtggacgttgatattccagatgtgaatatcgaaggtccagacgcaaaactgaagggccccaagttcaagatgcctgaaataaatatcaaagctcccaagatctccatacctgatgttgacctggatttgaaaggacccaaagtaaaaggagattttgatgtgtctgtccctaaggttgaagggactttgaaaggcccagaagtagatcttaaaggtccacgtctggatttcgaaggccctgatgccaaactcagtggcccatctttgaagatgccatcgctggagatatctgctcctaaagtaactgctcctgatgttgatttgcatctcaaggcaccaaaaattggattttcaggtccgaagttagaaggtggtgaagtggacctcaagggacccaaagttgaagctccaagcttagatgtacacatggacagcccagatattaacatcgaagggccagatgttaaaatccccaaatttaagaaacccaagtttggatttggggcaaaaagccccaaagctgacatcaagtcaccttcactggatgtcactgttcctgaggcagagctgaaccttgagactcctgaaattagtgttggtggcaagggcaagaaaagtaagtttaaaatgcctaaaattcatatgagtggtcctaagattaaggccaaaaaaacagggatttgacctgaatgttcctgggggtgaaattgatgccagcctcaaggctccggatgtagatgtcaacatcgcagggccggatgctgcactcaaagtcgacgtgaaatcgcccaaaaccaagaaaacgatgtttggaaaaatgtacttcccagatgtagagtttgacattaaatcacctaaatttaaagctgaggcccctctccctagccccaaactggagggtgaactccaggcacctgatctggaactttctttgccagcgattcacgtcgaaggtcttgacatcaaggcgaaggctcccaaggtcaagatgccagatgtggacatctcagtgccaaaaatagagggtgacctgaaaggccccaaagtgcaggcaaacttgggtgcacctgacatcaacatcgaaggcctagatgctaaagtcaaaacaccgtccttcggcatttctgcccctcaagtctccatccctgatgtgaatgtaaacttgaaaggaccaaagataaagggtgatgtccccagcgtgggactggaaggaccagatgtagatctgcaaggtccagaagcaaaaattaagttccccaagttttccatgcccaagatcggcatcccaggtgtgaaaatggagggtgggggagccgaggtccatgcccagctaccctctcttgaaggagacttgagaggaccagatgttaagctcgaagggcccgatgtttctctaaaggggccaggagtagacttgccttcagtgaacctctctatgccaaaagtctctgggcctgaccttgatctgaacttgaaaggaccaagtttgaagggagacctggatgcatctgttcccagcatgaaggtgcatgctccagggctcaacctcagtggtgtcggtggcaaaatgcaggtgggaggagacggtgtgaaagtgccagggatcgatgccacaacaaagcttaacgttggggcaccagatgtgacactgaggggaccaagcctgcagggagatctggctgtctctggtgacatcaaatgccctaaagtatccgtaggagctcctgatctaagcttggaggcatccgaaggcagcattaaacttcccaaaatgaagctgccccaatttggcatctctactccggggtccgacttgcacgtcaatgccaaggggccacaggtttctggcgaactgaaggggccaggtgtggatgtgaacctgaaagggcctcggatttcagcaccgaatgtggactttaacttggaaggaccaaaagtgaaagggagccttggggccactggtgagatcaaaggccccactgtcggaggaggtcttccaggcattggtgttcaaggcctagaaggaaacctccagatgcctggaattaagtcctctggatgtgatgtgaacctgccaggcgtgaatgtgaaactcccaactgggcagatttctgggcctgaaatcaaaggtggtctgaaaggttcagaagtaggtttccatggggctgctcctgatatcagtgtgaaggggcctgcctttaatatggcatctcctgagtcagattttggcatcaacttgaagggcccaaaaatcaaaggaggtgcggatgtttcagggggtgtcagtgccccagacatcagccttggtgaagggcatttgagtgttaaaggttccgggggtgagtggaagggaccccaagtctcctctgctctcaacttggacacatctaagtttgctgggggccttcatttctcaggaccaaaggtggaaggaggtgtgaaaggaggtcagattggactccaggctcctgggctgagtgtgtctgggcctcaaggtcacttggaaagtggatctggaaaagtaacattccctaaaatgaagatccccaaatttaccttctctggccgtgagctggttggcagagaaatgggggtggatgttcacttccctaaagcagaggccagcatccaagctggtgctggagacggcgagtgggaagagtctgaagtcaaactgaaaaagtccaagatcaaaatgcccaagtttaatttttccaaacctaaagggaaaggtggtgtcactggctcaccagaagcatcaatttctgggtccaaaggtgacctgaaaagttcaaaggccagcctgggctctctggaaggagaggcagaggccgaagcctcttcaccgaaaggcaaattctccttatttaaaagtaagaagccacggcaccgctcaaattcattcagtgatgaaagagagttctctggaccttccaccccgacggggacgctggagtttgaaggtggggaagtgtctctggaaggtgggaaagttaaagggaaacacgggaagctgaaattcggtacctttggtggattggggtcaaagagcaaaggtcattatgaggtgactgggagcgatgatgagacaggcaagttacaggggagtggggtgtccctggcctctaagaagtcccgactgtcctcctcttctagcaatgacagtgggaataaggttggcatccagcttcccgaggtggagctgtcagtttccacaaagaaagagtagcaggcctttgtatgtgtgtacatatatatatatataacaaaacatcagccttgggtggtgtgttcctatataaactccaaagggaaacacaccgactgcctcagcaatcatgcaaagaccttgcctggcccggtggcaagcgctgaaaaaccgaccgcctgtaggctcctggaactatacagataggtaaagagttccaagttcgtccagcccatgtgcaaagtcaacagtatttgccttaagatttcatatatatatatttttttgcattgactgctgagagctcctgtttactaagcaagcttttgtgtttattatcctcatttttactgaacattgttagttttggggtaatggaaacccactttttcattgtaatgactttgggggcttttgttagtaagggtgggtggggtgatgggttgcagacggaggtcaggtcttcctctttcctgagactggatctgttcaaacagcaaacgcccacagatggcccagaggtggtggtagtcagggtgtgtgggtgtttttagggttctttagtgttgtttctttcacccaggggtggtggtcccagccagtttggtgctgacggtgagaggaaattagaatctgtttgcaaattgtccaacccaccccctcaacatgaggggcttccattttctgtgttttgtaagggaactgtttccttcatgccgccatgttcctgatattagttctgatttctttttaacaaatgttatcatgattaagaaaatttccagcactttaatggccaattaactgagaatgtaagaaaattgatgctgtacaaggcaaataaagctgtttattaacctccgaaaaaaaatctatgtcgggtgcggagaaagaggtaatgaaatggca

SEQ ID NO: 949 - protein, 2007 aa, Homo sapien
MPKVKMPKFSMPGFKGEGPDGDVKLPKADIDVSGPKVDIEGPDVNIEGPEGKLKGPKFKMPEMNIKAPKISMPDIDLNLKGPKVKGDVDVSLPKVEGDLKGPEVDIKGPKVDIDAPDVDVHGPDWHLKMPKIKMPKISMPGFKGEGPDVDVNLPKADIDVSGPKVDVECPDVNIEGPEGKWKSPKFKMPEMHFKTPKISMPDIDLNLTGPKIKGDVDVTGPKVEGDLKGPEVDLKGPKVDIDVPDVNVQGPDWHLKMPKMKMPKFSMPGFKAEGPEVDVNLPKADVDVSGPKVDVEGPDVNIEGPEGKLKGPKFKMPEMNIKAPKIPMPDFDLHLKGPKVKGDVDISLPKVEGDLKGPEVDIRGPKVDIDVPDVGVQGPDWHLKMPKVKMPKFSMPGFKGEGPDVDVNLPKADLDVSGPKVDIDVPDVNIEGPEGKLKGPKFKMPEMNIKAPKISMPDIDLNLKGPKVKGDMDVSLPKVEGDMKVPDVDIKGPKVDINAPDVDVQGPDWHLKMPKIKMPKISMPGFKGEGPEVDVNLPKADLDVSGPKVDVDVPDVNIEGPDAKLKGPKFKMPEMNIKAPKISMPDFDLHLKGPKVKGDVDVSLPKMEGDLKGPEVDIKGPKVDINAPDVDVQGPDWHLKMPKVKMPKFSMPGFKGEGPDVDVNLPKADLDVSGPKVDIDVPDVDIRRSRRETERSQIQDAEMSIQAPKISMPDIDLNLKGPKVKGDVDVTLPKVEGDLKGPEADIKGPKVDINTPDVDVHGPDWHLKMPKVKMPKFSMPGFKGEGPDVDVNLPKADIDVSGPKVDVDVPDVNIEGPDAKLKGPKFKMPEMSIKAPKISMPDIDLNLKGPKVKGDVDVTLPKVEGDLKGPEADIKGPKVDINTPDVDVHGPDWHLKMPKVKMPKFSMPGFKGEGPDVDVSLPKADIDVSGPKVDVDIPDVNIEGPDAKLKGPKFKMPEINIKAPKISIPDVDLDLKGPKVKGDFDVSVPKVEGTLKGPEVDLKGPRLDFEGPDAKLSGPSLKMPSLEISAPKVTAPDVDLHLKAPKIGFSGPKLEGGEVDLKGPKVEAPSLDVHMDSPDINIEGPDVKIPKFKKPKFGFGAKSPKADIKSPSLDVTVPEAELNLETPEISVGGKGKKSKFKMPKIHMSGPKIKAKKTGIDLNVPGGEIDASLKAPDVDVNIAGPDAALKVDVKSPKTKKTMFGKMYFPDVEFDIKSPKFKAEAPLPSPKLEGELQAPDLELSLPAIHVEGLDIKAKAPKVKMPDVDISVPKIEGDLKGPKVQANLGAPDINIEGLDAKVKTPSFGISAPQVSIPDVNVNLKGPKIKGDVPSVGLEGPDVDLQGPEAKIKFPKFSMPKIGIPGVKMEGGGAEVHAQLPSLEGDLRGPDVKLEGPDVSLKGPGVDLPSVNLSMPKVSGPDLDLNLKGPSLKGDLDASVPSMKVHAPGLNLSGVGGKMQVGGDGVKVPGIDATTKLNVGAPDVTLRGPSLQGDLAVSGDIKCPKVSVGAPDLSLEASEGSIKLPKMKLPQFGISTPGSDLHVNAKGPQVSGELKGPGVDVNLKGPRISAPNVDFNLEGPKVKGSLGATGEIKGPTVGGGLPGIGVQGLEGNLQMPGIKSSGCDVNLPGVNVKLPTGQISGPEIKGGLKGSEVGFHGAAPDISVKGPAFNMASPESDFGINLKGPKIKGGADVSGGVSAPDISLGEGHLSVKGSGGEWKGPQVSSALNLDTSKFAGGLHFSGPKVEGGVKGGQIGLQAPGLSVSGPQGHLESGSGKVTFPKMKIPKFTFSGRELVGREMGVDVHFPKAEASIQAGAGDGEWEESEVKLKKSKIKMPKFNFSKPKGKGGVTGSPEASISGSKGDLKSSKASLGSLEGEAEAEASSPKGKFSLFKSKKPRHRSNSFSDEREFSGPSTPTGTLEFEGGEVSLEGGKVKGKHGKLKFGTFGGLGSKSKGHYEVTGSDDETGKLQGSGVSLASKKSRLSSSSSNDSGNKVGIQLPEVELSVSTKKE

SEQ ID NO: 950 - DNA, 2113 bp, Homo sapien
gtgcggttgggaacgcggagcggacggattcgattcaacggggttccggaccgcgctgcgctatggagcaggtcaatgagctgaaggagaaaggcaacaaggccctgagcgtgggtaacatcgatgatgccttacagtgctactccgaagctattaagctggatccccacaaccacgtgctgtacagcaaccgttctgctgcctatgccaagaaaggagactaccagaaggcttatgaggatggctgcaagactgtcgacctaaagcctgactggggcaagggctattcacgaaaagcagcagctctagagttcttaaaccgctttgaagaagccaagcgaacctatgaggagggcttaaaacacgaggcaaataaccctcaactgaaagagggtttacagaatatggaggccaggttggcagagagaaaattcatgaaccctttcaacatgcctaatctgtatcagaagttggagagtgatcccaggacaaggacactactcagtgatcctacctaccgggagctgatagagcagctacgaaacaagccttctgacctgggcacgaaactacaagatccccggatcatgaccactctcagcgtcctccttggggtcgatctgggcagtatggatgaggaggaagagattgcaacacctccaccaccaccccctcccaaaaaggagaccaagccagagccaatggaagaagatcttccagagaataagaagcaggcactgaaagaaaaagagctggggaacgatgcctacaagaagaaagactttgacacagccttgaagcattacgacaaagccaaggagctggaccccactaacatgacttacattaccaatcaagcagcggtatactttgaaaagggcgactacaataagtgccgggagctttgtgagaaggccattgaagtggggagagaaaaccgagaagactatcgacagattgccaaagcatatgctcgaattggcaactcctacttcaaagaagaaaagtacaaggatgccatccatttctataacaagtctctggcagagcaccgaaccccagatgtgctcaagaaatgccagcaggcagagaaaatcctgaaggagcaagagcggctggcctacataaaccccgacctggctttggaggagaagaacaaaggcaacgagtgttttcagaaaggggactatccccaggccatgaagcattatacagaagccatcaaaaggaacccgaaagatgccaaattatacagcaatcgagctgcctgctacaccaaactcctggagttccagctggcactcaaggactgtgaggaatgtatccagctggagccgaccttcatcaagggttatacacggaaagccgctgcgctggaagcgatgaaggactacaccaaagccatggatgtgtaccagaaggcgctagacctggactccagctgtaaggaggcggcagacggctaccagcgctgtatgatggcgcagtacaaccggcacgacagccccgaagatgtgaagcgacgagccatggccgaccctgaggtgcagcagatcatgagtgacccagccatgcgccttatcctggaacagatgcagaaggacccccaggcactcagcgaacacttaaagaatcctgtaatagcacagaagatccagaagctgatggatgtgggtctgattgcaattcggtgatgacttgttcatccccccttcccttcgccctcatgtggaaagaggagctgggaccgcggcgagcagcacggagcggaagggagagcaggggagagaaggcctcatctctctatatttatacataaccccggggaagacacagagactcgtacctgcgctgtttgtgccgccgctgcctctgggccctcccagcacacgcatggtctcttcaccgctgccctcgagttccatgtctctttcccctgcccctagttgctgtctcggctgctctcccatagttggttttttttttatttggggcagtgggcatgttatggggaggggagggggttcttccagcctcaggtcccagctgtctcacgttgtttattctgcgtccccttctccaataaaacaagccagttgggcgtggttataac

SEQ ID NO: 951 - protein, 543 aa, Homo sapien
MEQVNELKEKGNKALSVGNIDDALQCYSEAIKLDPHNHVLYSNRSAAYAKKGDYQKAYEDGCKTVDLKPDWGKGYSRKAAALEFLNRFEEAKRTYEEGLKHEANNPQLKEGLQNMEARLAERKFMNPFNMPNLYQKLESDPRTRTLLSDPTYRELIEQLRNKPSDLGTKLQDPRIMTTLSVLLGVDLGSMDEEEEIATPPPPPPPKKETKPEPMEEDLPENKKQALKEKELGNDAYKKKDFDTALKHYDKAKELDPTNMTYITNQAAVYFEKGDYNKCRELCEKAIEVGRENREDYRQIAKAYARIGNSYFKEEKYKDAIHFYNKSLAEHRTPDVLKKCQQAEKILKEQERLAYINPDLALEEKNKGNECFQKGDYPQAMKHYTEAIKRNPKDAKLYSNRAACYTKLLEFQLALKDCEECIQLEPTFIKGYTRKAAALEAMKDYTKAMDVYQKALDLDSSCKEAADGYQRCMMAQYNRHDSPEDVKRRAMADPEVQQIMSDPAMRLILEQMQKDPQALSEHLKNPVIAQKIQKLMDVGLIAIR

SEQ ID NO: 952 - DNA, 1806 bp, Homo sapien
gccgctcgctcggctccgctccctggctcggctccctgcctccgcgtcgcagcccccgccgtagccgcctccgagcccgccgccacatcctctgagaagatggctgtgccacccacgtatgccgatcttggcaaatctgccagggatgtcttcaccaagggctatggatttggcttaataaagcttgatttgaaaacaaaatctgagaatggattggaatttacaagctcaggctcagccaacactgagaccaccaaagtgacgggcagtctggaaaccaagtacagatggactgagtacggcctgacgtttacagagaaatggaataccgacaatacactaggcaccgagattactgtggaagatcagcttgcacgtggactgaagctgaccttcgattcatccttctcacctaacactgggaaaaaaaatgctaaaatcaagacagggtacaagcgggagcacattaacctgggctgcgacatggatttcgacattgctgggccttccatccggggtgctctggtgctaggttacgagggctggctggccggctaccagatgaattttgagactgcaaaatcccgagtgacccagagcaactttgcagttggctacaagactgatgaattccagcttcacactaatgtgaatgacgggacagagtttggcggctccatttaccagaaagtgaacaagaagttggagaccgctgtcaatcttgcctggacagcaggaaacagtaacacgcgcttcggaatagcagccaagtatcagattgaccctgacgcctgcttctcggctaaagtgaacaactccagcctgataggtttaggatacactcagactctaaagccaggtattaaactgacactgtcagctcttctggatggcaagaacgtcaatgctggtggccacaagcttggtctaggactggaatttcaagcataaatgaatactgtacaattgtttaattttaaactattttgcagcatagctaccttcagaatttagtgtatcttttaatgttgtatgtctgggatgcaagtattgctaaatatgttagccctccaggttaaagttgattcagctttaagatgttacccttccagaggtacagaagaaacctatttccaaaaaaggtcctttcagtggtagactcggggagaacttggtggcccctttgagatgccaggtttcttttttatctagaaatggctgcaagtggaagcggataatatgtaggcactttgtaaattcatattgagtaaatgaatgaaattgtgatttcctgagaatcgaaccttggttccctaaccctaattgatgagaggctcgctgcttgatggtgtgtacaaactcacctgaatgggacttttttagacagatcttcatgacctgttcccaccccagttcatcatcatctcttttacaccaaaaggtctgcagggtgtggtaactgtttcttttgtgccattttggggtggagaaggtggatgtgatgaagccaataattcaggacttattccttcttgtgttgtgtttttttttggcccttgcaccagagtatgaaatagcttccaggagctccagctataagcttggaagtgtctgtgtgattgtaatcacatggtgacaacactcagaatctaaattggacttctgttgtattctcaccactcaatttgttttttagcagtttaatgggtacattttagagtcttccattttgttggaattagatcctccccttcaaatgctgtaattaacaacacttaaaaaacttgaataaaatattgaaacctc

SEQ ID NO: 953 - protein, 283 aa, Homo sapien
MAVPPTYADLGKSARDVFTKGYGFGLIKLDLKTKSENGLEFTSSGSANTETTKVTGSLETKYRWTEYGLTFTEKWNTDNTLGTEITVEDQLARGLKLTFDSSFSPNTGKKNAKIKTGYKREHINLGCDMDFDIAGPSIRGALVLGYEGWLAGYQMNFETAKSRVTQSNFAVGYKTDEFQLHTNVNDGTEFGGSIYQKVNKKLETAVNLAWTAGNSNTRFGIAAKYQIDPDACFSAKVNNSSLIGLGYTQTLKPGIKLTLSALLDGKNVNAGGHKLGLGLEFQA

SEQ ID NO: 954 - DNA, 4573 bp, Homo sapien
cgcgtgtctacgcggacgcaccggctaagctgcttctgccgccgccggccgcctgggaccttgcggtgaggctgcgcggggccgaggccgcctccgagcgccaggtttattcagtcaccatgaagctgctgctgctgcacccggccttccagagctgcctcctgctgaccctgcttggcttatggagaaccacccctgaggctcacgcttcatccctgggtgcaccagctatcagcgctgcctccttcctgcaggatctaatacatcggtatggcgagggtgacagcctcactctgcagcagctgaaggccctgctcaaccacctggatgtgggagtgggccggggtaatgtcacccagcacgtgcaaggacacaggaacctctccacgtgctttagttctggagacctcttcactgcccacaatttcagcgagcagtcgcggattgggagcagcgagctccaggagttctgccccaccatcctccagcagctggattcccgggcctgcacctcggagaaccaggaaaacgaggagaatgagcagacggaggaggggcggccaagcgctgttgaagtgtggggatacggtctcctctgtgtgaccgtcatctccctctgctccctcctgggggccagcgtggtgcccttcatgaagaagaccttttacaagaggctgctgctctacttcatagctctggcgattggaaccctctactccaacgccctcttccagctcatcccggaggcatttggtttcaaccctctggaagattattatgtctccaagtctgcagtggtgtttgggggcttttatcttttctttttcacagagaagatcttgaagattcttcttaagcagaaaaatgagcatcatcatggacacagccattatgcctctgagtcgcttccctccaagaaggaccaggaggagggggtgatggagaagctgcagaacggggacctggaccacatgattcctcagcactgcagcagtgagctggacggcaaggcgcccatggtggacgagaaggtcattgtgggctcgctctctgtgcaggacctgcaggcttcccagagtgcttgctactggctgaaaggtgtccgctactctgatatcggcactctggcctggatgatcactctgagcgacggcctccacaatttcatcgatggcctggccatcggtgcttccttcactgtgtcagttttccaaggcatcagcacctcggtggccatcctctgtgaggagttcccacatgagctaggagactttgtcatcctgctcaacgctgggatgagcatccaacaagctctcttcttcaacttcctttctgcctgctgctgctacctgggtctggcctttggcatcctggccggcagccacttctctgccaactggatttttgcgctagctggaggaatgttcttgtatatttctctggctgatatgttccctgagatgaatgaggtctgtcaagaggatgaaaggaagggcagcatcttgattccatttatcatccagaacctgggcctcctgactggattcaccatcatggtggtcctcaccatgtattcaggacagatccagattgggtagggctctgccaagagcctgtgggactggaagtcgggccctgggctgcccgatcgccagcccgaggacttaccatccacaatgcaccacggaagaggccgttctatgaaaaactgacacagactgtattcctgcattcaaatgtcagccgtttgtaaaatgctgtatcctaggaataagctgccctggtaaccagtctctagctagtgcctcttgccctctcctcacctccttttctctcagtgactctggaacctgaatgcagcttacaagacaagcctgacttttttctctgattaccttggcctcctcttggaaccagtgctgaaaggttttgaatcctttacccaacaatgcaaaaatagagccaatggttataacttggctagaaatatcaagagttgaatccatagtgtggggcccatgactctagctgggcaccttggacctccagctggccaatagaagagacaggagacaggaagccttcccattttttcaaagtctgtttaattgcctattacttctctcaaagagaacctgaagtcagaacacatgagcagggtgagaggtgaggcaaggttcatcctgaatgggagaggaagtcgaaccactgctgtgtgtcttgtcaggatgctcacttgttcctactgagatgctggatattgattttgtaacagcacctggtgtttcacggctgtccgagtgagctaacgtggcggtgtggctgcctggacctcctctttcaggttaacgctgacagaatggaggctcaggctgtctgcaagaaaacagttggtttggctgtgattttgacctcctcttccccactgccatcttctaagagactttgtagctgcctcctagaagcacattctgagcacatttgagacctctgtgttagaggggagactgcacaaactatcctcccccaggttgagacgtctgcagagtggcaagctgacttgtagaaatggggtgccatttatgctctacttagacaagggtaatcagaaatggaatcagtgcaggcaaaatttaggatttgccgcttccataaatcaaagcatgactaatagggggtctctgaaatgtaagggcacaaacttcacttagggcatcgcagatgtttgcagaatggttggcctaatgattatgctacagatgggttttaaatgacccgtctaggttactgcttccttgcaaaaaaagtcgaatcctgcattgaattgaatatgaatttctctaactctctccagaaaatggatggagataacttgtctttaaaactgtaggccagccttagccactgtggagcccttgcctccgagctctggcttcaaggggagctcttctccaggttcactaggtgaattgatttattattatcatattgataatgtgagattctttagccactttggggagcctgtctctccagaagcctttcttagtggtgcccacagttggagcccaggggccatgtttgcaaactgattcatgtgcatggctgacaggagtactggttcactaccaatgcctgagcttttctcttacatagaaaaactgtccactctcagtaatcacaagcagcatccgttttgttttctcttcttgggagacatctgtcaaaccaggaatattcttgaaaagaacgtgagcaggaaaaactgctggtgatactttttttaagttttgtttttatcttgcctgttggcttcaatacatttgagaatacgctgaagagggaaaatttcagtgatggagattctagattaaatatcaggactgatttcctggtgggattatggtccagttttaccaaagaaccaattccttgaatgttggaatctaactttttatattgtcattattattgttgtttttaaacggttctttgtcttttctgttttatttttctcaagctgctttcaggagctagcagaaaataactcaaagttgaagactctggaagattttgctttaacctaactcgcattgatgtattaaatttataattttagcattcccaatagatcctatcattccttaaacataataccctttgtcttggagtagaatactaagttagagttagtggatttctagtttaggagaggagctcaaaactataatctttaacaaattgaaaaatgaaatagggtgttttccctttttgtgcacacctatattaccttaagaaatttccttccatagacagctgcctcaaagggaaatcctctttaaaccgtagttggcgcagaggtcagtcctagtcggagcttaggaggggcggagacgctcacatcgtctgacttgagtcgccactgattgtggcaacagctttgcctcatgagtcaaaaattggcaatttcttttgatttttagttgttgaatttgctgtttcaagcatttgtacatattagaagtctaaggagtagcaagtcagtgggaggactttttcacccctggcattagcagcttcgacctcattttccagatgcaccagctcctattaataagttagcaaggaaagtgtatgtcacgtgcaggaacagtgaggcagggacaggggttctgctccttctcacttcaccaccggcacacagcttgcccctgtctttgcccccaaaggtattttgtgtctagtgtcaaattggagctattcttcactggtccttaaccttgggttttaaaaagaaggcttctctgtttgggtagcgtaagagctgagtatagtaagtcctcttccaaagagatggcaatatgctgggcatctactttaaaacaaagttgtctgatttttgcaagagaggttaggattttattgttcttatttccctttacagttctgcagttccatcacagtatttttttaaataactcaggtgtatgagcagaaattagaaaagaaaattaacttatgtggactgtaaatgttttatttgtaagattctataaataaagctatattctgt

SEQ ID NO: 955 - protein, 531 aa, Homo sapien
RVYADAPAKLLLPPPAAWDLAVRLRGAEAASERQVYSVTMKLLLLHPAFQSCLLLTLLGLWRTTPEAHASSLGAPAISAASFLQDLIHRYGEGDSLTLQQLKALLNHLDVGVGRGNVTQHVQGHRNLSTCFSSGDLFTAHNFSEQSRIGSSELQEFCPTILQQLDSRACTSENQENEENEQTEEGRPSAVEVWGYGLLCVTVISLCSLLGASVVPFMKKTFYKRLLLYFIALAIGTLYSNALFQLIPEAFGFNPLEDYYVSKSAVVFGGFYLFFFTEKILKILLKQKNEHHHGHSHYASESLPSKKDQEEGVMEKLQNGDLDHMIPQHCSSELDGKAPMVDEKVIVGSLSVQDLQASQSACYWLKGVRYSDIGTLAWMITLSDGLHNFIDGLAIGASFTVSVFQGISTSVAILCEEFPHELGDFVILLNAGMSIQQALFFNFLSACCCYLGLAFGILAGSHFSANWIFALAGGMFLYISLADMFPEMNEVCQEDERKGSILIPFIIQNLGLLTGFTIMVVLTMYSGQIQIG

SEQ ID NO: 956 - DNA, 3767 bp, Homo sapien
gctaagaggagtccctgtgtgggcagctggagccttcagattctcttcaggggaagagtccacatcccacctcatcatgtcccgaagaagccagcgcctcacgcgctactcccagggtgacgatgacggcagcagcagcagcggagggagctcggtggctgggagtcagagcaccctgtttaaagacagtcctctcaggaccttgaagaggaaatccagcaacatgaagcgcctgtccccagcgccacagctgggcccgtcctctgatgcacacacctcctactacagtgagtcgctggtccacgagtcctggttcccacccaggagctccctggaggaactgcatggtgacgccaactggggtgaggacctgcgggtgcggaggaggagaggcacgggtggctcagagagcagcagggccagcgggcttgtggggcgcaaggccaccgaggacttcctgggctcttcctcgggctactcctctgaggacgactacgtgggctactcggatgtggaccagcagagttccagctcgcggctccgaagcgccgtctcacgggcgggctccttactctggatggtggccacttcgccaggccggctcttcagacttctctactggtgggctggcaccacctggtaccgcctgaccacagctgcctccctccttgacgtcttcgttttaaccaggcgcttctcgtccctgaagacgttcctctggttcctgctgccgctgctcttgctgacgtgcctgacgtatggtgcttggtatttctacccctatgggctgcagacattccaccctgctttggtttcctggtgggcagcgaaggacagcaggaggccggatgagggctgggaagccagagactcatcgccacatttccaggctgagcagcgtgttatgtcccgggtacactctctggagcggcgtctggaagctcttgctgctgaattttcctccaactggcagaaggaggccatgcggctggaacgtctggagctgcggcaaggggctcctggccagggaggtggtggtggcctgagccacgaggacaccctggcgctgctggaggggctagtgagccgccgtgaagctgccctgaaggaggatttccgcagggaaactgctgctcgcatccaggaagaactgtctgccctgagagcagagcatcagcaagactcagaagacctcttcaagaagatcgtccgggcctcccaggagtccgaggctcgcatccagcagctgaagtcagagtggcaaagcatgacccaggagtccttccaggagagctctgtgaaggagctgaggcggctggaggaccagctggccggcctgcagcaggagctggcggctctggcactgaagcagagctcggtggcggaagaagtgggcctgctgccccagcagatccaggccgtgcgggacgacgtggaatctcagttcccggcctggatcagtcagttccttgcccgaggtggagggggccgcgtggggctccttcagagagaggagatgcaagctcagctgcgagagctggagagcaagatcctcacccatgtggcagagatgcagggcaagtcggccagggaagccgcggcctccctgagcctgacgctgcagaaagaaggtgtgattggagtgacagaggagcaggtgcaccacatcgtgaagcaggccctgcagcgctacagtgaggaccgcatcgggctggcagactacgccctggagtcaggaggggccagcgtcatcagcacccgatgttctgagacctacgagaccaagacggccctcctcagcctcttcggcatccccctgtggtaccactcccagtcaccccgagtcatcctccagccagatgtgcacccaggcaactgctgggccttccaggggccacagggcttcgccgtggtccgcctctctgcccgcatccgccccacagccgttaccttagagcatgtgcccaaggccttgtcacccaacagcactatctccagtgcccccaaggacttcgccatctttgggtttgacgaagacctgcagcaggaggggacactccttggcaagttcacttacgatcaggacggcgagcctattcagacgtttcactttcaggcccctacgatggccacgtaccaggtggtggagctgcggatcctgactaactggggccaccccgagtacacctgcatctaccgcttcagagtgcatggggagcccgcccactagccctgcttactggtgcctgctgccagccatctgggagtgggtgaacagcaccccgccgcttcccccacacgcttgctcggcgctctgacttctaggagcacaagagaggagcctgtggccccatgcagatgaaaaggacgggcagggtctcctgagcagcaggtggctcgaggcggttagcaggctccagcagctcccttcttccttccctctgtgcccgtggcgtctgcttcccatcctgggagtgtgtatatatgtagcatatcatgggggactgggaagttgggagaggtaggacctgactggtcttggctggggtcaggggctggtgcctgggagctgatgaagcaggtgccagggctgtgggaggggcaagctacggcctgggctaggtgagctgcctctgcccctgggcaaggaagcgaggccctctgggaggagggtgcttagctccagagcaggatgggacttccccaggcaggaagcacttgatggagagctgcccagctctcctacaaggttagtgccctccacctagggaagcctgaaccacagggtccctgagggccttcgacaaaagtgtgtatttgtcccggggagggtagcagtgggccatggggcttcttgtgccctaaaggggactggctgctgtgatcttctaaggggcccagggccaaccctgtaggcttcccctctgctggggacggtagttgcttttctctctcctgatgctaggttggggcccaccctgctccctgttcctgctagggcctgccagtgcccctgagcttgctttccacattctcccagggtatggagacctagacctgtctttggggccattagcatctggggttatagcaagaagagtggggagcatggaactcctgggctcttgtggggacgttcagggtatcggggtgcgaggtctgtctgcaccggcccccacatctaaccaggccctgatgtaggggtcgtccgctcaggctgcccccttgggctcttgcagctcttgttcaggtagtcgcccttctggtttgttctctgtggggcagttggtgggggctgggggaagaggctggcagaagttaccctggatagggaagggggaggaggggacttttagagccagcaggccccactgtattatgtatatatttttcaaggtctgtttttctaactgaaaagctaagggcttgattcctagccccgttctgtggggcactgggtgatactcagtttcttgttcctggccgtggagaggggcctggggcactggttccggctgtgtctggtggtccggctgcagggaaggggcaagaaggcgggcaggccttcactgcagcactgagcctcaaatccgctctggagcatgaggctggatgcagtggtggtgaggccgccccgctccatcccgaggcagccaggctttgttttgcgctctcctgtcacaaatgctgcactattggttcttaagttttttatctccagatcctaatttatgcctatgcaaaaaataaatgacgcccaagagctg

SEQ ID NO: 957 - DNA, 5581 bp, Homo sapien
gtaagatttttaaaccaaggaatgactgggctatctataaacccagatgcactaagtggggagaaaagctcggagctgcagcatatcagctttgtcaacctgccaacagcagagcgtaccatgctgcaaggagtaataaacaaggaattagaaaactcgctgctggagaacagtcaaattaaacacctttttgaaaggatgagcatgtatatattgcagttctattaaatgtagcttcttagtgaggttggcattatgttaaggctggtatggaagagaactgatgaagcaggagtggtctggtgacatttttctgacttgattggctggggcgtgtgatgtaataggtttcagtgcagccccttataggttttaaaatgaattccaagacaccattacaaagaaagccggactcttttcttataactgagctcagccaaggaaactcttgcacaaatgtacaatactgtttggaatatggaagacctggatttagaatatgccaagacagatataaattgtggcacagacttgatgttttatatagaaatggacccaccagcactgcctcctaaaccaccaaaacctactactgtagccaacaacggtatgaataacaatatatccttacaagatgctgaatggtactggggagatatctcgagggaagaagtgaatgaaaaacttcgagatacagcagacgggacctttttggtacgagatgcgtctactaaaatgcatggtgattatactcttacactaaggaaagggggaaataacaaattaatcaaaatatttcatcgagatgggaaatatggcttctctgacccattaaccttcagttctgtggttgaattaataaaccactaccggaatgaatctctagctcagtataatcccaaattggatgtgaaattactttatccagtatccaaataccaacaggatcaagttgtcaaagaagataatattgaagctgtagggaaaaaattacatgaatataacactcagtttcaagaaaaaagtcgagaatatgatagattatatgaagaatatacccgcacatcccaggaaatccaaatgaaaaggacagctattgaagcatttaatgaaaccataaaaatatttgaagaacagtgccagacccaagagcggtacagcaaagaatacatagaaaagtttaaacgtgaaggcaatgagaaagaaatacaaaggattatgcataattatgataagttgaagtctcgaatcagtgaaattattgacagtagaagaagattggaagaagacttgaagaagcaggcagctgagtatcgagaaattgacaaacgtatgaacagcattaaaccagaccttatccagctgagaaagacgagagaccaatacttgatgtggttgactcaaaaaggtgttcggcaaaagaagttgaacgagtggttgggcaatgaaaacactgaagaccaatattcactggtggaagatgatgaagatttgccccatcatgatgagaagacatggaatgttggaagcagcaaccgaaacaaagctgaaaacctgttgcgagggaagcgagatggcacttttcttgtccgggagagcagtaaacagggctgctatgcctgctctgtagtggtggacggcgaagtaaagcattgtgtcataaacaaaacagcaactggctatggctttgccgagccctataacttgtacagctctctgaaagaactggtgctacattaccaacacacctcccttgtgcagcacaacgactccctcaatgtcacactagcctacccagtatatgcacagcagaggcgatgaagcgcttactctttgatccttctcctgaagttcagccaccctgaggcctctggaaagcaaagggctcctctccagtctgatctgtgaattgagctgcagaaacgaagccatctttctttggatgggactagagctttctttcacaaaaaagaagtaggggaagacatgcagcctaaggctgtatgatgaccacacgttcctaagctggagtgcttatcccttctttttctttttttctttggtttaatttaaagccacaaccacatacaacacaaagagaaaaagaaatgcaaaaatctctgcgtgcagggacaaagaggcctttaaccatggtgcttgttaatgctttctgaagctttaccagctgaaagttgggactctggagagcggaggagagagaggcagaagaaccctggcctgagaaggtttggtccagcctggtttagcctggatgttgctgtgcacggtggacccagacacatcgcactgtggattatttcattttgtaacaaatgaacgatatgtagcagaaaggcacgtccactcacaagggacgctttgggagaatgtcagttcatgtatgttcagaagaaattctgtcatagaaagtgccagaaagtgtttaacttgtcaaaaaacaaaaacccagcaacagaaaaatggagtttggaaaacaggacttaaaatgacattcagtatataaaatatgtacataatattggatgactaactatcaaatagatggatttgtatcaataccaaatagcttctgttttgttttgctgaaggctaaattcacagcgctatgcaattcttaattttcattaagttgttatttcagttttaaatgtaccttcagaataagcttccccaccccagtttttgttgcttgaaaatattgttgtcccggatttttgttaatattcatttttgttatccttttttaaaagtaaatgtacaggatgccagtaaaaaaaaaaaaatggcttcagaattaaaactatgaaatattttacagtttttcttgtacagagtacttggctgttagcccaaggttaaaaagttcataacagattttttttggactgttttgttgggcagtgcctgataagcttcaaagctgctttattcaataaaaaaaagaaatgaaaaagatatatgaatatgacaaagtattgctgagtccaacaatgttgttttaagactcttaaaatacggtacctggcaatgtttatttcataaagaattgtgaacttcttgaatctagggagggggaatgtagtgaagggatgtatcaagtggggtggtgggagggggaggcaaggttatatgcactttctcatgatttacagagaagtgaataactgcaaagtgaagttgcttcttctacttcagtcttctctcactttgatttgctagttgttatcaattaatgacaattacaaacctactgtatctctaatacagtgtgactggtcaggtatttcagttcttaggaaggaagtgccaagtttgtttttgggttcctggaacagcgctcacctttgtttagaacactggtttaaagggataatcatctctgtcacattagactatccatcatgaccagcaaatactcattttaggaaaaaaaaaagcatgatctgaaaaatacttttggtggtatgttggttaccctcctagctttccatttggtttagaacataaagcaaatagacacagtcatactgtcactgctctggactgtgtggagctcgctaaagtcatggtcattgcaggaatccaagtggcagtccttctcattcattctaatcattgtatgtgcttcactacgggggggagaaggaaacgttagcatcatgtttcccatttagggcaggagtgagaggtctctcttcctgatttagatatgcaaaagctggtatgttcagtaggaactgtacatgtgttgggaggcataaagactaattagcaaccataatatggtcactaccctaatagactaaatgaaatcttgcaatttcaaattactctttctccatattagatttacccacagctatatttctgtttaagtactagggtgagggttttctgttactttgttttttaatgttgttccttttgaaagaatcagtcttgcagctgagtgaaaaatctgtggaatgtattatttgtcctctttacatgaaactactcatacttaagcaaaagtcagtcttatagcaagactgttagccctcaaacttgactctactgatctgaccatttccctctcatcgccagacaactgacgatttccctggttttagtctgcgtctctgctttaaagttattgtgatatccttctagatcatacacaagtctaacagttaattagttaacagtttttaaactaggtttgtgggtatttttttggtagcacatgtatgctattacatacaaatttttatttctaaaatataagatctgagattgaatattttcattaaaagctacagttttgtgaatctttgtgcttcaacattctttgcaagatgatacggtatttaggcatttgccttatttttgcatctcacaaacataagtgcaatagatcttttcattgaacagcaaagtaggattcatcattccatatgacttgagttacaccagacctgttctgcccaatgcctttttgattacagtgtagcttgcccaccgcatttgtcgttttagatactttgctagccggccactttggatttcatcagacagtcctaacaatattgtctgaacggctgaatatgaatagatacagcagaggcactcctgatatatgatttttatccatgcgtcagtttttcccacccagtgtagcatcctaaagataaagccagaagctaagctgcagtgaggctgtgattgggcgtagaagtgggagcattgggacctcacattacacacacgagagatcataaccatgtgaaaaggcaaaaagcatgtgtttgcaacatctgataacttcatggcctttgataaatgtatatatgtatatgtgcatggactgtgtttccagtacacctttcagccaaaacagatccacagtagttgttgagttcaagtacataaagtacataacaagcgaacgtctagtacaattcttacttatgtgtatgggatttttccctttgaggttgctttgttttgtcttacaaaggtgaaaattgtttgtaagtgaagtgagaagttcatatttctttggcttttttgtgtttttaaaagttactccttttagggagctggtctgatgacttgcttagcttggaaatccttgttttcagtgtgtcgagtcaaaatgtgtttatgtgagctgtcactgtggggaaccaattgctttgtcatatagctggttatgaactagtaacatgtttgggaagtcctactgatgttcctttggaagaaaaaatctgctggttttaacaactgtgcttttgctatgtatggtatccaagttagttgaaatgcagacactgagatctgtttgagtttagggtcatttttagaaaggggcagtttaaagcacaatgtctcacatgggacaaagttccaaaatgccaaattcttattttttaaaaagctagttctataaaatactggtattatgggtggggaggaaatagaattgagtcaattggaaagactatccaacttaacatgaaacttgtcaccatgagatagcattagctgcccaggatgctgctatatatatatatgtatt

SEQ ID NO: 958 - protein, 454 aa, Homo sapien [sequence omitted]

SEQ ID NO: 959 - DNA, 3213 bp, Homo sapien; identical to SEQ ID NO: 668

SEQ ID NO: 960 - protein, 731 aa, Homo sapien; identical to SEQ ID NO: 669

SEQ ID NO: 961 - DNA, 2002 bp, Homo sapien
ctcttctcacatcagcgggtccaggcccaaccgacagactatgggggctccttcaccaggcgctgcgtggagtggctgctgggcctctacttcctcagccacatccccatcaccctgttcatggacctgcaggcggtcgtgccgcgcgagctctacccagtcgagtttagaaacctgctgaagtggtatgctaaggagttcaaagacccactgctacaggagcccccagcctggtttaagtcctttctgttttgcgagcttgtgtttcagctgcctttctttcccattgcaacgtatgccttcctcaaaggaagctgcaagtggattcgaactcctgcaatcatctactctgttcacaccatgacaaccttaattctgatactctccacatttctgtttgaggatttctccaaagccagtggtttcaagggacaaagacctgagactttgcatgaacggttaacccttgtgtctgtctatgccccctacttactcatcccattcatacttttaattttcatgttgcggagcccctactacaagtatgaagagaaaagaaaaaaaaaatgaaggaaacaaccactggcccagggtagagatgcctacagggtggttgcttgttggatacatacaggaacactgctcagaacccacgtcttcagcagcatttgaaacactggcagcaatgcacaagagcaagatggtgtcaggaaccatgtcaaaccctcaccttcttccattttttttttttttttgagacagtctcactctgttgccaggctggagtaaagggcagtggcatgatctcggctcactgcaacctccgcctcctgggctcaagccatcttccttagcctcccaagtagctagaactacaggtgtgtaccaacacgtatggctaatttgttttgttttttttgtgtgtgtggagacagggttttgccatgttgcccaggttggtctcgaacgcctaggctcaagtgatctgcccacctcagtctccctaagtgctgggattacagacgtgaaccactgggcccagcccaaaccttcaccttctaagggcactgggatgaacagaccgatcggcttgagggtgggcaaaggggtgtgggctaggttataaggaagtggtaccaaataactgtgttgcctgagttccaccgcaagattactaaaagcaggaccagaccagaaactgctaaagaacatggcctgtttgacatgttcatgagtcacctgacccacagcatatatgcttatgactaaaccctccactcctgattctcaagagtgtatcacctgtcagcaaaatgaatagtgggatattttgggccattttaaatgtgaaattttgcctctttaatgttaattcaaaactatatcaatgttttcttgttcccacctctaacccaaggaaaaaagagaaaacatactatgcaaaggaagtttaaacttaagttttccttaagggtcagcccaacaatgactttcagtcaaatggattaaactggaaaatgtttttgtttctgttgtaaacagatcatcctaggcgaaagttttttttgtttgtttgcttttaaattagtttatttctaaatcttagtcttccacatttctagaggccacctgacacaagtccctgtatctgaagtctagcatctcaaggctgatctggaagtgtgctagtatgctccctagtggataacttaatcttttaatacagttccgtcattcccatcttgttttcagaagagaaggtggctacagccaggcataacttatccactgtgtgcatagagggtctcttcacgttgatgcttggcattccatcagctttctctaagtctttgctcaagttcaaggttaaaatgatgttagacaacaggtcccagtcagtcccctctattttcacccattttgctcacaagccatattggcccgattagtggtactgtctgactcacgtgtgtgatccaaataaaggtagctgccgggaatt

SEQ ID NO: 962 - DNA, 2190 bp, Homo sapien
ggcttacaggagggcagctctgcagttgggaggggcaccgtccggaggagaccaggcctctacacaccccccactctacttatcatccctgctcacacacccttgtccaaggctttatgcatcggatttatttttccaaatcaagaggacagtgatagatgcattttccccaggctgtctcagaaaggtcgctaaatgtatactgttgtcagaattgctgagatctccccccacttttggtttttgcagcagtaaaaactctttccactgtgacttattttctctctcaggcagccagccacctggtcccttgtgctgactctagcacagtggccaggatccaatacgagtccaggggtgaccgcaggatggtgggggcagcgggcttctccacctaccccagccaccaaggccctgacgcactgcctcctgcaccttcagcacatccctgtgcacagctggaagggtgcatggcccgctcacctttgttcagatgggtggaaacgctgatgataccagctcctccctgccgtgcccctgccacggagcaggcattgtgaactggctggtgtttgcagtcccacgtggcatggcctccagcccaacccacagtggagactggagacagggcaatgagtctggtcgggggcacgtggacatgccccataggggccccacccagacttaacaggcaaggtcctgggcattgcgcgacgcaggactcaatgctaaagcaagcctgcctggctctgtgccagggcccctcttctgatttacacatcccatttttacacagacccttccttcttaataaaggctgacagttctgttggcagccaagaacccacaccatgaagacagggagtgaggggcctttgtgcccaactccagcacagctgcgttctggggtgtgtgagaggcatgttcgtgtctgtgcgctggtggtctcgtgagacagttccgaggacggggaaattgcagggtggtgggggcgtgaggcttatatgtggaactgatgcagagttcgcctgcagacggatctggatatacactatgtataattgttacgtgtaatttaaaatatatctgtttgccatcgtcatgagaagattatatgtaaggctctgaagggagagggagatgtacattctgccaggctcctggggaccttatccgagtcatgaaattgatgactgttgatccagtggtgcaagaagctacactccatgtgtcatcacgcttatgactcctaatgtatttttaaggcaaaaaatgtcagccgactccatcttcacccctcgattcctcgagtccagcctttctgtgccagtgcttcactgagccacaacgctctcgccatcgggacccggctgggcctggagtctcggggcacagttgccatggagccctcctgggtcattctacaaatgtgctgagtgccagctgaaaaccccacaggagatggagtaccttggccaagcttaaagagaagattttctcagggtatttattagtgtgtccagcagggtcaggaagcaggatggaaagatgcattcagactgttaatttattaacaaggcaaatgattttgtgtttcttgatgacagactattaagtttgggacttattttcccatttgagaagttataatatatatttaagatgataagtttcctgcttaagttgtgcctttcagcttcaatgagtttaaggagcactaagggtaatgataccaatgagggttggtttattatcaaacctgaatagctgtggtttctccagtaaatattttcttctactgaacatggagccattattaagagttgtgtgttttttattatgtacatttgtatatttttttgcttgtttgatgttctatttttctaatagttttcttttagtttcttaaagttgtgatactagatttagattctgatgctaactgcaaatcaggttggtctctgctgggtctctcctgcttttattttactttaaggacaagtgtagttgtcgtccaccacctttcaaaaaatgtgaaactgccctgcctcccctttttgctgacaacactgtgtacattgaccacttcctaccatactttatgttgtaaaatcaaactcttttgtggtacattatctcatgcttctgcaaattcgaataaattctatggcttccaaaaaaaaaaaaaaa

SEQ ID NO: 963 - protein, 21 aa, Homo sapien
MKLMTVDPVVQEATLHVSSRL

SEQ ID NO: 964 - DNA, 1132 bp, Homo sapien
gcgtcaccacagaggcaagacaagggtccatatcgcggcatccggctcccgcccgtcttcaggagagaaagaaaaaataaaatatacttggggaagttgtacctgccagaattagtaagagctttctttaagaagacatttgtcaaactcaacaaattgaaggttaacaccttaagagttgtagttactgaccagaaatatggacagacttcttagacttggaggaggtatgcctggactgggccaggggccacctacagatgctcctgcagtggacacagcagaacaagtctatatctcttccctggcactgttaaaaatgttaaaacatggccgtgctggagttccaatggaagttatgggtttgatgcttggagaatttgttgatgattataccgtcagagtgattgatgtgtttgctatgccacagtcaggaacaggtgtcagtgtggaggcagttgatccagtgttccaagctaaaatgttggatatgttgaagcagacaggaaggccggagatggttgttggttggtatcacagtcaccctggctttggttgttggctttctggtgtggatatcaacactcagcagagctttgaagccttgtcggagagagctgtggcagtggttgtggatcccattcagagtgtaaaaggaaaggttgttattgatgccttcagattgatcaatgctaatatgatggtcttaggacatgaaccaagacaaacaacttcgaatctgggtcacttaaacaagccatctatccaggcattaattcatggactaaacagacattattactccattactattaactatcggaaaaatgaactggaacagaagatgttgctaaatttgcataagaagagttggatggaaggtttgacacttcaggactacagtgaacattgtaaacacaatgaatcagtggtaaaagagatgttggaattagccaagaattacaataaggctgtagaagaagaagataagatgacacctgaacagctggcaataaagaatgttggcaagcaggaccccaaacgtcatttggaggaacatgtggatgtacttatgacctcaaatattgtccagtgtttagcagctatgttggatactgtcgtatttaaataa

SEQ ID NO: 965 - protein, 310 aa, Homo sapien
MDRLLRLGGGMPGLGQGPPTDAPAVDTAEQVYISSLALLKMLKHGRAGVPMEVMGLMLGEFVDDYTVRVIDVFAMPQSGTGVSVEAVDPVFQAKMLDMLKQTGRPEMVVGWYHSHPGFGCWLSGVDINTQQSFEALSERAVAVVVDPIQSVKGKVVIDAFRLINANMMVLGHEPRQTTSNLGHLNKPSIQALIHGLNRHYYSITINYRKNELEQKMLLNLHKKSWMEGLTLQDYSEHCKHNESVVKEMLELAKNYNKAVEEEDKMTPEQLAIKNVGKQDPKRHLEEHVDVLMTSNIVQCLAAMLDTVVFK

SEQ ID NO: 966 - DNA, 2145 bp, Homo sapien
  Unsure 801-849: Unknown base
aaggcaacagactctttatttaatgtggtttaaaatacatcaaaatcaagtccctggctgttgtgaatacccaaaggagacaaaaaagctgccagtgcagcttcaaacaagtctgagtggccgggctgggccataaggaaagcagttacagggacagaaggcagctcccttcccccaggaagggcaagaggagcaggtgcctggctgtccctggggtgaccacctctgtgctgtgcaaggcggaaaggctggggcagcagctggagaatcagctcagcaggccttggccctcccccgtggacaccaggcagctccactggcctccgggtcagccctcagggccaccgtgatggggtggaggagggttaaataaccatctttacagaaataacagtctcctacagaaagtgcctgagctcagcccatggtccgataacctcatggaaaacaaacaacaaataaaaaaaaaaagtgctgctgacacctctcagaatctggtggacatgaagctctcagctggacaaggccctgaaaacaatttactattagcagagccatgcgctcttgagcttcacctgctgtggtcccctggaggaaaagctagcaatctaagaaaccaacacagatcttggtcctaaaactgaggtcacaagtgtgggacccacccaggtgaggaagacactggccttcactcatggataggcacctcccctgcatctggcccaggacctgggctactttggaaagcagaagcagagcagctgtagtgattggttgatttggtcaatgaagagaagaaannnnnnnnnnnnnnnnnnnnnnnnnnnnnnnnnnnnnnnnnnnnnnnnnaaggagcctccagagcagctaggagggcctgagctgaccaagcaagccctgctcacaagacaaatgcagtcaagacctgggtgtattacttgtcttgagctctgaagggcagggaggggtctgagcctcaaatcagacagagaaatgctcaagtcacttctgccaactcactgtgatggcagctacagatgacagcccctctcaagactcttcagctcacagacaagccactgacttcatctgtacacacccccatccccaatgcaagcccactgtacacttacaggtataaatgcatttgcaaggccttgcaaaatgccctatgtacgtaaaactgacccacaaaatccaaaattgcaagtgccagatgccagccaggtcagaacatcctggcttcagcaatgggctgctcagcatgggagccttttatgggccaggcctggctgggctgccgctcccttcccagcatgacccaacaccaggctctctaggccctggcggaggtgggctcttgaggcccagtctggcctgatgcttctgtgctcggtgctcctgggtagcaaggcgcttctgtgaccctgggggagctgggtgcttgagccccaggcccctctggcctcctctcagggccactgtcagtgagggagccctggccaccagcactcaggtcctgtaccctcttgttcaggtcattgcgctctgtctgcagtgcccggcacagcttctccagccgttggatttttacctgcaggccctccagttctttatcccggactgttttctcctcagccatctcaagcagggccttgttgctgctctcccaccgggaccggtacatggtggtttctttctccagcttcttgatcttcttagtcatcttttccatctcctgcttgaatgtggtgaatacctcgctgcttttggaaagtgtgttctggaactcctcaaacttctctgtgtatagggcaagctgttgcttcaggtgggtctcttgctgcttcatcagctcacacatcctctgggactctactgcctctttcaggagaaaatccttctcccgctggtgccgctcttctgcctcctttagcatctcctgggcctgctggagcttggcatccaccagctgctgttgtaggtccttgtgtttgaagactttgtcgatatgctcctcgcgcagctcatactgctcaatcagcttcttgagcctctcagccagctccatgttctcttggcgcagcttggagttgcgctcattgtgctgttccatccggacgcgtgggtcgaggtcgagggatc

SEQ ID NO: 967 - DNA, 2575 bp, Homo sapien
ggaggaggaagcaagcgagggggctggttcctgagcttcgcaattcctgtgtcgccttctgggctcccagcctgccgggtcgcatgatccctccggccggagctggtttttttgccagccaccgcgaggccggctgagttaccggcatccccgcagccacctcctctcccgacctgtgatacaaaagatcttccgggggctgcacctgcctgcctttgcctaaggcggatttgaatctctttctctcccttcagaatcttatcttggctttggatcttagaagagaatcactaaccagagacgagactcagtgagtgagcaggtgttttggacaatggactggttgagcccatccctattataaaaatgtctcagagcaaccgggagctggtggttgactttctctcctacaagctttcccagaaaggatacagctggagtcagtttagtgatgtggaagagaacaggactgaggccccagaagggactgaatcggagatggagacccccagtgccatcaatggcaacccatcctggcacctggcagacagccccgcggtgaatggagccactggccacagcagcagtttggatgcccgggaggtgatccccatggcagcagtaaagcaagcgctgagggaggcaggcgacgagtttgaactgcggtaccggcgggcattcagtgacctgacatcccagctccacatcaccccagggacagcatatcagagctttgaacaggtagtgaatgaactcttccgggatggggtaaactggggtcgcattgtggcctttttctccttcggcggggcactgtgcgtggaaagcgtagacaaggagatgcaggtattggtgagtcggatcgcagcttggatggccacttacctgaatgaccacctagagccttggatccaggagaacggcggctgggatacttttgtggaactctatgggaacaatgcagcagccgagagccgaaagggccaggaacgcttcaaccgctggttcctgacgggcatgactgtggccggcgtggttctgctgggctcactcttcagtcggaaatgaccagacactgaccatccactctaccctcccacccccttctctgctccaccacatcctccgtccagccgccattgccaccaggagaaccactacatgcagcccatgcccacctgcccatcacagggttgggcccagatctggtcccttgcagctagttttctagaatttatcacacttctgtgagacccccacacctcagttcccttggcctcagaattcacaaaatttccacaaaatctgtccaaaggaggctggcaggtatggaagggtttgtggctgggggcaggagggccctacctgattggtgcaacccttaccccttagcctccctgaaaatgtttttctgccagggagcttgaaagttttcagaacctcttccccagaaaggagactagattgcctttgttttgatgtttgtggcctcagaattgatcattttccccccactctccccacactaacctgggttccctttccttccatccctaccccctaagagccatttaggggccacttttgactagggattcaggctgcttgggataaagatgcaaggaccaggactccctcctcacctctggactggctagagtcctcactcccagtccaaatgtcctccagaagcctctggctagaggccagccccacccaggagggagggggctatagctacaggaagcaccccatgccaaagctagggtggcccttgcagttcagcaccaccctagtcccttcccctccctggctcccatgaccatactgagggaccaactgggcccaagacagatgccccagagctgtttatggcctcagctgcctcacttcctacaagagcagcctgtggcatctttgccttgggctgctcctcatggtgggttcaggggactcagccctgaggtgaaagggagctatcaggaacagctatgggagccccagggtcttccctacctcaggcaggaagggcaggaaggagagcctgctgcatggggtggggtagggctgactagaagggccagtcctgcctggccaggcagatctgtgccccatgcctgtccagcctgggcagccaggctgccaaggccagagtggcctggccaggagctcttcaggcctccctctctcttctgctccacccttggcctgtctcatccccaggggtcccagccaccccgggctctctgctgtacatatttgagactagtttttattccttgtgaagatgatatactatttttgttaagcgtgtctgtatttatgtgtgaggagctgctggcttgcagtgcgcgtgcacgtggagagctggtgcccggagattggacggcctgatgctccctcccctgccctggtccagggaagctggccgagggtcctggctcctgaggggcatctgcccctcccccaacccccaccccacacttgttccagctctttgaaatagtctgtgtgaaggtgaaagtgcagttcagtaataaactgtgtttactcagtgaaaaaaaaaaaaaaaaaa

SEQ ID NO: 968 - protein, 233 aa, Homo sapien; identical to SEQ ID NO: 605

SEQ ID NO: 969 - DNA, 4853 bp, Homo sapien
ttcgccgtttgaattgctgcgggcccgggccctcacctcacctgaggtccggccgcccaggggtgcgctatgccgtcgggaggtgaccagtcgccaccgcccccgcctccccctccggcggcggcagcctcggatgaggaggaggaggacgacggcgaggcggaagacgccgcgccgtctgccgagtcgcccacccctcagatccagcagcggttcgacgagctgtgcagccgcctcaacatggacgaggcggcgcggcccgaggcctgggacagctaccgcagcatgagcgaaagctacacgctggagggaaatgatcttcattggttagcatgtgccttatatgtggcttgcagaaaatctgttccaactgtaagcaaagggacagtggaaggaaactatgtatctttaactagaatcctgaaatgttcagagcagagcttaatcgaattttttaataagatgaagaagtgggaagacatggcaaatctacccccacatttcagagaacgtactgagagattagaaagaaacttcactgtttctgctgtaatttttaagaaatatgaacccatttttcaggacatctttaaataccctcaagaggagcaacctcgtcagcagcgaggaaggaaacagcggcgacagccctgtactgtgtctgaaattttccatttttgttgggtgctttttatatatgcaaaaggtaatttccccatgattagtgatgatttggtcaattcttatcacctgctgctgtgtgctttggacttagtttatggaaatgcacttcagtgttctaatcgtaaagaacttgtgaaccctaattttaaaggcttatctgaagattttcatgctaaagattctaaaccttcctctgaccccccttgtatcattgagaaactgtgttccttacatgatggcctagttttggaagcaaaggggataaaggaacatttctggaaaccctatattaggaaactttatgaaaaaaagctccttaagggaaaagaagaaaatctcactgggtttctagaacctgggaactttggagagagttttaaagccatcaataaggcctatgaggagtatgttttatctgttgggaatttagatgagcggatatttcttggagaggatgctgaggaggaaattgggactctctcaaggtgtctgaacgctggttcaggaacagagactgctgaaagggtgcagatgaaaaacatcttacagcagcattttgacaagtccaaagcacttagaatctccacaccactaactggtgttaggtacattaaggagaatagcccttgtgtgactccagtttctacagctacgcatagcttgagtcgtcttcacaccatgctgacaggcctcaggaatgcaccaagtgagaaactggaacagattctcaggacatgttccagagatccaacccaggctattgctaacagactgaaagaaatgtttgaaatatattctcagcatttccagccagacgaggatttcagtaattgtgctaaagaaattgccagcaaacattttcgttttgcggagatgctttactataaagtattagaatctgttattgagcaggaacaaaaaagactaggagacatggatttatctggtattctggaacaagatgcattccacagatctctcttggcctgctgccttgaggtcgtcactttttcttataagcctcctgggaattttccatttattactgaaatatttgatgtgcctctttatcatttttataaggtgatagaagtattcattagagcagaagatggcctttgtagagaggtggtaaaacaccttaatcagattgaagaacagatcttagatcatttggcatggaaaccagagtctccactctgggaaaaaattagagacaatgaaaacagagttcctacatgtgaagaggtcatgccacctcagaacctggaaagggcagatgaaatttgcattgctggctcccctttgactcccagaagggtgactgaagttcgtgctgatactggaggacttggaaggagcataacatctccaaccacattatacgataggtacagctccccaccagccagcactaccagaaggcggctatttgttgagaatgatagcccctctgatggagggacgcctgggcgcatgcccccacagcccctagtcaatgctgtccctgtgcagaatgtatctggggagactgtttctgtcacaccagttcctggacagactttggtcaccatggcaaccgccactgtcacagccaacaatgggcaaacggtaaccattcctgtgcaaggtattgccaatgaaaatggagggataacattcttccctgtccaagtcaatgttggggggcaggcacaagctgtgacaggctccatccagcccctcagtgctcaggccctggctggaagtctgagctctcaacaggtgacaggaacaactttgcaagtccctggtcaagtggccattcaacagatttccccaggtggccaacagcagaagcaaggccagtctgtaaccagcagtagtaatagacccaggaagaccagctctttatcgcttttctttagaaaggtataccatttagcagctgtccgccttcgggatctctgtgccaaactagatatttcagatgaattgaggaaaaaaatctggacctgctttgaattctccataattcagtgtcctgaacttatgatggacagacatctggaccagttattaatgtgtgccatttatgtgatggcaaaggtcacaaaagaagataagtccttccagaacattatgcgttgttataggactcagccgcaggcccggagccaggtgtatagaagtgttttgataaaagggaaaagaaaaagaagaaattctggcagcagtgatagcagaagccatcagaattctccaacagaactaaacaaagatagaaccagtagagactccagtccagttatgaggtcaagcagcaccttgccagttccacagcccagcagtgctcctcccacacctactcgcctcacaggtgccaacagtgacatggaagaagaggagaggggagacctcattcagttctacaacaacatctacatcaaacagattaagacatttgccatgaagtactcacaggcaaatatggatgctcctccactctctccctatccatttgtaagaacaggctcccctcgccgaatacagttgtctcaaaatcatcctgtctacatttccccacataaaaatgaaacaatgctttctcctcgagaaaagattttctattacttcagcaacagtccttcaaagagactgagagaaattaatagtatgatacgcacaggagaaactcctactaaaaagagaggaattcttttggaagatggaagtgaatcacctgcaaaaagaatttgcccagaaaatcattctgccttattacgccgtctccaagatgtagctaatgaccgtggttcccactgaggttagtctcttgtattaaactcttcacaaaatctgtttagcagcagcctttaatgcatctagattatggagcttttttccttaatccagctgatgagttacagcctgttagtaacatgaggggacattttggtgagaaatgggacttaactccttccagtgtccttagaacattttaattcatcccaactgtctttttttccctaccactcagtgattactgtcaaggctgcttacaatccaaacttgggtttttggctctggcaaagcttttagaaatactgcaagaaatgatgtgtacccaacgtgagcataggaggcttctgttgacgtctccaacagaagaactgtgtttcaagttcaatcctacctgttttgtggtcagctgtagtcctcataaaaagcaaaacaaaaattaggtattttgtcctaaaacacctggtaggagtgtgtgattttttgcattcctgacaaaggagagcacacccaggtttggaggtcctaggtcattagccctcgtctcccgttccctttgtgcacatcttccctctccccattcggtgtggtgcagtgtgaaaagtccttgattgttcgggtgtgcaatgtctgagtgaacctgtataagtggaggcactttagggctgtaaaatgcatgattttgtaacccagattttgctgtatatttgtgatagcactttctacaatgtgaactttattaaatacaaaacttccaggctaaacatccaatattttctttaatgcttttatatttttttaaaatgttaaaacccctatagccaccttttgggaatgttttaaattctccagttttttgttatatagggatcaaccagctaagaaaagattttaagtcaagttgaattgaggggattaatatgaaaacttatgacctcttcctttaggagggagttatctaaaagaaatgtctattaaggtgatatatttaaaaatatttttgggtgttcctggcagtttaaaaaaattggttggagaatttaggtttttattagtaccatagtaccatttatacaaattagaaaatgttatttaacagctgaattatctatacatatctttattaatcactattgttccagcagttttcaagtcaaattaataatcttattagggagaaaattcaattgtaaattgaatcagtataaacaaagttactaggtaacttcatattgctgagagaaatatggaacttacattgttcaattagaatagtgttctccccaaatatttataaaacttctcaagatactgctacgtgtaattttatatgaagataagtgtatttttcaataaagcatttataaattaaaaaaaaaaaaaaaaaa

SEQ ID NO: 970 - protein, 1139 aa, Homo sapien
MPSGGDQSPPPPPPPPAAAASDEEEEDDGEAEDAAPSAESPTPQIQQRFDELCSRLNMDEAARPEAWDSYRSMSESYTLEGNDLHWLACALYVACRKSVPTVSKGTVEGNYVSLTRILKCSEQSLIEFFNKMKKWEDMANLPPHFRERTERLERNFTVSAVIFKKYEPIFQDIFKYPQEEQPRQQRGRKQRRQPCTVSEIFHFCWVLFIYAKGNFPMISDDLVNSYHLLLCALDLVYGNALQCSNRKELVNPNFKGLSEDFHAKDSKPSSDPPCIIEKLCSLHDGLVLEAKGIKEHFWKPYIRKLYEKKLLKGKEENLTGFLEPGNFGESFKAINKAYEEYVLSVGNLDERIFLGEDAEEEIGTLSRCLNAGSGTETAERVQMKNILQQHFDKSKALRISTPLTGVRYIKENSPCVTPVSTATHSLSRLHTMLTGLRNAPSEKLEQILRTCSRDPTQAIANRLKEMFEIYSQHFQPDEDFSNCAKEIASKHFRFAEMLYYKVLESVIEQEQKRLGDMDLSGILEQDAFHRSLLACCLEVVTFSYKPPGNFPFITEIFDVPLYHFYKVIEVFIRAEDGLCREVVKHLNQIEEQILDHLAWKPESPLWEKIRDNENRVPTCEEVMPPQNLERADEICIAGSPLTPRRVTEVRADTGGLGRSITSPTTLYDRYSSPPASTTRRRLFVENDSPSDGGTPGRMPPQPLVNAVPVQNVSGETVSVTPVPGQTLVTMATATVTANNGQTVTIPVQGIANENGGITFFPVQVNVGGQAQAVTGSIQPLSAQALAGSLSSQQVTGTTLQVPGQVAIQQISPGGQQQKQGQSVTSSSNRPRKTSSLSLFFRKVYHLAAVRLRDLCAKLDISDELRKKIWTCFEFSIIQCPELMMDRHLDQLLMCAIYVMAKVTKEDKSFQNIMRCYRTQPQARSQVYRSVLIKGKRKRRNSGSSDSRSHQNSPTELNKDRTSRDSSPVMRSSSTLPVPQPSSAPPTPTRLTGANSDMEEEERGDLIQFYNNIYIKQIKTFAMKYSQANMDAPPLSPYPFVRTGSPRRIQLSQNHPVYISPHKNETMLSPREKIFYYFSNSPSKRLREINSMIRTGETPTKKRGILLEDGSESPAKRICPENHSALLRRLQDVANDRGSH

SEQ ID NO: 971 - DNA, 4853 bp, Homo sapien; identical to SEQ ID NO: 969

SEQ ID NO: 972 - protein, 1139 aa, Homo sapien; identical to SEQ ID NO: 970

SEQ ID NO: 973 - DNA, 2078 bp, Homo sapien
tgggcaattaaccaagccatagccaatgaatatgaagtccggagaaagctgctaataaaacgtttggatgtcactgtacaatcctttggctggtctgacagagctaagagccagacagaaaaattagccaaggtttaccagccgaaacgttcagtcttatcccctaaaactactatttctgttgcccatcttttggctgcaaggcaggacttgtcaaagattttaaggacaagcagcggctctataagagaaaagactgcctgtgccatcaataaggtgttgatgggcagggtgcctgacagaggtggtagacccaatgaaatcgaacctccacccccagagatgccaccgtggcagaagaggcaagatggcccccagcagcaaacaggaggccgagtaggagggagaggtggctatgaacattcctcatacggaggacgaggaggtcatgaacaaggaggcgggagaggtggacgtggtggctatgaccatggtggccgagggggaggaagaggaaataagcatcaaggaggctggacagatggagggagtggtggaggaggtggctaccaagatggtggttatcgagattcaggtttccagccaggtggctatcatggtggccacagcagtggtggctatcaaggcggaggttatggtggcttccaaacatcttcttcatatacaggaagtggataccagggtggtggctaccagcaggacaatagataccaagatggcgggcaccatggtgatcgtggtggtggtcgtggtgggcgaggtggtcgtggaggccgaggtggtcgtgcaggccagggaggaggctggggaggaagagggagccagaattatcaccaagggggtcaatttgaacagcatttccagcatggaggttatcagtataatcattctggatttggacagggaagacattacactagttgaggctaccgaactttacattttgctagagctcaagtaatagaaacttagtttcagaatcctgaattcagcacctattttgaattaatgtgagaccacaggtggcaggcagattcctgcttggcataagcatttgtaggtcttcattcaattctgttagatttttttattggacttacataatgccgtttatttgagaaacacataacatctctccttcctatgaaaaattttttaaaaggtggttaaaattgcctttaattgcccagtagactaattccacagtcagaacatgcaaacttttttgaagaaattacttgaataagtagttttcatgttttcaatatgcagttttgaaaatgaggattcacctagacttttttagatttactactaggaaaccttcctcatatgaataaccatttatatgtgttttgcttaaagtattccaatgcctattttccaagcacagttctgccccccggttgacttttatgccacgtgtgcttcatgatggaacttttaggtcagttcctattaaatgagctcttctgcagatagcacattcagtagccttattttgttgatggaatactgtatcatatgctcaactctgaaaaccttgaacacggccaaaatccataaagattataaaagcaaactaagttgtgaagctatagtacatgtaggcatttagttaagtatagcaattcaaactgacctgcatccatccaaaacaaattcctccttcaaccttatttttacttgaaatttgctagaagaaatagcaaaccgaaatttgttttatgcatgagttaataccactggctcagcaaatacaagttagtttgctttaagcaggtaactttttttgtaatggaagaaatgcactacaaagttaagacagatttttgctaagtgcaggaggccctttattattgctgcagaaaacaaaagcctggctgagttgatgttttacattctcccttactgaaatctacatgacatgatgcttcttgctgggtttttgtacatgtaaacattgtcaagctgtgaaagaaaatggctggaggtgtgctttgtgtgaaaggtgagcaataaagtatctgttaagttcaaaaaaaaaaaaaaaaaaa

SEQ ID NO: 974 - protein, 314 aa, Homo sapien
WAINQAIANEYEVRRKLLIKRLDVTVQSFGWSDRAKSQTEKLAKVYQPKRSVLSPKTTISVAHLLAARQDLSKILRTSSGSIREKTACAINKVLMGRVPDRGGRPNEIEPPPPEMPPWQKRQDGPQQQTGGRVGGRGGYEHSSYGGRGGHEQGGGRGGRGGYDHGGRGGGRGNKHQGGWTDGGSGGGGGYQDGGYRDSGFQPGGYHGGHSSGGYQGGGYGGFQTSSSYTGSGYQGGGYQQDNRYQDGGHHGDRGGGRGGRGGRGGRGGRAGQGGGWGGRGSQNYHQGGQFEQHFQHGGYQYNHSGFGQGRHYTS

SEQ ID NO: 975 - DNA, 3033 bp, Homo sapien
atggcagcccgagtacttataattggcagtggaggaagggaacatacgctggcctggaaacttgcacagtctcatcatgtcaaacaagtgttggttgccccaggaaacgcaggcactgcctgctctgaaaagatttcaaataccgccatctcaatcagtgaccacactgcccttgctcaattctgcaaagagaagaaaattgaatttgtagttgttggaccagaagcacctctggctgctgggattgttgggaacctgaggtctgcaggagtgcaatgctttggcccaacagcagaagcggctcagttagagtccagcaaaaggtttgccaaagagtttatggacagacatggaatcccaaccgcacaatggaaggctttcaccaaacctgaagaagcctgcagcttcattttgagtgcagacttccctgctttggttgtgaaggccagtggtcttgcagctggaaaaggggtgattgttgcaaagagcaaagaagaggcctgcaaagctgtacaagagatcatgcaggagaaagcctttggggcagctggagaaacaattgtcattgaagaacttcttgacggagaagaggtgtcgtgtctgtgtttcactgatggcaagactgtggcccccatgcccccagcacaggaccataagcgattactggagggagatggtggccctaacacagggggaatgggagcctattgtccagcccctcaggtttctaatgatctattactaaaaattaaagatactgttcttcagaggacagtggatggcatgcagcaagagggtactccatatacaggtattctctatgctggaataatgctgaccaagaatggcccaaaagttctagagtttaattgccgttttggtgatccagagtgccaagtaatcctcccacttcttaaaagtgatctttatgaagtgattcagtccaccttagatggactgctctgcacatctctgcctgtttggctagaaaaccacaccgccctaactgttgtcatggcaagtaaaggttatcctggagactacaccaagggtgtagagataacagggtttcctgaggctcaagctctaggactggaggtgttccatgcaggcactgccctcaaaaatggcaaagtagtaactcatgggggtagagttcttgcagtcacagccatccgggaaaatctcatatcagcccttgaggaagccaagaaaggactagctgctataaagtttgagggagcaatttataggaaagacgtcggctttcgtgccatagctttcctccagcagcccaggagtttgacttacaaggaatctggagtagatatcgcagctggaaatatgctggtcaagaaaattcagcctttagcaaaagccacttccagatcaggctgtaaagttgatcttggaggttttgctggtctttttgatttaaaagcagctggtttcaaagatccccttctggcctctggaacagatggcgttggaactaaactaaagattgcccagctatgcaataaacatgataccattggtcaagatttggtagcaatgtgtgttaatgatattctggcacaaggagcagagcccctcttcttccttgattacttttcctgtggaaaacttgacctcagtgtaactgaagctgttgttgctggaattgctaaagcttgtggaaaagctggatgtgctctccttggaggtgaaacagcagaaatgcctgacatgtatccccctggagagtatgacctagctgggtttgccgttggtgccatggagcgagatcagaaactccctcacctggaaagaatcactgagggtgatgttgttgttggaatagcttcatctggtcttcatagcaatggatttagccttgtgaggaaaatcgttgcaaaatcttccctccagtactcctctccagcacctgatggttgtggtgaccagactttaggggacttacttctcacgcctaccagaatctacagccattcactgttacctgtcctacgttcaggacatgtcaaagcctttgcccatattactggtggaggattactagagaacatccccagagtcctccctgagaaacttggggtagatttagatgcccagacctggaggatccccagggttttctcatggttgcagcaggaaggacacctctctgaggaagagatggccagaacatttaactgtggggttggcgctgtccttgtggtatcaaaggagcagacagagcagattctgagggatatccagcagcacaaggaagaagcctgggtgattggcagtgtggttgcacgagctgaaggttccccacgtgtgaaagtcaagaatctgattgaaagcatgcaaataaatgggtcagtgttgaagaatggctccctgacaaatcatttctcttttgaaaaaaaaaaggccagagtggctgtcttaatatctggaacaggatcgaacctgcaagcacttatagacagtactcgggaaccaaatagctctgcacaaattgatattgttatctccaacaaagccgcagtagctgggttagataaagcggaaagagctggtattcccactagagtaattaatcataaactgtataaaaatcgtgtagaatttgacagtgcaattgacctagtccttgaagagttctccatagacatagtctgtcttgcaggattcatgagaattctttctggcccctttgtccaaaagtggaatggaaaaatgctcaatatccacccatccttgctcccttcttttaagggttcaaatgcccatgagcaagccctggaaaccggagtcacagttactgggtgcactgtacactttgtagctgaagatgtggatgctggacagattattttgcaagaagctgttcccgtgaagaggggtgatactgtcgcaactctttctgaaagagtaaaattagcagaacataaaatatttcctgcagcccttcagctggtggccagtggaactgtacagcttggagaaaatggcaagatctgttgggttaaagaggaatga

SEQ ID NO: 976 - protein, 1010 aa, Homo sapien
MAARVLIIGSGGREHTLAWKLAQSHHVKQVLVAPGNAGTACSEKISNTAISISDHTALAQFCKEKKIEFVVVGPEAPLAAGIVGNLRSAGVQCFGPTAEAAQLESSKRFAKEFMDRHGIPTAQWKAFTKPEEACSFILSADFPALVVKASGLAAGKGVIVAKSKEEACKAVQEIMQEKAFGAAGETIVIEELLDGEEVSCLCFTDGKTVAPMPPAQDHKRLLEGDGGPNTGGMGAYCPAPQVSNDLLLKIKDTVLQRTVDGMQQEGTPYTGILYAGIMLTKNGPKVLEFNCRFGDPECQVILPLLKSDLYEVIQSTLDGLLCTSLPVWLENHTALTVVMASKGYPGDYTKGVEITGFPEAQALGLEVFHAGTALKNGKVVTHGGRVLAVTAIRENLISALEEAKKGLAAIKFEGAIYRKDVGFRAIAFLQQPRSLTYKESGVDIAAGNMLVKKIQPLAKATSRSGCKVDLGGFAGLFDLKAAGFKDPLLASGTDGVGTKLKIAQLCNKHDTIGQDLVAMCVNDILAQGAEPLFFLDYFSCGKLDLSVTEAVVAGIAKACGKAGCALLGGETAEMPDMYPPGEYDLAGFAVGAMERDQKLPHLERITEGDVVVGIASSGLHSNGFSLVRKIVAKSSLQYSSPAPDGCGDQTLGDLLLTPTRIYSHSLLPVLRSGHVKAFAHITGGGLLENIPRVLPEKLGVDLDAQTWRIPRVFSWLQQEGHLSEEEMARTFNCGVGAVLVVSKEQTEQILRDIQQHKEEAWVIGSVVARAEGSPRVKVKNLIESMQINGSVLKNGSLTNHFSFEKKKARVAVLISGTGSNLQALIDSTREPNSSAQIDIVISNKAAVAGLDKAERAGIPTRVINHKLYKNRVEFDSAIDLVLEEFSIDIVCLAGFMRILSGPFVQKWNGKMLNIHPSLLPSFKGSNAHEQALETGVTVTGCTVHFVAEDVDAGQIILQEAVPVKRGDTVATLSERVKLAEHKIFPAALQLVASGTVQLGENGKICWVKEE

SEQ ID NO: 977 - DNA, 5726 bp, Homo sapien
tgccatgctgctgcacggacaggatgtgatcactgtgtccaatggaggccgaatcatgcgttcctgggagactaacatcgggggcctgaactgggagataaccctggacagtggcagtttccaggcacttgggctggttggcctgcaggagtctgtaaggtacatcgcagtcctgaagaagactacacttgccctccatcacctctccagtgggcacctcaagtgggtggaacatctcccagaaagtgacagcatccactaccagatggtgtattcttacggctctggggtggtgtgggccctcggagttgttcccttcagccatgtgaacattgtcaagtttaatgtggaagatggagagattgttcagcaggttagggtttcaactccgtggctgcagcacctgtctggagcctgtggtgtggtggatgaggctgtcctggtgtgtcctgacccgagctcacgttccctccaaactttggctctggagacggaatgggagttgagacagatcccactgcagtctctcgacttagaatttggaagtggattccaaccccgggtcctgcctacccagcccaacccagtggacgcttcccgggcccagttcttcctgcacttgtccccaagccactatgctctgctgcagtaccattatggaacgctgagtttgcttaaaaacttcccacagactgccctagtgagctttgccaccactggggagaagacggtggctgcagtcatggcctgtcggaatgaagtgcagaaaagtagcagttctgaagatgggtcaatggggagcttttcggagaagtctagttcaaaggactctctggcttgcttcaatcagacctacaccattaacctatacctcgtggagacaggtcggcggctgctggacaccacgataacatttagcctggaacagagcggcactcggcctgagcggctgtatatccaggtgttcttgaagaaggatgactcagtgggctaccgggctttggtgcagacagaggatcatctgctacttttcctgcagcagttggcagggaaggtggtgctgtggagccgtgaggagtccctggcagaagtggtgtgcctagagatggtggacctccccctgactggggcacaggccgagctggaaggagaatttggcaaaaaggcagatggcttgctggggatgttcctgaaacgcctctcgtctcagcttatcctgctgcaagcatggacttcccacctctggaaaatgttttatgatgctcggaagccccggagtcagattaagaatgagatcaacattgacaccctggccagagatgaattcaacctccagaagatgatggtgatggtaacagcctcaggcaagctttttggcattgagagcagctctggcaccatcctgtggaaacagtatctacccaatgtcaagccagactcctcctttaaactgatggtccagagaactactgctcatttcccccatcccccacagtgcaccctgctggtgaaggacaaggagtcgggaatgagttctctgtatgtcttcaatcccatttttgggaagtggagtcaggtagctcccccagtgctgaagcgccccatcttgcagtccttgcttctcccagtcatggatcaagactacgccaaggtgttgctgttgatagatgatgaatacaaggtcacagcttttccagccactcggaatgtcttgcgacagctacatgagcttgccccttccatcttcttctatttggtggatgcagagcagggacggctgtgtggatatcggcttcgaaaggatctcaccactgagctgagttgggagctgaccattcccccagaagtacagcggatcgtcaaggtgaaggggaaacgcagcagtgagcacgttcattcccagggccgtgtgatgggggaccgcagtgtgctctacaagagcctgaaccccaacctgctggccgtggtgacagagagcacagacgcgcaccatgagcgcacctttattggcatcttcctcattgatggcgtcactgggcgtatcattcactcctctgtgcagaagaaagccaaaggccctgtccatatcgtgcattcagagaactgggtggtgtaccagtactggaacaccaaggctcggcgcaacgagtttaccgtactggagctctatgagggcactgagcaatacaacgccaccgccttcagctccctggaccgcccccagctgccccaggtcctccagcagtcctatatcttcccgtcctccatcagtgccatggaggccaccatcaccgaacggggcatcaccagccgacacctgctgattggactaccttctggagcaattctttcccttcctaaggctttgctggatccccgccgccccgagatcccaacagaacaaagcagagaggagaacttaatcccgtattctccagatgtacagatacacgcagagcgattcatcaactataaccagacagtttctcgaatgcgaggtatctacacagctccctcgggtctggagtccacttgtttggttgtggcctatggtttggacatttaccaaactcgagtctacccatccaagcagtttgacgttctgaaggatgactatgactacgtgttaatcagcagcgtcctctttggcctggtttttgccaccatgatcactaagagactggcacaggtgaagctcctgaatcgggcctggcgataaagaacaaagactgtgcctaaaagtggagagccaggggagtgtgggtcagataagcagctacagctgcagtttggtggattggtggagtatgtgtgtgtgtcagtgctcagctaagaactgtagggaagatggatgaccttcacgcagaactccttttgggatatacatgatgcagaaaggatcctacatggagagagacagaactctctcagctgacactctcagagattcctgatgggctttctcttgaagtccaaaggcgtctgcattgtttcctttctttgcccatccatgaatgttctgttttgttttttttaataagaattccggctgatttttgtgaggcctgtttaaattgactttactttgccttttgtgtttctcaattttatctagaaatctttctgactttttccatctcttgcttcaaagtaagaggggaactctccttgccgactccaccttataggtacatttggtgttttgcactgggaagaaataggatccatccttagctgaggcttgaggactgatccagcctctcatggcttccctccaaagtaacttagggttgagggatctatatgtgatgtcaaaacttactttaaacctctagtttcgtgctgtcatttattaggctgggccaccaaatctttgtttcaatttatcagaagccaagtgcatactagcgtcttgtttgttgcccattgcctatacttttcacctgagatgtgtgagttggggccttttaaaaactactgaattgtctgagccttgaagacatttccagggagaagagataatctctcatttcacccacaggctggtctaatcataacctagttaaagatgtccttgtttaagaaccccattatttatttttagtttttaatataaattaacatgtgggtcattatatttctccttaaatgaggaaattttaaattttattgatctaacctttgaagctttaaaaaaggagaaagagggtaggggtgggaaactggcatactgtgtgtatagcactgccgattggctaggccactgtgtctctgctacaaattaaagaaatcctaaaagttttccttggtcatagagttggggaatgacagaatttttctttgttgtgaaatgtatgtacagagtagaccatctctagccctgtggtgaaagaggtacactcgaatgtttgcataaagcaagtgacaaatgacactgtttaagtcctcttttgtgtcttagaagatcattttgaggctattttcacattagaggggataaaagcagtgaagacatggagtaagtgtattttattttagtaaggaaaggtcagtttaatcatatatgggttggttaggttatctaaaaatttgtcatctttctatggtcatatgctgatggtagattatggcagagaaggaagaggaaatgacaaccattttattaattgtcagtttgatattgagtgactgaatgtctaagaatctccagaaaaaaacaggcatctatcatcctgacccaaggcatattttaacataacctgggagaagagagttaagtacaagttaaaaaaaattctgccctagttttgagaaagcctggctggaattctgactgtcttacatacatatgtgcaaggttagcctgcaagattctagtttttatttaccagtgtgccagaatctgaaacaagctactgggagggaaggtatttgtcctttagtaaaattccctgtatttcagctgtaatcaaagttacctcaaagcaggtgctttttttttttttgagaccctggctcaaaaacaaaaacaaaaactagtttgttttagtattcattaattacgtatatgagcactggtagtctagtgtttgttcttgtatacagtgttttcttaaatgagatgatgctatttaattctgttacttgttttttcaactaatggatcttttaaagttttttatttaaattttttgtgggtacatattaggtacatatacttatggggtacatgagatgtttttataaaggctcagctaatgtatcttgaatatcatgtattcataaagatgactgaaatagtttctggaacaaagtctgatagaaaaaatactcaattcctaatttaagtgttagagactttaatgtaagctatctaatctgaactagtttcattatttgtgtgtgggtacatgttatgtgctccgtaaggcatctttcaatttgaaaatttcataattgtaatttcactgcctttataaattgcttttttttggaggcagggtctctgtcacccaggctggagagcagtggcacagtcatagctcactgcagcctcgaacacctgggctgaagtgatcctccctccttagcctcccaaagtgccgggattacaggcatgagctactgcacctggcccataaattgtcatacttttaaagagcctattacacaaagtatcatcagaatcatcccaagactcatttcctgattcctaattatttaaaattttgcttttaggcgaggcatggtggctcaagcctatggtcccagcactttgggaggccaaggcaggcagatcatttgaggtcaggagtttgggaccagcctggccaacatggtgaaacctgaaaccccatctctaccaaaaaaatggaaaaatttagccaggtgtggtggtgcatgcctgtaatcccagcctcccgagtagctggggctcaggcgtgcgccaccatgcccggctaatttttgtatatttatggaaatgccaagagatagttcaatctgcctctctggcaagccatggacaccaggtctgacaaactctcttactccttaagacaaatgctcacctgatcaatatggggaaataagctgcatggtaccataatttctattctaaaagggaaaagtatctctttggtattgctttggaaaacattctttataactatcttgctatttaaaaattgacaattatccttccataattaaaacaggtagacaac

SEQ ID NO: 978 - protein, 905 aa, Homo sapien
AMLLHGQDVITVSNGGRIMRSWETNIGGLNWEITLDSGSFQALGLVGLQESVRYIAVLKKTTLALHHLSSGHLKWVEHLPESDSIHYQMVYSYGSGVVWALGVVPFSHVNIVKFNVEDGEIVQQVRVSTPWLQHLSGACGVVDEAVLVCPDPSSRSLQTLALETEWELRQIPLQSLDLEFGSGFQPRVLPTQPNPVDASRAQFFLHLSPSHYALLQYHYGTLSLLKNFPQTALVSFATTGEKTVAAVMACRNEVQKSSSSEDGSMGSFSEKSSSKDSLACFNQTYTINLYLVETGRRLLDTTITFSLEQSGTRPERLYIQVFLKKDDSVGYRALVQTEDHLLLFLQQLAGKVVLWSREESLAEVVCLEMVDLPLTGAQAELEGEFGKKADGLLGMFLKRLSSQLILLQAWTSHLWKMFYDARKPRSQIKNEINIDTLARDEFNLQKMMVMVTASGKLFGIESSSGTILWKQYLPNVKPDSSFKLMVQRTTAHFPHPPQCTLLVKDKESGMSSLYVFNPIFGKWSQVAPPVLKRPILQSLLLPVMDQDYAKVLLLIDDEYKVTAFPATRNVLRQLHELAPSIFFYLVDAEQGRLCGYRLRKDLTTELSWELTIPPEVQRIVKVKGKRSSEHVHSQGRVMGDRSVLYKSLNPNLLAVVTESTDAHHERTFIGIFLIDGVTGRIIHSSVQKKAKGPVHIVHSENWVVYQYWNTKARRNEFTVLELYEGTEQYNATAFSSLDRPQLPQVLQQSYIFPSSISAMEATITERGITSRHLLIGLPSGAILSLPKALLDPRRPEIPTEQSREENLIPYSPDVQIHAERFINYNQTVSRMRGIYTAPSGLESTCLVVAYGLDIYQTRVYPSKQFDVLKDDYDYVLISSVLFGLVFATMITKRLAQVKLLNRAWR

SEQ ID NO: 979 - DNA, 732 bp, Homo sapien
agaaaatgaatgttagaaggtgcctgccgaggcgggacagagtgtttgctcgcgctggagaaggctctgctcagccctgagagtcccttcctgccccaccgatactggcactttaaaaaggaagctgaccgcacagtgtccagacgaattggcccccagaagatggggagttctgtcctgcccttctgtgtctgcgtgacctcacccagcctaggagggaggtgcattcagggtagatttgcctctcattcaaagttctggggctttgggcggaaaacagccagctttggcgctgttggggagactcctccagaccaggaaccccagaaggagacagagcctgccacatcctcccacgccaggccctgggccagggtgattggactgagaatttggccacaaccaaattgatgctggctggaaccagaggccagaaagcctggccttgtccccatgtgggagccctgtcctcagccctcttgtccccttgagctcagtgaattcccaccaggtgcccacagctcctggacttcaaattctatatattgagagagttggagagtatatcagagatatttttggaaaggagttggtctatgcaatgtcagtttggaatcttcttgaaagtttaatgtttttattaggagatttaaagaaaataaaggtctacaatatcaaaaaaaaaaaaaaaaaaaaaaaaaaaaaaaaaaaaaaaaaaaaaaaaaaaaaaaa

SEQ ID NO: 980 - protein, 82 aa, Homo sapien
MGSSVLPFCVCVTSPSLGGRCIQGRFASHSKFWGFGRKTASFGAVGETPPDQEPQKETEPATSSHARPWARVIGLRIWPQPN

SEQ ID NO: 981 - DNA, 654 bp, Homo sapien
gcggctcagtgcgtgaggttggcgcggcgcagtcttcctgctttggcgttgtctctcaggccatctccccggttgttgtgcacagccacgaaacaaaagaacagtggccagaacctggaagaggacatgggtcagagtgaacagaaggcagatcctcctgctacagagaagaccctcctggaagagaaggtcaagttggaggaacagctgaaggagactgtggaaaaatataaacgagctttggcagacactgagaacttacggcagaggagccagaaattggtggaggaggcaaaattatacggcattcaagccttctgcaaggacttgttggaggtggcagacgttctggagaaggcaacacagtgtgttccaaaagaagaaattaaagacgataaccctcacctgaagaacctctatgaggggctggtcatgactgaagtccagatccagaaggtgttcacaaagcatggcttgctcaagttgaaccctgtcggagccaagttcgacccttatgaacatgaggccttgttccacacaccggttgaggggaaggagccaggcacagtggccctagttagcaaagtggggtacaagctgcatgggcgcactctgagacccgccctggtgggggtggtgaaggaagcttagctg

SEQ ID NO: 982 - DNA, 1524 bp, Homo sapien
agcgggctgggtgcgtgcgcggcgactgcgacgggcagtggcagtcatggcggctcagtgcgtgaggttggcgcggcgcagtcttcctgctttggcgttgtctctcaggccatctccccggttgttgtgcacagccacgaaacaaaagaacagtggccagaacctggaagaggacatgggtcagagtgaacagaaggcagatcctcctgctacagagaagaccctcctggaagagaaggtcaagttggaggaacagctgaaggagactgtggaaaaatataaacgagctttggcagacactgagaacttacggcagaggagccagaaattggtggaggaggcaaaattatacggcattcaagccttctgcaaggacttgttggaggtggcagacgttctggagaaggcaacacagtgtgttccaaaagaagaaattaaagacgataaccctcacctgaagaacctctatgaggggctggtcatgactgaagtccagatccagaaggtgttcacaaagcatggcttgctcaagttgaaccctgtcggagccaagttcgacccttatgaacatgaggccttgttccacacaccggttgaggggaaggagccaggcacagtggccctagttagcaaagtggggtacaagctgcatgggcgcactctgagacccgccctggtgggggtggtgaaggaagcttagctgctgttgatggggtgggtgtttttaaactcacttgatgtaactctcaaggctggttcattgtttctcatctatgagtacgtgtgaccttttcccaaaccttattggaaaccttaagtaaccagtggctaaacagaaaagccggttgcccaactgcattaatgaactctaattcgggagtctgttcccttttagtgccacgcgttgaatagttccacatactttcagaagagctcagcagggccctgcctggtctcccgagcatcatgagtaacgtgtctgctcagactctgctgacaccaaagtattttaaacaaataaaaggtcttggggaattctgtttggctacctgggcacgccagtctgcaccatgtgtccctgcggcgcatgagtgactggcgtatttagcccgtcacatttcattcgctgaaggaaaggcaagagagttgaaacatttttcttacttaaaaaaaatgatctttgtgaagaacatagtgagttcgtttgtcttcagtcaacagcggctgaaactgaccactgagaaatgggtgtgggcactgacagttctcccccattatttggccaggaattgagcttggcttggcaaagttccttttaccctgttctgttcatctaaatgcagacatatttaaatcatattcaactagttactaatgacctcaagttgtattccctggcaaaatggactttctcaaaataggactgcacgcttggtgtactttaaatgttaatgtttaatttaaaatttttatttaagaggattaaagccctaatgtttattttcctacaaaaaaaaaaaaaaa

SEQ ID NO: 983 - protein, 217 aa, Homo sapien
MAAQCVRLARRSLPALALSLRPSPRLLCTATKQKNSGQNLEEDMGQSEQKADPPATEKTLLEEKVKLEEQLKETVEKYKRALADTENLRQRSQKLVEEAKLYGIQAFCKDLLEVADVLEKATQCVPKEEIKDDNPHLKNLYEGLVMTEVQIQKVFTKHGLLKLNPVGAKFDPYEHEALFHTPVEGKEPGTVALVSKVGYKLHGRTLRPALVGVVKEA

SEQ ID NO: 984 - DNA, 2513 bp, Homo sapien
gggggagagggggctcaaggcgagcgcgccgggcagttgcgggcgcgtggctgctgaggttggcggcggtgccgcgcgcccgacgggccggtggttgcggggcctcccgcctcgacccgggctgggggcagccgtggcggccgccggggaccgcaaggggcggaggaaaggagggggccggtcccggcacgcagaggagcagccgaccatgccccgagacaacatggcctccttgatccaacggatcgcccgccaggcttgcctcaccttccggggcagctggggcggccgcggcgcttccgatcgcgacgcggcttctggcgcggaggcgccgatgcagccgggcttccccgagaacctgagcaagctgaagagcctcctgacccagctccgcgccgaggacttgaacatcgccccgcgcaaggccacactgcagccgctgccgcccaacctgccgccagtcacctacatgcacatctacgagacggacggcttcagcctgggcgtgttcctgctcaagagcggcacgtccatcccgctgcacgaccacccgggcatgcacggcatgctcaaggtgctgtacggcaccgtgcgcatcagctgcatggacaagctagacgcgggcggcgggcaacggccgcgggccttgccgcccgagcagcagttcgagccgccgctgcagccccgggagcgagaagccgtgcggccgggcgtgctgcgttcgcgggccgagtacaccgaggccagcggcccctgcatcctcacaccgcaccgggacaacctgcaccagatcgacgccgtggaagggcctgccgccttcctggacatcctggccccgccctacgacccggacgatggccgggactgccactattaccgggtgctggagccggtcaggcccaaggaggcctccagctcggcctgtgacctgcctcgagaggtgtggctcctggagaccccacaggccgatgacttctggtgcgagggagaaccctatccaggtcccaaggtcttcccttgaagccactggcgcccaggagcggtgggccgaagacgtgccctaccctaccacaagggctgtgtctctaccccctagcctgggcgttggatctactggaatgagcagcagccgcttcctcggcagccttgggaagcacgggcgactggacagcagccgccgggcacggttatgggggcggggtgggcggggaggctagattgtttcctggtactgtcactgccactggggctttgatttggaggaatggggcaggggactatctgaagcgcttccatcctaaagccataatgaaaatatcttcctctcttccccattctatacaaaatactaagtggttttcttgctcccactccctaccccttagttaaatagggtttattttccactcatgcccttatgcctttttttcttatagttttttaacttattgactgtgcatgacccagtggtttgaattgtttttagttcaagtcattggtaaaaactaggtttaaggagatgagctactgtttaaagtgagctggcctgcctaattaattccttgtgaaaactaaatgattttttcagtttggggatcattctcacaacataactatgcatgtagaggacaagatttattttctttcctccctttgcccagtagccacatctggtttactcaggcagcatctactaagaaattcagcacctgcatatctctgtgacatggtcacttagagcttatcttccctatgaatctccagatctgtgagtcgagcagatttcatgttgcagattcacctttaatgcaaagactgtattatcctcacatgactttttttcttgtcttactgtaccttaaaaggtgatagagtaattctgtattttctaacgggaagattcaaaggagctgaatgtgttatgcttccaaacaactgaatgtaaaacactcctagccagttgttgcattccctatatttatttacttccaatattttactgtaaaagtagggagaaatattatgttgatagttgtttcatattctctcaggaactttaatgttcccgactcgggtgattccagctgtgttgctggcagtgttgtctcaaccctctccctaaaatgactgagccctgggttcatctaatgtggttttccttaggaagagatagaaggcacagaagatcacagctagagaattgagaattaactatactactagccattttagggcaccaaaacttgggattaaacacttcctacttcccactcccaactcctgaaatgaagtcttgctatctgtgactagttttatttttgtgcttttaatagtccgagcagtcttaccttgtttacacatgtattgacaccatttgcttcaggccatggagcactgtttctcccttttttactatttataggattccgttttttcacaagacttttaataaaaagaaattgtagaaataaacacattaaaataaaaaaaaaaaaaaaaaaaaaaaaaaaaaa

SEQ ID NO: 985 - protein, 228 aa, Homo sapien
MQPGFPENLSKLKSLLTQLRAEDLNIAPRKATLQPLPPNLPPVTYMHIYETDGFSLGVFLLKSGTSIPLHDHPGMHGMLKVLYGTVRISCMDKLDAGGGQRPRALPPEQQFEPPLQPREREAVRPGVLRSRAEYTEASGPCILTPHRDNLHQIDAVEGPAAFLDILAPPYDPDDGRDCHYYRVLEPVRPKEASSSACDLPREVWLLETPQADDFWCEGEPYPGPKVFP

SEQ ID NO: 986 - DNA, 3335 bp, Homo sapien
ccctcttccgtgtgggccctccctgtcccctctctgtcacctcacagtagtcgttgccggtagcgggtgtgggggcgcgagcagcgcagggcggcctctcccccacccctacagcccgggcccgggctcggtccccccctctccctccgcttcgcactcccgtcgggtacgggaaggtccaagccgctgccgggtgcccgagggccgtcgtggccgccgtcgccacgggtcccaatggagccgccgaatctctatccggtgaagctctacgtgtacgacctgtccaaaggcctggcccggcggctcagccccatcatgctggggaaacaactggaaggcatctggcacacatccatagttgtgcacaaggatgagttcttcttcggcagtggtggtatctccagctgccccccgggagggacattgcttgggcctccagactctgtggttgatgtggggagtacagaagtcacagaagaaatctttctggagtacctctcctccctgggggagtccctgttccgaggtgaggcctacaacctctttgaacacaattgtaacaccttcagcaacgaagtggcacagttcctgactgggcggaagattccttcttacatcacagacctgccctctgaagttctctccacgccctttggacaggcacttcggcccctcctggactccattcagatccagcctccaggagggagctccgtgggcagacccaacggccagagctaacaggactgcctgggaccgccctgcctcaccagggcttttcctttttaaacaaaacaaaccctaccagatttctattttataattttacatcagagctaacaaccaggggacggctttttaaatttcccagggaaggagaccgtcaggccgcatgtagacaatgctgctaagaaacagaacaaaatgccaccccttctaatagtattatactaatttattaaggctgtcttgtctgtgcgttcacttcggatgctgtttcctaagcgtcctccacactggagaaagggaggggctttgtttaaacagaaagcgagtcacagtttgcgggagccccaacctagaactctttccagagaacactcacgctctacccaagttgccaacacctgtgggacccaggtgagttttagaacatccgtgacccagaaagttactctagtgttaaatgaaccaaaggatttggtgtacatgggaccggtttcaggatgactaacctaacctaagtgaactctttagccacaaccctcaccttccctcccttaccccaagcaaggccagtgctggagcagccattgcctccggatcaagggagtaacagcaagtatcaggccggagaaaacaggataaagccattcctccttccacctagatggattgccaatcttctgccatcaattttgggaaacctgcctttgtgcccccgaggctgcctttcctcagcatagctgacttgtcatagtggatgaggtctgggctggagcagtagaagccaaggccttttttctgcaagtaatgatgtaggttatttgcagtctctgtaaccaccatccaggccagtacgcagtatttagctggggaccaagggatgggattccctactctaagaaaatacctttattttaattattattattttttgagacggagtctcgctctaccacccaggctggtgtgcagtggcatgatcccgggaggcagagattgcgatgagccgagatcgtaccagtgcactccagcctgggcgacagagtgagactccatctcaaaaaaataaaataatgaagtggaatcaaggtggcaagaaaatttagaatcgtttctgatagggactttcccttatcctaaatgtgttttgaaggcacacgttatttccattgtcattctgactttagaaaggcaggttggggcatgagtgggcattttcctaatgacttgctgctaggaggttataggcagggaacagtctgggagtctctaatccagagagactttcagattccctctcttcacatgaacctccattagttagattttgggaaagtgagcatgaagaagggactcagagctgccaggtacccgagtctcaggtctgacatccttgggccccttctgccacaacttcttgccacttcacggacttgaattatgttgcttcttcctggaagtctggcctgcagcacaggcctttcctctccaaaaagctgctgctcatttctggccccatctgctgctatctttgccatcagccatcacagtttggcatcatcagagtctcagctagaggagctgtcattctgccttagtgtttgcctgcgacctgaccaggggcatgaccagctgggatgtcaagtgacatttgggaacttgtagaggccaaatgattgaaagtttaattcttctcaagacccactgatttgccagtgtgcatggaaataatagattagagcagaaactagcagggactgttgtataatcgtgatctactagcagaattgggcccaaagagaaagaatttctgaggctgggtttcttctgggagggtagcaggttggtcttggccagtgctctgtttcccaccagtgttgttcccttttccagcttgcctggcccggctctgtcttccagggtcctgctccagacccctctgcctggggtctcccctccatccagggggttctgggcatcacagctccttttttttcctttctcctcttccagatccagtttcagctggtttgcttcttccagcaggcacccttaggcccaggagcagctcccctgagagaatttgagtcactcatttccttgaacagcacccccctttatactagcagccatttgtgccattgcctgtgccctagggtttgtggggagagagcgagggatcactgagcagttttcccagagctccatgggaaggcaagctctccctcccaatgggagccccactgtcactaactgtaaactcaggctcaggcttcaactgcctacccccatcctcatatttctgtctgtcccagcacctcaggagcattctcattgtggccggctaactccgcctggatgtgaacaggcaagcacagtgggaaatgagtcacgtacttgtattgcacagtggacacctctagaggtccattggtttaaagggatagggaaggaggagggatgagaccatcaccccctcccagaagtaaatctagtatctgagttttctttatgcccttgagtcaaactaataactgtctagtacggaggtgtttgctggttttcttcggtgttttttctaatgcaataaactcatttctgcctgctcg

SEQ ID NO: 987 - protein, 86 aa, Homo sapien [sequence omitted]

SEQ ID NO: 988 - DNA, 2077 bp, Homo sapien
ggcacgaggcttacagtatgtttcagaagtggaaataattaatgaccgaacagaaacccctcctcccctagcttcactcaatgttagtaagcttgccagcaaagcacggacagagaaggaggagaagctgagccaggcctatgcaatcagtgctggtgtctctctagagggccagcagctcttccagaccattcacaagaccattaaagactgtaaatggcaagaaaaaaacatcgtagtcatggaagaagttgttattacacccccatatcaagtggaaaactgtaaaggcaaagaggggagtgcactgagccatgtacgcaaaatagttgaaaaacattttagagacgtggaaagccaaaagatactgcaacgttcacaagcccagcaaccacagaaggaggctgccctgtcatcctgagtccgtacacatggaggactcttccagcatccagccaaggaggcgctggtggtggcttcagcggaggcaggccgggggagggaagggatcctatatgtcctgttggctcttaacaaagggtcagcatttccaaatcttagacttgaacaaacaaaacacccaacaaaaaagaacaagagaataatttaaaagttgaatcattacttgactaacagacttcggtccaccatgtccttttcacagccctcttctggaacagtcaccttgttaattttatttttgaaaattattttcccactctgccctttacttctgactttcctttcctagtttgttcctgccattctgtttttataagtggctacacttgccttctgaatgattgaaagaaacttttacatcttttcttccaaaataaaagtaacaagctgactgtgattcttaaattgagaccagagcagcaaacgtctcactttaaatttttgttttcttttccttttttttcttttttctttttttttttgcacagggcatggcttgaattagttttatttttcttaactttaaatatatatatgaaaatatatattaaaatgttctctaaatattttctgcttcttgcaggtctctttttactagatcatggctgttcttcccacctcatccctctgaaaataaaaatgtattgccctccccaccatccatcatagccaggccactaacttgacttggtgcaagagattcttgctgcgaactttgtagagccagtgtgcagatagaatttggctttgagggttcctgatggctttttagtctttaactgtgtgtgtaccagtctcacatttggcccaaacctcaggattctccctctgcctgtcttacttcatggtactagaagaccttcctcgccactctctccacatgagagagtcagctgccctttctcctgtgcctctgcaggaagaactctcttgcatggcacatctcagctcctcattgagggatagttttctttgataagaaacctggagtccatttactctgacctctctttaaatctatatccagagccactagcccaggaaaaacttgggtgacccgtaatttctcttctcctgctgtccttttgctcttacgccccaccccaactccccttaaattttacaggcttatgacagtttgtatgtgctcagccaatgagcagaaaacctggaaagaatttctggactttagcccaccagtttgtctggttgactaacctgctgagagctaaaattggcacccattgccccgtgccttcaggcagtctcctggggcagagtatgccaccatccgaatatcaggcactgagtgggatgtgggtgatgctcacatgactggctagagctttgggggtggggtgggggttaactactatttttttggccatgatctctttccccttccttttttttttaattaaataaatggatcaaattaaataattcaagccctgccttcaaaatgaaatttttttttagtattatttagcaaaaacaataaaacccaaatttttttaaccatcaaaaaaaaaaaaaaaaaaaaaaaaaaaaaaaaaaaaaaaaaaaaaaaaaaaaaaaaaaaaaaaaaaaaaaaaaaaaaaaaaaaaaaaaaaaa

SEQ ID NO: 989 - DNA, 11043 bp, Homo sapien
  Unsure 6964-6995: Unknown base
ttgctgcgtcaactgtgttccctttggcctggctgagtttgatactgtggggattcagtttaggcgctggcccgaggatatcccagcggtggtacttcggagacacctgtctgcatctgactgagccggctctcctggcctcgcgctgcacattctctcctggcggcggcgccacctgcagtagcgttcgcccgaacatggcgacacggagcagcaggagggagtcgcgactcccgttcctattcaccctggtcgcactgctgccgcccggagctctctgcgaagtctggacgcagaggctgcacggcggcagcgcgcccttgccccaggaccggggcttcctcgtggtgcagggcgacccgcgcgagctgcggctgtgggcgcgcggggatgccaggggggcgagccgcgcggacgagaagccgctccggaggaaacggagcgctgccctgcagcccgagcccatcaaggtgtacggacaggttagtctgaatgattcccacaatcagatggtggtgcactgggctggagagaaaagcaacgtgatcgtggccttggcccgagatagcctggcattggcgaggcccaagagcagtgatgtgtacgtgtcttacgactatggaaaatcattcaagaaaatttcagacaagttaaactttggcttgggaaataggagtgaagctgttatcgcccagttctaccacagccctgcggacaacaagcggtacatctttgcagacgcttatgcccagtacctctggatcacgtttgacttctgcaacactcttcaaggcttttccatcccatttcgggcagctgatctcctcctacacagtaaggcctccaaccttctcttgggctttgacaggtcccaccccaacaagcagctgtggaagtcagatgactttggccagacctggatcatgattcaggaacatgtcaagtccttttcttggggaattgatccctatgacaaaccaaataccatctacattgaacgacacgaaccctctggctactccactgtcttccgaagtacagatttcttccagtcccgggaaaaccaggaagtgatccttgaggaagtgagagattttcagcttcgggacaagtacatgtttgctacaaaggtggtgcatctcttgggcagtgaacagcagtcttctgtccagctctgggtctcctttggccggaagcccatgagagcagcccagtttgtcacaagacatcctattaatgaatattacatcgcagatgcctccgaggaccaggtgtttgtgtgtgtcagccacagtaacaaccgcaccaatttatacatctcagaggcagaggggctgaagttctccctgtccttggagaacgtgctctattacagcccaggaggggccggcagtgacaccttggtgaggtattttgcaaatgaaccatttgctgacttccaccgagtggaaggattgcaaggagtctacattgctactctgattaatggttctatgaatgaggagaacatgagatcggtcatcacctttgacaaagggggaacctgggagtttcttcaggctccagccttcacgggatatggagagaaaatcaattgtgagctttcccagggctgttcccttcatctggctcagcgcctcagtcagctcctcaacctccagctccggagaatgcccatcctgtccaaggagtcggctccaggcctcatcatcgccactggctcagtgggaaagaacttggctagcaagacaaacgtgtacatctctagcagtgctggagccaggtggcgagaggcacttcctggacctcactactacacatggggagaccacggcggaatcatcacggccattgcccagggcatggaaaccaacgagctaaaatacagtaccaatgaaggggagacctggaaaacattcatcttctctgagaagccagtgtttgtgtatggcctcctcacagaacctggggagaagagcactgtcttcaccatctttggctcgaacaaagagaatgtccacagctggctgatcctccaggtcaatgccacggatgccttgggagttccctgcacagagaatgactacaagctgtggtcaccatctgatgagcgggggaatgagtgtttgctgggacacaagactgttttcaaacggcggaccccccatgccacatgcttcaatggagaggactttgacaggccggtggtcgtgtccaactgctcctgcacccgggaggactatgagtgtgacttcggtttcaagatgagtgaagatttgtcattagaggtttgtgttccagatccggaattttctggaaagtcatactcccctcctgtgccttgccctgtgggttctacttacaggagaacgagaggctaccggaagatttctggggacacttgtagcggaggagatgttgaagcgcgactggaaggagagctggtcccctgtcccctggcagaagagaacgagttcattctgtatgctgtgaggaaatccatctaccgctatgacctggcctcgggagccaccgagcagttgcctctcaccgggctacgggcagcagtggccctggactttgactatgagcacaactgtttgtattggtccgacctggccttggacgtcatccagcgcctctgtttgaatggaagcacagggcaagaggtgatcatcaattctggcctggagacagtagaagctttggcttttgaacccctcagccagctgctttactgggtagatgcaggcttcaaaaagattgaggtagctaatccagatggcgacttccgactcacaatcgtcaattcctctgtgcttgatcgtcccagggctctggtcctcgtgccccaagagggggtgatgttctggacagactggggagacctgaagcctgggatttatcggagcaatatggatggttctgctgcctatcacctggtgtctgaggatgtgaagtggcccaatggcatctctgtggacgaccagtggatttactggacggatgcctacctggagtgcatagagcggatcacgttcagtggccagcagcgctctgtcattctggacaacctcccgcacccctatgccattgctgtctttaagaatgaaatctactgggatgactggtcacagctcagcatattccgagcttccaaatacagtgggtcccagatggagattctggcaaaccagctcacggggctcatggacatgaagattttctacaaggggaagaacactggaagcaatgcctgtgtgcccaggccatgcagcctgctgtgcctgcccaaggccaacaacagtagaagctgcaggtgtccagaggatgtgtccagcagtgtgcttccatcaggggacctgatgtgtgactgccctcagggctatcagctcaagaacaatacctgtgtcaaagaagagaacacctgtcttcgcaaccagtatcgctgcagcaacgggaactgtatcaacagcatttggtggtgtgactttgacaacgactgtggagacatgagcgatgagagaaactgccctaccaccatctgtgacctggacacccagtttcgttgccaggagtctgggacttgtatcccactgtcctataaatgtgaccttgaggatgactgtggagacaacagtgatgaaagtcattgtgaaatgcaccagtgccggagtgacgagtacaactgcagttccggcatgtgcatccgctcctcctgggtatgtgacggggacaacgactgcagggactggtctgatgaagccaactgtaccgccatctatcacacctgtgaggcctccaacttccagtgccgaaacgggcactgcatcccccagcggtgggcgtgtgacggggatacggactgccaggatggttccgatgaggatccagtcaactgtgagaagaagtgcaatggattccgctgcccaaacggcacttgcatcccatccagcaaacattgtgatggtctgcgtgattgctctgatggctccgatgaacagcactgcgagcccctctgtacgcacttcatggactttgtgtgtaagaaccgccagcagtgcctgttccactccatggtctgtgacggaatcatccagtgccgcgacgggtccgatgaggatgcggcgtttgcaggatgctcccaagatcctgagttccacaaggtatgtgatgagttcggtttccagtgtcagaatggagtgtgcatcagtttgatttggaagtgcgacgggatggatgattgcggcgattattctgatgaagccaactgcgaaaaccccacagaagccccaaactgctcccgctacttccagtttcggtgtgagaatggccactgcatccccaacagatggaaatgtgacagggagaacgactgtggggactggtctgatgagaaggattgtggagattcacatattcttcccttctcgactcctgggccctccacgtgtctgcccaattactaccgctgcagcagtgggacctgcgtgatggacacctgggtgtgcgacgggtaccgagattgtgcagatggctctgacgaggaagcctgccccttgcttgcaaacgtcactgctgcctccactcccacccaacttgggcgatgtgaccgatttgagttcgaatgccaccaaccgaagacgtgtattcccaactggaagcgctgtgacggccaccaagattgccaggatggccgggacgaggccaattgccccacacacagcaccttgacttgcatgagcagggagttccagtgcgaggacggggaggcctgcattgtgctctcggagcgctgcgacggcttcctggactgctcggacgagagcgatgaaaaggcctgcagtgatgagttgactgtgtacaaagtacagaatcttcagtggacagctgacttctctggggatgtgactttgacctggatgaggcccaaaaaaatgccctctgcatcttgtgtatataatgtctactacagggtggttggagagagcatatggaagactctggagacccacagcaataagacaaacactgtattaaaagtcttgaaaccagataccacgtatcaggttaaagtacaggttcagtgtctcagcaaggcacacaacaccaatgactttgtgaccctgaggaccccagagggattgccagatgcccctcgaaatctccagctgtcactccccagggaagcagaaggtgtgattgtaggccactgggctcctcccatccacacccatggcctcatccgtgagtacattgtagaatacagcaggagtggttccaagatgtgggcctcccagagggctgctagtaactttacagaaatcaagaacttattggtcaacactctatacaccgtcagagtggctgcggtgactagtcgtggaataggaaactggagcgattctaaatccattaccaccataaaaggaaaagtgatcccaccaccagatatccacattgacagctatggtgaaaattatctaagcttcaccctgaccatggagagtgatatcaaggtgaatggctatgtggtgaaccttttctgggcatttgacacccacaagcaagagaggagaactttgaacttccgaggaagcatattgtcacacaaagttggcaatctgacagctcatacatcctatgagatttctgcctgggccaagactgacttgggggatagccctctggcatttgagcatgttatgaccagaggggttcgcccacctgcacctagcctcaaggccaaagccatcaaccagactgcagtggaatgtacctggaccggcccccggaatgtggtttatggtattttctatgccacgtcctttcttgacctctatcgcaacccgaagagcttgactacttcactccacaacaagacggtcattgtcagtaaggatgagcagtatttgtttctggtccgtgtagtggtaccctaccaggggccatcctctgactacgttgtagtgaagatgatcccggacagcaggcttccaccccgtcacctgcatgtggttcatacgggcaaaacctccgtggtcatcaagtgggaatcaccgtatgactctcctgaccaggacttgttgtatgcaattgcagtcaaagatctcataagaaagactgacaggagctacaaagtaaaatcccgtaacagcactgtggaatacacccttaacaagttggagcctggcgggaaataccacatcattgtccaactggggaacatgagcaaagattccagcataaaaattaccacagtttcattatcagcacctgatgccttaaaaatcataacagaaaatgatcatgttcttctgttttggaaaagcctggctttaaaggaaaagcattttaatgaaagcaggggctatgagatacacatgtttgatagtgccatgaatatcacagcttaccttgggaatactactgacaatttctttaaaatttccaacctgaagatgggtcataattacacgttcaccgtccaagcaagatgcctttttggcaaccagatctgtggggagcctgccatcctgctgtacgatgagctggggtctggtgcagatgcatctgcaacgcaggctgccagatctacggatgttgctgctgtggtggtgcccatcttattcctgatactgctgagcctgggggtggggtttgccatcctgtacacgaagcaccggaggctgcagagcagcttcaccgccttcgccaacagccactacagctccaggctggggtccgcaatcttctcctctggggatgacctgggggaagatgatgaagatgcccctatgataactggattttcagatgacgtccccatggtgatagcctgaaagagctttcctcactagaaaccaaatggtgtaaatattttatttgataaagatagttgatggtttattttaaaagatgcactttgagttgcaatatgttatttttatatgggccaaaaacnnnnnnnnnnnnnnnnnnnnnnnnnnnnnnnnggaatgaataaactttgtagtaatcaactgtgaacttcaaaccaggttgattttagtaacccaattgctttgatttgacattaatgtagtcttacagggctgtgcttgctgggcatgcttttacgtctgtgagataatttcggttcagtaaattggccaatctttttatttttctaagacacagaaatgtatttaataaaaacctcgagagagtgatgggtggaaccccttctccttgaaagtgtgtacagatattccattttgtttggatatagtttataggaaagtgtgtggatgtattatggcggaaggtttctttatgttattttgttaatttattgggactctgtgtaaggccaggctttagtggtcattagacaccacatgtgttatgagccccttacccatagggttgggggtgggaagagaagcatatttttttgccattccggaagcaatccatttttattcacttgtgtgtcatgtaatggtctttggcaggagagagcactgagtcattgctggagttcagttcaacagagctgcagcttgggaagccctgtaagcccacagcttcctctcttatattaattgatggaattttactgtatgtgcctctgtacaagatgtagctttgagagctacaaaatgataacactgctttattacacactggtttcattgtcattgcaaaaacttaccctggttgtgggggagagttctagatctgtgccatgatccatacactggctaatagagtacataatttttccattttccattttttgtttttacttactactgaaggatctcagatgtaaaattatgtatttggtttgagatggccacttattgtccttaaaaatccatactgatatatgcagtcattttgaattggacagtgccttctctttttttttctcctcttcttccatctccctcacccatgcccccacccaatctaaagagacagtgctgtacattctcatagagatagagaagatctaaaaagttgagactactcaatccagttaacaacagcaggagcactagagtttgttcatttattctctctgtaaaacaagctgtgctttttttcttctgcctttaaaatgccacccgtgtattcaaaccatggccacttgatacttatgtagaatccatcgtgggctgatgcaagccctttatttaggcttagtgttgtgggcaccaatgtcgagcatcgttgtgacttgtgctgtatgattctcactgaagaatttcctttcagccaagaagcagtgaggtctgggaatattccaaagtcatgtctctgaatatgtgtccttgacgtgcaagctttgtaaaaccccatccccgcttaggtgcgaggcatcaccttctcacaagtgtttagtttcttttaaccacaagtatcattcttgggtgataatatagtttcattctacttagggattgtttagaaaacaaagaaagagccaattaaattttttagtttttgaaatttttatttatatgtatacttagatgagtattttaagctgtcgacctttagtttgccatacgggtaggactgtatttcatgttaacaactggtggtaatgataagccttcttctagcgtattttctcttctttcctgtcactttcctaagtttttttttttaaagactggaattttttttggctttatcttgtcttaccgtagagatttgttcaaaactctaagccctaccacctcccctttaataagctctttaaatagttgaatcattaacaacctggtgggaggcaagtcatttaattgaaccactaggaagtgtattttcttttctttttctgccaactttttggtggcatttgtaaaagctgatataaaaggctctgagatgttattttcagttattccataggcaagcctttttacagagcatatgtctccagttggcagcttgagatatttccgagcatccggttctagctaccagtgcctcccaatgcttagtgcacagtactgtagactggccatcacccctctccttggaaaatgccactgtgctgtttgaaaaaaagcagccttttagggctagagtattttatataaacagaagagctaagttcctgaagactaagctagatagctgcagctatatgtaaattgtatatttttatgaacttttgaagcacacactcctgtttccctctgtgtagctttgtggggatttcatgtatatatgctgtctgaaagaatccagaggttggagtgccaatagaaaatgaaaacaaatgccttgtactacaggcagcctctgaaggtgaccacataactgtcttcactgtgaccaatcggagtccctgcttgcttgtgaagaaggggcttttgtaccttgttggagatgccacctcagaagttcacactgtgcaggaaaaaggttttattctctcctggcatacattagaatgtcagatgcctgcatccatgtggaccacgatgggcctctaaaaattggtgggcagggggtttgcttatgagttttctctggaaaccgattttactcctggatgtattgaatgccccttgagctttatgagatacgagtccacatggataaaatgttagagagtggagttctacagaggattccaggaagaggccatgtctgtgcagtcctagttccagacaggtgagaagctccaggaactactggctaccttgacaagctgggtaaatagttatcattctgggtaactggttgaaactctgacttttggacaagtaattcctggggttctgtctttggtagcatcaccagggatatttgggtgggacagacagaagacacacagctgcctgttctctcctgcccatcatgtttggcccactagatgaagctgtactcagcaatttagggaatgtaacccttctcagaactggccattttcaggggaagcttgggagagcaatagtatggtgagccccttagagatgagcgcctactccttcttggcgaatgctgccttcagatgcttaccaagtggtcactgcatctagtaagattatatttccagtacacttccttagggcagaaacaccatcctatcaggtttggtcagtcccttcttcatgaagggagtcatggggaattcctgaaaattttcttccttctgcagacagttggatgagtcccttagagaaggcatccagagacataactaaactgaatatcatcccatattgattttaggaattgactctaaaactctgtgcagaatcttgtgttgggattgtatcttgacattcctgttgtgttatttttcttaactggagtgtgtgctgcctttcaggtacaatttttgtgtaataaaagccagtgcattaagtttatatagactactttctatgcaagactgagatatggaatagataggaagagatatgtactgctgggtacatggacagtaagtgtgttttcagatggagtaccagcaccgaaaatgggttgagggaggatgggttgtatgtatgtttctgcccactaattttgagcagccatattatgaattaaatcgtcacagccaagtaataacccaagaatggtatgagtttcatgtgtaatagctcaaatggaataagcatgaatgctggagtggaccattatcctcaaatattctatgtcacttctcatttaaagactcttgttatgaactattagaaactttaggcaaaatcaaaagtatttgcggcaaaataaaggcctattctactcttatttaaagtgaaacactgtatacttgtttctctccaaagcgaaattaagtatttataatttcaattgcctcgataagtttccaagtcactgaaatctgctgaaggttttactgtattgttgcacaactttaagataatttttgtctcaatgtcaacttttttcactgaataaaaatttaactgggtcaagaaaacacctctttgaaaatccactgtctctgtgtgtctcgagctgttctttagagcgcaataaagatggctgacgcagtctccaaacccc

SEQ ID NO: 990 - protein, 2279 aa, Homo sapien [sequence omitted]

SEQ ID NO: 991 - DNA, 2347 bp, Homo sapien
cggacgcgtgggcggccggcgcgcggtggggcatggcgggttcgcggggtgcggggcgcacggcggcgccgagcgtgcggccggagaagcggcggtctgagcccgaactggagcctgagcccgagccggagccccccctcctctgcacctctcctctcagccacagcaccggcagcgattctggcgtctccgacagcgaggagagtgtgttctcaggcctggaagattccggcagtgacagcagtgaggatgatgacgaaggcgacgaggagggagaggacggagcccttgatgacgagggccacagtgggattaaaaagaccactgaggagcaggtgcaggccagcactccttgcccgaggacagagatggcgagcgcccggattggggatgagtatgcggaggacagctctgatgaggaggacatccggaacacggtgggcaacgtgcccttggagtggtacgatgacttcccccacgtgggctacgacctggatggcaggcgcatctacaagcccctgcggacccgggatgagctggaccagttcctggacaagatggacgatcctgactactggcgcaccgtgcaggacccgatgacagggcgggacctgagactgacggatgagcaggtggccctggtgcggcggctgcagagtggccagtttggggatgtgggcttcaacccctatgagccggctgtcgacttcttcagcggggacgtcatgatccacccggtgaccaaccgcccggccgacaagcgcagcttcatcccctccctggtggagaaggagaaggtctctcgcatggtgcacgccatcaagatgggctggatccagcctcgccggccccgagaccccacccccagcttctatgacctgtgggcccaggaggaccccaacgccgtgctcgggcgccacaagatgcacgtacctgctcccaagctggccctgccaggccacgccgagtcgtacaacccaccccctgaatacctgctcagcgaggaggagcgcttggcgtgggaacagcaggagccaggcgagaggaagctgagctttttgccacgcaagttcccgagcctgcgggccgtgcctgcctacggacgcttcatccaggaacgcttcgagcgctgccttgacctgtacctgtgcccacggcagcgcaagatgagggtgaatgtagaccctgaggacctcatccccaagctgcctcggccgagggacctgcagcccttccccacgtgccaggccctggtctacaggggccacagtgaccttgtccggtgcctcagtgtctctcctgggggccagtggctggtttcaggctctgacgacggctccctgcggctctgggaggtggccactgcccgctgtgtgaggactgttcccgtggggggcgtggtgaagagtgtggcctggaaccccagccccgctgtctgcctggtggctgcagccgtggaggactcggtgctgctgctgaacccagctctgggggaccggctggtggcgggcagcacagatcagctgttgagcgccttcgtcccgcctgaggagccccccttgcagccggcccgctggctggaggcctcagaggaggagcgccaagtgggcctgcggctgcgcatctgccacgggaagccagtgacgcaggtgacctggcacgggcgtggggactacctggccgtggtgctggccacccaaggccacacccaggtgctgattcaccagctgagccgtcgccgcagccagagtccgttccgccgcagccacggacaggtgcagcgagtggccttccaccctgcccggcccttcctgttggtggcgtcccagcgcagcgtccgcctctaccacctgctgcgccaggagctcaccaagaagctgatgcccaactgcaagtgggtgtccagcctggcggtgcaccctgcaggtgacaacgtcatctgtgggagctacgatagcaagctggtgtggtttgacctggatctttccaccaagccatacaggatgctgagacaccacaagaaggctctgcgggctgtggccttccacccgcggtacccactctttgcgtcaggctcggacgacggcagtgtcatcgtctgccatggcatggtgtacaatgaccttctgcagaaccccttgctggtgcccgtcaaggtgctgaagggacacgtgctgacccgagatctgggagtgctggacgtcatcttccaccccacccagccgtgggtcttctcctcgggggcagacgggactgtccgcctcttcacctagctgttctgcctgcctggggctggggtggtcgtgctgaagtcaacagagcctttaccctgaaaaaaaaaaaaaaa

SEQ ID NO: 992 - protein, 746 aa, Homo sapien
MAGSRGAGRTAAPSVRPEKRRSEPELEPEPEPEPPLLCTSPLSHSTGSDSGVSDSEESVFSGLEDSGSDSSEDDDEGDEEGEDGALDDEGHSGIKKTTEEQVQASTPCPRTEMASARIGDEYAEDSSDEEDIRNTVGNVPLEWYDDFPHVGYDLDGRRIYKPLRTRDELDQFLDKMDDPDYWRTVQDPMTGRDLRLTDEQVALVRRLQSGQFGDVGFNPYEPAVDFFSGDVMIHPVTNRPADKRSFIPSLVEKEKVSRMVHAIKMGWIQPRRPRDPTPSFYDLWAQEDPNAVLGRHKMHVPAPKLALPGHAESYNPPPEYLLSEEERLAWEQQEPGERKLSFLPRKFPSLRAVPAYGRFIQERFERCLDLYLCPRQRKMRVNVDPEDLIPKLPRPRDLQPFPTCQALVYRGHSDLVRCLSVSPGGQWLVSGSDDGSLRLWEVATARCVRTVPVGGVVKSVAWNPSPAVCLVAAAVEDSVLLLNPALGDRLVAGSTDQLLSAFVPPEEPPLQPARWLEASEEERQVGLRLRICHGKPVTQVTWHGRGDYLAVVLATQGHTQVLIHQLSRRRSQSPFRRSHGQVQRVAFHPARPFLLVASQRSVRLYHLLRQELTKKLMPNCKWVSSLAVHPAGDNVICGSYDSKLVWFDLDLSTKPYRMLRHHKKALRAVAFHPRYPLFASGSDDGSVIVCHGMVYNDLLQNPLLVPVKVLKGHVLTRDLGVLDVIFHPTQPWVFSSGADGTVRLFT

SEQ ID NO: 993 - DNA, 7240 bp, Homo sapien
cactagaatgtgaaggatcttcgcggttctgggtgcccagaaaggcggcgacgcggcggatgacaacattagtgccgcgacgcgctcctggccaggcggcggctgtagtgttagctttggacgccgcagtagccgctgccggtagcaagccgactgagggaaggtgggggtccgcccgggctggtggacctcggggccgaaagttcccgccccgctcgggggctgagccggcagtgcctccgcggccgctgggcagcgcccttcgtccaggctcgcgccccagctgccgccgacgacagcggccgagagaagttggggtctgactagacgcttacggggcctcggaccccggcgccgcggcgacctcggaggaaccggctccttgcgtcccgcctccctgggagctccgcacgggatttgcagatttacagaatggctgcacattaatggaaagagaagcataaacctatcttctttcattatggagggaggtttggcagatggagaacctgatcgaacttcgcttcttggtgatagcaaagatgtccttgggccatcaactgttgtagcaaacagtgacgaatctcagcttctgacaccaggaaagatgagtcagcgccaaggaaaagaagcttatccaacgccaaccaaagatttgcatcagccatctcttagtccagcaagtcctcatagccagggttttgaaagagggaaggaagatatttctcaaaataaagatgaatcttcactttctatgtcaaagagcaagtctgaatctaaactttataatggctcagagaaggacagttcaacttcaagcaaactcacaaaaaaagaatctcttaaggtacaaaagaaaaattaccgagaagaaaagaaaagagccacaaaggagctgctcagtacaatcacagatccttctgttattgttatggctgattggttaaagattcgtggtactctaaagagctggaccaagttatggtgtgtgttgaaacctggggtgctactgatctataaaacccaaaaaaatggtcagtgggtaggaacagttcttctgaatgcctgtgaaatcattgaacgtccatcaaaaaaggatggcttttgtttcaaacttttccatcctttggagcaatctatttgggcagtgaagggtccaaaaggtgaagcggttggatccattactcaacccttacctagcagttatttgatcatccgagctacttcagagtcagatggaaggtgctggatggatgctttggagttggctttgaaatgttctagtcttcttaaacgtacaatgatcagagaaggaaaggaacatgacctgagcgtttcatcagatagcacacatgtgactttctatggcttactacgtgctaacaatctccacagtggtgataacttccagttaaatgatagtgaaattgaacgacaacattttaaggaccaagatatgtattctgataaatctgataaagaaaatgatcaagaacatgatgagtctgataatgaggtgatggggaaaagtgaagaaagtgacacagatacatcagaaagacaagatgactcatatatcgaacctgagcctgttgagcctttaaaggagactacctacactgaacagagccatgaagaacttggagaggcaggtgaggcttctcaaacagaaactgtatctgaagaaaacaaaagccttatctggacactattgaaacaagtccgtcctggcatggacctatccaaggtggttctgcctacatttattttggaaccccgttctttcctggataaactttcagattactactatcatgcagatttcctatctgaggcagctcttgaagaaaatccttatttccgtttgaagaaagtagtgaaatggtatttgtcaggattctataaaaagccaaagggactgaagaaaccttataatcctatacttggcgagactttccgttgtttatggattcatcccagaacaaacagcaaaactttttatattgctgaacaggtgtcccatcatccaccaatatctgccttttatgttagtaatcgaaaagatggattttgccttagcggtagtatcctggctaagtctaagttttatggaaactcattatctgcaatattagagggagaagcacggttaactttcttgaatagaggtgaagattatgtaatgacaatgccatacgctcattgtaaaggaattctttatggtacaatgacactggagcttggtggaacagtcaatattacatgtcaaaaaactggatacagtgcaatacttgaatttaaactaaagccattcctagggagtagtgactgtgttaatcaaatatcagggaaacttaaactgggaaaagaagtcctagctactttggaaggtcattgggatagtgaagtttttattactgataaaaagactgataattcagaggttttctggaatccaacacctgacattaagcaatggagattaataaggcacactgtaaaatttgaagaacagggagattttgaatcagagaaactctggcaacgggtaactcgagccataaatgccaaagaccaaactgaagctacccaagagaagtatgttttggaagaagctcaaagacaagctgccagggatcggaaaacaaaaaatgaagagtggtcttgcaaattatttgaacttgatccactcacaggagaatggcattacaagtttgcagatacccgaccatgggacccacttaatgatatgatacagtttgaaaaagatggtgttattcagaccaaagtgaaacatcgtactccaatggttagcgtccccaaaatgaaacataagccaaccaggcaacagaagaaagtagcaaaaggctattcctccccagaacctgacattcaagactcctctggaagtgaagctcaatcagtaaaaccaagtacaagaagaaagaaaggaatagaactgggagacattcagagttccatcgaatctataaaacaaacacaggaagaaattaaaagaaatattatggctcttcgaaatcatttagtttcaagcacaccggccacggattattttctgcaacaaaaagactacttcatcattttcctcctgattttgcttcaagtcataataaacttcatgttcaagtagaagttctctaccattgaatcagtgaactagaaagatctgatttggcctgggaccagtgttcaagttggtttggtctttattaaaaatcacaatattccgaaaacaaaaaaacctaggagataaatgtagaggtattgacttttcgtatcttttatcttcacactgaaacaagagctatcctatttgattattaaagtgagctatgtgttaagtgccaggacatttctagcttttgtgagaatgtgtctacatatgagtataataaacccacatgtatacacaattgtctcttatgtactcctacctgacagtagtctttgtattctatagtatgttctgagatataatgttaacattgttcataacaaaaaatgctatcaatcttataaatatatgtaatctattttcttcataaaacaggcacaaaagttttatcagtaaggaattacagattgagaaatgatggaataatagacataattaattcaatacactactgttaaaatcatttgcaaagcactcagctcaattatcttcttagaaagaaagaaaaagtatgaatggtcaaaatgaatacatcgagagagataaatggcaaattgcttttttaaaagtttacataagttttttttaacccctagaatttaatatttgtagatgcaggtaaatatatatacttacgtgtatatcagtataaaaacactggtgtgcaattaattggattgattataataccaccttaagcacttgctgaaaaaagtgtggtcaaaattgattgctgtccttttgtcttatttttgtttttcttaagtcagctggttcataacataggccaaattctagagatgtttatagagcatttgaagtgctgataatttatgttttttcattatgaaaacttattttagctttagactccagtgtgttcagtgaataagtagaatataaaaaaatataaccagtattttacttcaaaagccaaaaagaggcaataagaaaagacactttgtggtggcctttatgtgtgcattaaaattggtttctgtaaaacgtgtaataagttgagtatctacgaagagtatcaagttctgaagtttaatttttttattatcctcctctcttcttagtaacttctttctgtggcaaaaccacaattctttaagattcctattgttcaggctaaggcaaatttttttgtttgtttcttcagtttaatattttgattttgtgtttttacgtaaatatttatattccttgaaagcaatttttgccaaggtagttcagtttaggaatatgttgttctaaaatatgtcttagaatcctgaaagcatagattttgaaatgtttttttaatgaaaatgaaggtcagagagaataattgccctgaccacatttgcctttcagtaggaggaggctgtgaaatagtaaaattataatcgtttatgccatgataaatacaagattggtaaataaatacattgattggtaaattatgagaatcaaaatgataaaaagagcctgcttttttccctaaccaatatagctatcttaagtatccttaggtttctgtgaagaaccatttcccatgttttcttggcaaaataatgctgtattccatatgtacatgtgaaatgatgttttaaattgataaaagcttaaataagatctacctatacccagtattttcatgatattagaacaaatgggtttttggttatattttatatttgtcaatataatttttgtattcacattctgttacactctgcctattcattgatatatgatattctgtaaatattgtacaatttgatcttttttatggtttaaattagttaattacatacaaattgattggcttatcacaaaaatcatttcatcagtaaaccttgttaacattttgtactggtgacccacctcttaggactttggtcttatccacgtgtatgttgttttcatttggtccaaataatattttatttgtatgggtatcttctaagactaaataggtagttgtgttctttatttttaaaatttctttttagagcaaatgttatgggttcttacccaaagagtcaaaaactatttcttaagaaagagcagagttattcatgactgttctttatacactaaaagcatgcatctaatctaatagtcctcttattatgcttttagttgtatgagtctctttctatgaactgaacacaaaactcaggaattggtggcttaattttagatcagtgcttgtactaggcttagttatatgaatctttataacacataattactaactttgtagccatatatgtaattgactttgaatgttatttacctgaaattaatcttccttcacacatggaccgtaaacggttcccagttgtctgagagcctcatgagggtttctaggatttatgaccttatgaccagtttttttcatttaccaagattttattttcctacatgaaaatttaattgagtaataattattcacatgtgcattttctttttagctgttaaatgtactatgccatcatccaccatttagtaaaatgtagctggcccaggacatgtaaaaaaaaaaaaaaaacaacaacaataaatagggcatgtgaaatgttaagttacagcaatagatattttatttgtatttcatgttagtacttttttgttttatatcacttataaaggtacagtgtactctttgtcacagctcagttggtaaccgcattccattgaaaagttggccttgtaaaatacaactctcatttaatattcatgcttttgtgcctttaagaaaatattttttgtcattttttgtgttacagaactataatgtgattcaaggtgtttataggcttgtcataaaagggtcatttctgtgtgttactttctttttatatagctatagtatatttaaacaataatactatcttttataggggtttgtctatttacctattctttactcagacattgatgtagacttgtcagattattctgagtattgttaacagtgccttttcgatggaatcacactttttggctgtcaccttgtgccatatacacacaaaattttgtggaaggcagttttaactttctgaagaatatctgtcaaaatttaagaaaacaaatgtataaaattccattttttccagtgtttagcatttctagtaagcagtgaggttgtttgacatacagtgatgatggcattattgataagccatacatgagactgcagattatattgaatcatattaaatgtacagaaataaaatattagatttatatcaaattttccaatttgaaccagtggggaaaatcccacagaaatcagtaagtttacatttcaatttctatcttatttgactaagtggaaagagattctttaaaatgtataacctgccattatgtaatttggtttcattttattctacctgttgtgtgagtttagtatatttaatttactttttgttactctttacatactgtttatttttgttagtttttaattgaagatggactgttgaaattgtataggaccagtgtcttattaatatgattaatatatttagaagagccacgtgaaacccatgacaaaatgaatgtgaatattctttctaaaaatttagaaaatgttatctttttgcatttattatgtaaaactgttttacagtatcaaaatttttcacttaaagaaaaaaaatgccatgaaacatttgaactgatgagccacagaacttcagttgaaatttttttcactttttagcatgctaaatatacatctgagtttaaatgttctgtttaatggccattcataaattcaagcactaccactggtcagttttgtgtgatagaataaaaatatgttacctgcagtgtaagtacagcacactgtcaaattcttttccttaaggtgcacagtaaatgtacagatagttataggccactgttttgtaatgtagtacatttctaatctattattcctaacctattataactgtttgcagaaagaaaagaatttttctaataatctgtaaaattatgctaacttctacaagtaggcttctaaataaaatttttaaaaagagc

SEQ ID NO: 994 - protein, 889 aa, Homo sapien
MEGGLADGEPDRTSLLGDSKDVLGPSTVVANSDESQLLTPGKMSQRQGKEAYPTPTKDLHQPSLSPASPHSQGFERGKEDISQNKDESSLSMSKSKSESKLYNGSEKDSSTSSKLTKKESLKVQKKNYREEKKRATKELLSTITDPSVIVMADWLKIRGTLKSWTKLWCVLKPGVLLIYKTQKNGQWVGTVLLNACEIIERPSKKDGFCFKLFHPLEQSIWAVKGPKGEAVGSITQPLPSSYLIIRATSESDGRCWMDALELALKCSSLLKRTMIREGKEHDLSVSSDSTHVTFYGLLRANNLHSGDNFQLNDSEIERQHFKDQDMYSDKSDKENDQEHDESDNEVMGKSEESDTDTSERQDDSYIEPEPVEPLKETTYTEQSHEELGEAGEASQTETVSEENKSLIWTLLKQVRPGMDLSKVVLPTFILEPRSFLDKLSDYYYHADFLSEAALEENPYFRLKKVVKWYLSGFYKKPKGLKKPYNPILGETFRCLWIHPRTNSKTFYIAEQVSHHPPISAFYVSNRKDGFCLSGSILAKSKFYGNSLSAILEGEARLTFLNRGEDYVMTMPYAHCKGILYGTMTLELGGTVNITCQKTGYSAILEFKLKPFLGSSDCVNQISGKLKLGKEVLATLEGHWDSEVFITDKKTDNSEVFWNPTPDIKQWRLIRHTVKFEEQGDFESEKLWQRVTRAINAKDQTEATQEKYVLEEAQRQAARDRKTKNEEWSCKLFELDPLTGEWHYKFADTRPWDPLNDMIQFEKDGVIQTKVKHRTPMVSVPKMKHKPTRQQKKVAKGYSSPEPDIQDSSGSEAQSVKPSTRRKKGIELGDIQSSIESIKQTQEEIKRNIMALRNHLVSSTPATDYFLQQKDYFIIFLLILLQVIINFMFK

SEQ ID NO: 995 - DNA, 573 bp, Homo sapien
ttaagcacttgttttgggtacaaggcatttctgacattttataaacctacatttaaggggaatttttaaaggaaatgttttttcttttttttttgtttttcgagggggcaaggagggacagaaaagtaacctcttcttaagtggaatattctaataagctaccttttgtaagtgccatgtttattatctaatcattccaagttttgcattgatgtctgactgccactcctttctttcaaggacagtgttttttgtagtaaaatcactggtttatacaaagctttatttagggggtaaagttaagctgctaaaaccccatgttggctgctgctgttgagatactgtgctttgggagtaaaaaaagaaagttatttctttgtcttaaagaatttttaaaaaattagtcatgagacttattcatctttccagggaacatactgattggtcttaaaagactagacagttaagtaaaaggtggctggaacatctatttttctacaaaactggaaaaatgaacctggttctagaagaatgtacaccaaaataaaacatgtgaagcagtattgattcttt

SEQ ID NO: 996 - protein, 22 aa, Homo sapien
LSTCFGYKAFLTFYKPTFKGNF

SEQ ID NO: 997 - DNA, 761 bp, Homo sapien
  Unsure 698: Unknown base
  Unsure 717: Unknown base
  Unsure 731: Unknown base
gcacgagcatagacttttaaactggtacggttcttagagatggtccttggccttctgttgttgttgtkgtttttttctttttcttcttctccttctccttcttcttctcttctccttctttcttcttttttttttcagagtcttgctctgtcaccaagactggagtgaagtgatgtgatctcggcttactgcaacctgggaggcagaggttgcagtgagtcgagatggtgccattgctctcgtttgggcaacaagagtgaaactcttgtctcaaaaaaaaaaaaaaaatgaggtttaagacagttttgtcattactggtgggatctggtcacacaagatagcattaaacgtgacatggcacataaaattggttaaaaaattttgttttttaattacgtaatgtaaaagcccaacaaacactttatgcaagattggaatgtatcttcaaattcagatttaataaacatgtaaagatcctctgtatataaaagttgtatttaatcccttgtgccccaagaatgctataaaagatcccaagaatgttatctatgaaaagatagcaatagggaatggtgaacaaataatttaatttgccaattctaaaaaacatggacttaaaccccatgaaaacttggttccatagttttaactgttttatggttccaatacaaaaccagagtggtttacattccacaatnaccaaatttgcatccaatnttggggtaattttnggtatttgccatgggatactattcattttt

SEQ ID NO: 998 - protein, 42 aa, Homo sapien
  unsure 10: unknown amino acid
MVLGLLLLLXFFSFSSSPSPSSSLLLLSSFFFQSLALSPRLE

SEQ ID NO: 999 - DNA, 5972 bp, Homo sapien
ctgtgtgttcagccattactttgctcggcgctgctcccaggcatctccgaccctcggtgctgtggggagccccacacttgggctcctcgcctctcgccctcgctccccgtccctcctcccctctctccgccccttcccccttttctttctcctctctttcttcccctctctcccttctttcggccgccgtctcccccgcgccctcctcggggcggagggaagccgtgaagggggagggagggctcggtgtcaatttttttttgtgtggctgcggccgtagcctgtggcgggcaagcggggagaccccggcgcagcagaaccatggatggcccgacgcggggccatggactccgcaaaaagcggcggtcgcggtcgcagcgagaccgggagaggcgctcccggggcgggctgggggccggcgcggccggcggcggcggggctggccggacccgggcgctctcactcgcctcgtcgtcgggctccgacaaggaagacaatgggaagcccccgtcctccgccccgtcccggcccagacccccgcggaggaagcggagagagtccacctcggcagaagaggacatcattgatggatttgccatgaccagctttgtcacttttgaagcgctggagaaagatgtagcacttaagcctcaggaacgtgtggagaaacgccagacgcccctgaccaagaagaaacgagaagcacttaccaatggcttgtcctttcattcaaagaagagcagactcagccacccacaccactacagctcagatcgagaaaatgaccgcaatctctgccagcaccttgggaagagaaagaaaatgccgaaggcactcagacagctcaagccaggacagaacagctgcagggacagtgacagtgaaagtgccagtggagaatccaagggcttccaccggagcagctctcgggaaaggctcagtgatagttcagctccttccagcttgggaacaggctacttctgtgacagtgacagtgaccaggaagagaaggcatcagatgccagctctgaaaaactcttcaacactgttattgtaaacaaagatccggagttaggtgttggcacgctaccagaacatgacagccaggatgcagggccgattgtccccaagatatcgggtctagagagaagccaggagaagagccaggactgttgcaaagagccaatctttgagcctgtggtgcttaaagacccctgccctcaggtcgcacagccaataccccagccgcagacggagccccaactccgagctccttctccggaccctgacttggtgcagcgcacagaggccccacctcaacccccacctctgagtacacagccaccacagggccctcctgaggcccagctccagcctgccccgcagcctcaggtgcagaggccacccaggccacagtcccccacccagctgctccatcagaacctcccacctgtgcaggcccacccctctgctcagagcctctcccagccattgtcagcctacaacagcagtagcttaagcctcaacagtttaagcagcagcagaagcagcactccagcgaagactcagcccgccccacctcacatctcccaccacccctctgcctccccgttccccctctccctgcccaaccacagccccctgcacagcttcacacccaccctccagccccccgcacactcacatcaccccaatatgtttgcccctcccactgctctgcctcctccaccaccactgacatcaggaagtctgcaggtggccggacacccggccgggagcacttactcagagcaagacatcttgcgacaggaactgaacactcgttttttggcctctcagagtgctgaccgcggggcttccctgggccctccgccctacctgcggaccgagttccatcagcaccagcaccagcaccagcacacccaccagcacacgcaccagcacaccttcacgccgttcccccacgccatcccacccaccgccatcatgccgacgccagcacctcccatgtttgacaaataccctacaaaagttgacccattctaccggcacagtctcttccattcctatcctcctgcagtgtcgggcatcccccctatgatcccacccactggcccttttggttcactacaaggagcatttcagccgaagacatccaaccctatcgatgtcgctgctcggcctgggacagtcccacacactttactccaaaaggacccgaggttgacagatcctttcagacctatgttaaggaaaccagggaagtggtgtgctatgcatgttcacatcgcctggcagatttaccaccaccaacagaaagtcaagaaacagatgcagtcagacccacataagctggactttggactgaaacctgagttcctgagccgccctccaggccccagtctttttggagccatccaccacccccatgacctggcacggccttcaactttgttctctgccgctggtgctgcacacccaactgggaccccttttgggccacctcctcatcacagcaacttcctcaaccctgctgcccacctagagccttttaatcggccgtctacattcacaggcctagcagcagttggtggcaatgccttcgggggacttggaaatccttccgttacacccaactcaatgttcggccacaaggatggccccagtgtgcagaactttagcaaccctcacgaaccctggaaccggctgcaccgaacgcctccgtcgttcccgacccctccgccctggctgaagccaggggagctggagcgcagcgcgtccgctgcagctcatgacagagatagagatgtagataaacgagactcatctgttagtaaagatgacaaagaaagggaaagcgtcgagaagagacactccagccacccttcaccagcacctgtcctcccggtgaatgccctgggacatacccgcagctccactgaacagatccgggctcatctgaacactgaggctcgggagaaggacaaacccaaagagagggagagagaccactcggaatcccgcaaggacctggccgccgacgagcacaaggcgaaagagggccacctgcccgagaaggacgggcacggccacgaggggcgcgccgcgggcgaagaggccaagcagctggcccgggtgccgtctccctacgtgcggaccccggtggtggagagtgccaggcccaacagcacctcgagccgggaggccgagccgcgcaagggtgagccggcctacgagaaccccaagaagagctccgaggtcaaggtgaaggaggagcggaaggaagaccatgacctgcctccagaggccccgcagacccaccgggcctcggagccgccgcctcccaactcctcgtccagcgtgcacccggggcccctggcctcgatgcccatgacggtgggggtgacgggcattcaccccatgaacagcatcagcagcctggacaggactcgcatgatgacccccttcatgggcatcagccccctcccgggcggagagcgcttcccgtacccttctttccactgggaccccatccgggaccccttgagggatccttaccgagaacttgacattcaccggagagacccgctgggcagggacttcctgctaaggaacgacccgctccaccggctctcgactccccggctgtacgaagccgaccgctccttcagggaccgggagcctcacgactacagccaccaccaccaccaccaccaccacccgctgtctgtggaccctcggcgggagcacgagcggggaggccacctggacgagcgggagcgcttgcacatgctcagagaagactacgagcacacgcggctccactccgtgcaccccgcctccctcgacggacacctcccccaccccagcctcatcaccccgggactccccagcatgcactatccccgcatcagccccaccgcgggcaaccagaacggactcctcaacaagacccctccgacagcagcgctgagcgcacctcccccgctcatctccacgctggggggccgcccggtctctcccagaaggacgactcctctgtccgcagagataagggagaggcccccttcccacacgctgaaggatatcgaggcccgataagccgagaacaggagcaagaacgaggaagaagaaaccctaggcagacaccaggccaggcttgagagacagaactcctgcatggctcacacagactgggggggaaagccccaccccttccccttgtaaaaaatgtatagactcagtgcacattttgaaatgttttgtatattatatgttgagatttttcagatcttttagcccagtcatatgttctcacgtctcctactttttgtttctcgtataaaactttttgatttgaaccaaaacagtgaagatgacaacacacaccaattggatgataattgtagcgggggcggtgggggggagaagtccacgccatccatcatgcaaaattctttcagatgaggtgggaaggccgtgtacatagttatgtaaaaagagattgcttcatgagctaatggttcatatatgcaaaagggtaagatgaaagctttactttgtacaaatgtaaatagataaagtaacataatacattaatacttcttaaaatgtgctatttgcaaacttacttaatatcagtgaacacagtcggctaaagctgtgttcccatatattgttatagacagctaaacccttcaactatgcaatgaatgttcgggcttttcacaaaagcccgcctaactcaaaggagccttttcaaatccatttacagcatacttaaggtcatattttccctgaacaagcgcttacgtgatatgactctgttttccttgcttgttttttttcaaacggagaaacatcctgttttgcaaattggaccccaggctggaacttagcatctgaagttgccgcttgtgggctctgggggaaagtgtagccccggagaggtaactgaggacatgagcaaccagtgccagggagggtgggatttgccagatgccaaaatcaggggacgggtggtggtgtctgtcagacacacacaggtcgccagtgacttcacacacacctcatgtgagaaccatgccttttttagtgtgtcctatttcatacctgtacacacttcctcgttttgtaatgagatttacttacacccaaacagatcctgaaagaaagcttcaagttttctcagatgatggatatgttttcactgtattcaataactgacggatgtaaggtgcacgtttcctgatgtgacgcactgtattccagctggtgatcaagtctgggaacagccgtaacaggtcaaccttgtggagccatcgcgagttagagggtgaaagatggcagaaaaaaaagtcttgtgtgtgagtgtgttttttgagtttgcatcaatcttaatgtctcttcataatacttttataatacattaagcctcttgtctacatatttggagagaatatgactttactagcagagaaatacaatatatcttgtctactggactgtaaaatatatgtatgaaataaaattagttccatttggtcttctagtatattaaagtgctatctgacgttgttatcctgtttttgcaaaaaaaaaaaaaaaaaaaagttaactacagaccattgtttctaataagcagagagatctattttagtagtaaactgaaggtttagttgtgagcttcagattttgtgaactccagatgttgtgcggtgtttttttttttttttaagacaacaactaaaaaaatgcaaggaatatgtacactggaactgtagtggtagctttcagtattgtaaagagattgttctatacggacctttttgctgtttatcctgtatgtaataaagtcctttctagatcctatgtgaaaagaaaagtgaagcaactgaatcttcagcatgttctcatcggcggagccttcttgtgtaatgtaaactgtgccatgttattaaaaaatgtgaact

SEQ ID NO: 1000 - protein, 1259 aa, Homo sapien
MDGPTRGHGLRKKRRSRSQRDRERRSRGGLGAGAAGGGGAGRTRALSLASSSGSDKEDNGKPPSSAPSRPRPPRRKRRESTSAEEDIIDGFAMTSFVTFEALEKDVALKPQERVEKRQTPLTKKKREALTNGLSFHSKKSRLSHPHHYSSDRENDRNLCQHLGKRKKMPKALRQLKPGQNSCRDSDSESASGESKGFHRSSSRERLSDSSAPSSLGTGYFCDSDSDQEEKASDASSEKLFNTVIVNKDPELGVGTLPEHDSQDAGPIVPKISGLERSQEKSQDCCKEPIFEPVVLKDPCPQVAQPIPQPQTEPQLRAPSPDPDLVQRTEAPPQPPPLSTQPPQGPPEAQLQPAPQPQVQRPPRPQSPTQLLHQNLPPVQAHPSAQSLSQPLSAYNSSSLSLNSLSSSRSSTPAKTQPAPPHISHHPSASPFPLSLPNHSPLHSFTPTLQPPAHSHHPNMFAPPTALPPPPPLTSGSLQVAGHPAGSTYSEQDILRQELNTRFLASQSADRGASLGPPPYLRTEFHQHQHQHQHTHQHTHQHTFTPFPHAIPPTAIMPTPAPPMFDKYPTKVDPFYRHSLFHSYPPAVSGIPPMIPPTGPFGSLQGAFQPKTSNPIDVAARPGTVPHTLLQKDPRLTDPFRPMLRKPGKWCAMHVHIAWQIYHHQQKVKKQMQSDPHKLDFGLKPEFLSRPPGPSLFGAIHHPHDLARPSTLFSAAGAAHPTGTPFGPPPHHSNFLNPAAHLEPFNRPSTFTGLAAVGGNAFGGLGNPSVTPNSMFGHKDGPSVQNFSNPHEPWNRLHRTPPSFPTPPPWLKPGELERSASAAAHDRDRDVDKRDSSVSKDDKERESVEKRHSSHPSPAPVLPVNALGHTRSSTEQIRAHLNTEAREKDKPKERERDHSESRKDLAADEHKAKEGHLPEKDGHGHEGRAAGEEAKQLARVPSPYVRTPVVESARPNSTSSREAEPRKGEPAYENPKKSSEVKVKEERKEDHDLPPEAPQTHRASEPPPPNSSSSVHPGPLASMPMTVGVTGIHPMNSISSLDRTRMMTPFMGISPLPGGERFPYPSFHWDPIRDPLRDPYRELDIHRRDPLGRDFLLRNDPLHRLSTPRLYEADRSFRDREPHDYSHHHHHHHHPLSVDPRREHERGGHLDERERLHMLREDYEHTRLHSVHPASLDGHLPHPSLITPGLPSMHYPRISPTAGNQNGLLNKTPPTAALSAPPPLISTLGGRPVSPRRTTPLSAEIRERPPSHTLKDIEAR

SEQ ID NO: 1001 - DNA, 1045 bp, Homo sapien
ggcacgaggggcagcatggcgtccgtgacgctgagcgaggcggagaaggtgtacatcgtgcatggcgtccaggaagacctccgtgtggatggccgtggctgtgaggactaccgatgtgtcgaagtggaaactgatgtggtgtccaacactagtgggtccgccagggtcaagctgggtcacacagacatcttggtgggagtgaaagcagaaatggggacgccgaagctggagaaaccaaatgaaggctacttggagttctttgttgactgttcagccagtgctacccctgaatttgaaggtagaggaggtgatgaccttggcaccgagatcgctaacaccctctatcggatatttaacaataaaagcagtgtcgacttaaagaccctctgcattagtcctcgggagcactgctgggttctctatgtggatgtgctgcttctggaatgtggtggaaatttgtttgatgccatttccattgctgtaaaggctgctctcttcaatacaaggataccaagggttcgagttttggaggatgaagaggggtcgaaggacattgaattgtcagatgacccttatgactgcatacgactaagtgtggagaatgtcccctgcattgtcactctgtgcaagattggctatcggcatgtggtggatgctactcttcaggaggaggcctgctcgctggccagcttgctggtgtcggtgaccagcaagggagttgtgacgtgcatgaggaaagtggggaagggcagcctggacccagagagcatcttcgagatgatggagactggcaagcgtgtgggcaaggtactgcatgcctccttgcagagtgttctgcacaaggaagaaagcctggggcccaagagacagaaagttggattcctgggatgatttgcacatcaactgctcaactgtggattgttttttacttttccttttaaaccggttcgtatatatttttcttcgctgttacgaatttacagcagcatttgtacatgtaaaattaaaggctattttctggtaaaaaaaaaaaaaaaaaaaaaaa

SEQ ID NO: 1002 - protein, 291 aa, Homo sapien
MASVTLSEAEKVYIVHGVQEDLRVDGRGCEDYRCVEVETDVVSNTSGSARVKLGHTDILVGVKAEMGTPKLEKPNEGYLEFFVDCSASATPEFEGRGGDDLGTEIANTLYRIFNNKSSVDLKTLCISPREHCWVLYVDVLLLECGGNLFDAISIAVKAALFNTRIPRVRVLEDEEGSKDIELSDDPYDCIRLSVENVPCIVTLCKIGYRHVVDATLQEEACSLASLLVSVTSKGVVTCMRKVGKGSLDPESIFEMMETGKRVGKVLHASLQSVLHKEESLGPKRQKVGFLG

SEQ ID NO: 1003 - DNA, 5857 bp, Homo sapien
agggcgtggtcagcgcggccgaagggcgtggttggcgctcggtcctgccctgcgcgttttgggctgcggttggagggccgcagttgcagtcagggtccgccagctcggggccagcgcatggggctgctgagaccgctccggacgtgcgaagcgttcgcggtgcggtaggaagctgaagtcttcagcagaaccctgacctaggtagggagtctcaatggccctgggtgaagaaaaggcagaagcggaagcatctgaagacacaaaggcccagtcctatgggagagggagctgcagggagcgggagctggacatcccagggcccatgagtggggagcagcccccacgcctggaagctgagggagggctcatctcccctgtatggggggcagaagggatacctgcccctacttgctggattgggactgaccctggcggcccctctagagcccaccagccacaggccagtgatgccaacagagagcccgtagctgagaggtctgagcctgcactcagtggcctgcctcctgccaccatggggtctggagaccttctgctctccggggaaagccaggtggagaagaccaagctttcttcctccgaggagttccctcagactctgagccttcccagaacaacaactatttgctcaggacatgatgctgataccgaagatgatccatccctagcagatttgccccaggcactggacctcagccagcagcctcacagctcaggtctctcttgcctgtcacagtggaagtccgtgctgagcccaggttccgcagctcagccttccagctgcagcatctctgcttcctccacaggcagcagtctccagggtcaccaggagagggcggagcctcgtggtggttctctggccaaggtctcctcctccctggagccggtcgtcccccaggaaccttcctctgtggtggggctaggacctcggccccagtggtcaccacagcctgtgttctctgggggtgatgcttctgggctaggcaggagacgcctctccttccaggctgagtactgggcctgtgtgctgccagattccctgcctccatcacccgaccgccactcccctctctggaacccaaataaagagtatgaagatctgcttgactatacttacccactgaggcccgggcctcagctcccaaagcaccttgatagccgtgtgccagctgaccctgtcctgcaggactccggggtagacctggatagcttctctgtctctccagcaagcaccctcaaatcacctactaatgtctcccccaactgcccaccagcagaggccactgccctgccattttctgggcccagagagccaagccttaagcagtggccctccagagtaccccagaaacagggtggcatgggcttggcatcttggagccaacttgcatctacccccagagccccaggcagtagggatgctcgttgggagcgcagagagccagccctgaggggtgcgaaggaccggctgactataggcaagcaccttgatatgggctctccccagctaaggacacgggacagagggtggccctcgcccaggccagagagggagaagaggaccagccagagtgcccggcgccctacctgcacagagtctaggtggaaatcagaagaggaagtggaaagtgatgacgagtatcttgccctccccgctcggctgacacaggtttctagcctggtttcgtatctaggatccatttctaccttggttaccctgcccactggggatatcaaagggcagagccccttggaagtgtcagacagtgatgggccagcttccttcccttcaagctccagccaaagccagcttccccctggagctgccctccaaggatctggggatcctgagggccagaatccctgtttcctgcgctccttcgtccgtgcccacgactccgcaggggaaggcagtctggggagcagccaggccctcggggtctcctctggactgctgaaaacacgcccctccttgccagctaggttggaccggtggccattctcagacccagatgttgaagggcagcttcccaggaaaggaggagaacagggaaaagaatcactggtgcaatgtgtgaagacattttgctgtcagctggaagagctgatctgctggctgtataatgttgcagatgttactgaccacgggactgcagccaggtccaatcttacaagtctcaagtcttctctgcagctttaccggcaatttaagaaagatatagatgaacatcagtctctgacggagagtgtcttacagaagggggagattcttcttcagtgcctgttggagaacaccccagttttagaggatgtccttgggaggatcgcaaagcagtctggtgagctggagagccacgcagatcgcctgtatgactctatcttggcctctctggacatgctggctggctgcacccttatccctgacaaaaagcccatggcggcaatggagcacccatgtgaaggggtttaacctggcatcttctcaggcagaggtgcaacctgtcggccaaacactggctagtgagaaaaaatccttcaagaagtccttgcaagagccattcaacactgaagtcaagggggaaaccttcaatatactagctttaaaatgcctttctcctccctgaatggagggctgagttactatttttatttacaatgaatccttccaaactaaggttttccttttggtgcttctccacaaagagcgtgtagctttgcaatttttgataaaataagacgtgttgccttcccctctatcccattaaaaaagagcagataaagctcaaactattccacctggtagggtcatttaccaagggctggtaggagattccgaatactcaatattctcaggcatgcaagaggacctaagagactgaaaaaagtgaattgttggccagaaaccttgggtcttttcataaaggaaatttgggcttgtcaatccctctttaaagatataggtagaaagaagagatttttaaccctttgtctgcaaaagaaaaagggttaaatgaagcatctatacagatgactttgggagattatgacaccttttgccatcttcagggcttacgtctttactttcttggctaaccagtttcttagaagaaaatgtgtcagggacttggggatctacagtcatgctttagcatggctatggagctaattatcaagcttaaagggtaactttgggaggactcctcccttcactcctagtctcccttggaagagcagtccaggctcagggaagggaatggataggatgacacagtaagtacagaaactgaagctgtcaatagtgaaggaaaaaggggaattcttcgttgctttggcattgacacataagtactttgattaaaaaaaaaaaaaactatggatcaaccattcaaagcatcaattctatagctttttgcagcaagatgatcagttattgctggtaactgcagattctacagaaaagcacttttaaagttctgttgggccatgaatgaacctggaaggaggaaagcacagtaacaatggaaactaaagtcctattattaatgtgacttttctgcttcagaatttctgagactttatagtcactggaaaatagccattaaattctttaaagattagctcttcaacagtagctacacataaaatgcagtatttcaagtgcctgatgctgctgtggtatgctttatcataatgcttaagggcatgatcaaaattaaaatggcttatgagtttgccatattaatcatcttagttccatacacactgagactttaaaagggaaaaaccactctagcaaataattgtcaattataaacctgtatgtaaaacattcttgaaaacctagagttggttaaaaaggtagagatgtctgacggcctcttcttaaattgatatattttaccttctcttagatgtatatttataagtaggaacatgtccttccactgagtatgttactgaatagcccttaggaaattaaacccatttatttactaatatttgacaggcatagaagtgtattaattagcataaaagttggagatgaaaaccctatagaaacaaattggccaatattatactaattgaatgcagaatgtggcattctattcccattcaactaataatcagcttcaactgacaggaatttgcacagaatgttacacaataccctgtttcccaagaaagtactaccttacctagagatgatctaagatatttttgttcatcctctgaataaggtgagactaaagggtgctaactccctggacctggctgtgaatgctactgaagagtatcaacacaactgttaattataccgccgtgctttaagtttaagacttaccttaaaactcaagctgaaggctgggcacggtggctcatgcctgtaatcccagcactttgggaggccgaggcgggtggatcacaaggtcaggagatcgagaccatcctggctaacacggtgaaaccccatctctactaaaaatacaaaaagaaattagccaggcgtggtgatgggcgcctgtagtcccagctacttgggaggctgaggcatgagaatggcatgaacccgggaggcggagcttgcagtgagctgagatggcaccactgcactccagcctgggcaacagagtgagactcttgtctcaaaaaaaaaaaatcaagctgaaattgtttcagcctagtaagatgctgccagcagcatttctatgagcaaacatggccaaattagagtcaagtagctgagcttgctaactgcactgtgatgccacactggaataacttagtagtcccttaaaattaatggaagttaaatccacagggaagtgatgatactcaaagctggatcagcagtttcaagatctgggttcttggagatccataggtaagctcagcaaatggaagacgacgtcaacacagggctattttgaagcttaggtgggaatggaacacaaagaaggtttgaggtaagatatgctggaaaggcaagatgtaggctaagggaaattcaatccaaggtcgaagaataggaaattactgctcagaccacaatgactatcattctgaaaggatttcacagagtgtgcagctgcttagatttaagaacactcttcttcactatgtaaactaatttatggcagcaccttatatttagaacaagtggtaattccctttactaagtgaacagattattaaaacctgtagtagctttgaaccgtttgtacttgaaaatgggggtataaaggggtatatattttttccagaaccacatttattggcgtatacatagaagcaaatcttaaggcatgctgaaatttgttgtaaatcccaatctttactgccatggggaaaagaacgctggaattttccaaacttaagtctgtaaatatgctcatcttaagttcatgtaatgtttccgctaactcaccaagaataagctgacaatttaaacaacttttactgtgtaaaaatgaagtgcacggcatggcatcacagtatcttgacatttgttttgtgtcatttagctactttagaaaatagtttctgaactctttccccctttatactgtattaaggcaaaaacaaaacttctgaagcattaaagatcttcaccaaaataactattggtaacttcaggaatttgtcagttgccttatgtgaggatgaatagatccaccaagcacgcctataatacaaagtaaactatgatttttattgtgaaattttcatagatggaaaattgaatattctgtccatttcattttacaattatcttaccacttatttttgtaccatgtatttcaattgcctgtttagtgaaaaataaaaattaaaaaaacct

SEQ ID NO: 1004 - DNA, 5656 bp, Homo sapien
cgccggcgggccgtgtgtgaggagcagtagagaactgtggactattctgcttggaaggtcagctctgagagagctgagtcagattgaggcagaactgaataaacattggcggcgattgttagaggggctttcttactacaaacctcccagtccaagttcagctgaaaaagtgaaagctaataaagatgtagcttcaccattgaaggaactgggtttaagaatcagcaagtttttgggtcttgatgaagaacagagtgtgcagttactccagtgttacctgcaagaggactacaggggtactcgggactcagtaaagacagtactgcaagatgagaggcagagccaggccttaatcctgaagattgcagattattattatgaagaaagaacctgtattcttcgttgtgtcttacaccttctcacttacttccaagatgaaagacacccctatagggttgaatatgcagactgtgttgataaattggagaaggaactagtttcaaaatacagacagcagttcgaagagctttataaaactgaagcaccaacttgggagacacatggaaatctcatgacagagcgccaagtgtctcgctggtttgttcagtgccttcgggaacagtccatgctgctagaaattattttcctttattatgcatactttgagatggcacccagtgacttacttgtattaaccaagatgtttaaagagcaaggatttggtagtaggcagaccaataggcacctggtggatgagactatggatccttttgtagatcggattggctacttcagtgccctcatcctggtggagggcatggatatcgagtccttgcataagtgtgctttggatgacagaagagaactgcatcagtttgcgcaggatgggcttatttgtcaggatatggactgtttaatgttgacctttggggacattccacatcatgccccagtgcttttggcctgggctctcctccgtcacactctgaacccagaagagacaagcagtgtggtccggaagataggtggcacagccatccagctgaatgtgtttcagtacttgacccgattgctccagtcccttgccagtgggggaaatgattgcaccaccagcactgcatgcatgtgtgtctatggactgctctctttcgttctgacctcgttggagctgcacaccctgggcaatcagcaggatataattgatacagcatgtgaagtattggccgacccttctcttccggaactgttctggggaacagagccaacttctggccttgggatcattctggacagtgtgtgtggaatgtttccccaccttctctccccactcctgcaactgctccgagccctggtatcagggaagtccacagccaaaaaggtgtatagcttcttggataagatgtctttctacaatgaactttataaacacaagcctcatgatgtgatctcccatgaagatggaactctttggcggagacaaacacccaaactcctttatccccttgggggtcaaaccaaccttcgcatacctcaaggcactgtgggccaagtaatgttggatgatagggcatacctggtacgctgggaatactcctatagcagctggaccctctttacctgcgagattgaaatgttgcttcatgttgtttcaactgcagatgtgattcagcactgccagcgagtcaaacccatcattgatctcgtccataaggtcatcagtacagacctgtcgatagcagactgtctcctgcccatcacatctcgcatctacatgctgctgcagcggttaacgacagtgatctccccacctgtggatgtcattgcttcttgtgtcaactgcttaactgttttggctgcccgcaatccagcaaaggtctggactgatcttcgtcacacaggttttttaccatttgtggcccatcctgtctccagcctgagtcagatgattagtgcggaagggatgaatgctggagggtacggaaacctcttgatgaacagtgaacagcctcagggcgagtatggggttactattgcctttctgcgcttgatcaccacccttgtcaaggggcaacttggtagtacccagagccaaggacttgtaccctgtgtaatgtttgtgctgaaggagatgcttcccagctaccataagtggcgctacaactctcatggagtgagggaacagattggttgcctgatcttggagctgattcatgcgatactgaacctgtgccacgagacagacctgcacagcagtcatactcccagcctgcagtttctctgcatctgcagcctggcatacacagaagcaggacagacagttatcaatatcatgggcattggcgtggacaccattgacatggtgatggctgctcagcctcgaagtgatggggcagagggccaggggcagggccagctgctgatcaagacagtgaaactggcattctccgtcaccaacaatgttattcggctgaaacctccttctaatgtggtgtcccccctggaacaggctctctcacaacatggtgctcatggaaacaacctcattgctgttctagccaaatacatctaccacaaacatgaccctgctttgccacgtcttgccattcagctgctgaaacgtctggccacggtggccccaatgtcagtgtatgcttgtctgggcaatgatgcggctgccattcgtgatgccttcctgacccgattgcagagcaaaattgaggacatgcgcatcaaagtcatgattctagagttcctcactgttgcagtagagacccagccaggcctcatcgaactgtttctgaacctggaagttaaggatggcagtgatggctcaaaggaattcagccttgggatgtggagctgtctccatgcagtgctggagctgattgattcccaacagcaagatcgatactggtgcccacccctgctgcatcgtgccgccattgcctttttgcatgctctgtggcaggatcggagggacagtgccatgctggtcctccgaaccaaacccaagttttgggaaaatttaaccagtccgctgtttggaaccctttctcctccctctgaaacatcagagcccagcatcctggaaacctgtgccctaatcatgaagataatttgcttggagatatactatgtagtaaagggttcattagaccagtcattaaaggatacactgaagaaattttccatcgagaaacgctttgcctactggtcagggtatgtcaagtcattggcagttcacgtggccgaaacagaaggcagcagctgcacctccttgttagagtaccagatgctggtgtccgcctggaggatgcttctcatcattgccaccactcatgcagatataatgcacctgactgactctgtggtgcgtcgccagctctttcttgacgtgcttgatggaaccaaagcattactcctagttccagcctcagtgaactgccttcgccttggctccatgaagtgcactctgctgcttatcctcctccggcagtggaagagagagttaggttctgtggatgaaatccttggacccttgacggagatcctggagggagtgctgcaggccgaccagcaactcatggagaagaccaaggccaaggtgttctcagcattcatcacagtgttgcaaatgaaggagatgaaagtaagtgacatcccccagtactcccagctggtgctgaatgtctgtgagaccctccaagaggaagtgattgcactcttcgaccagacccgccacagtctggcattaggcagtgccacagaggacaaggacagcatggagactgacgactgttctcggtcccggcacagggaccagcgtgatggggtgtgtgtcctgggcctgcacctggccaaggagctgtgtgaggtagacgaggatggtgactcctggctgcaggtaacccgcaggctccccatcctacccaccctcctcaccactctagaggtgagccttcgcatgaagcagaacctgcatttcactgaggccacattgcatctgctcctcaccctggctcgcactcagcagggagccacagcagtggctggagctggcatcacccagagcatttgtttgccccttctgagtgtgtaccagctgagcaccaacggcacagcacagacacctagtgcctctcggaagtccctggatgccccctcttggccaggagtctaccgcctgtccatgtccctgatggagcagctgctcaaaactctgcgctacaacttcctgcctgaggccctggacttcgtgggtgtccaccaggagcggaccttacagtgcctcaacgcagtgaggacagtgcagagtctggcctgcctggaggaggcggaccacaccgtgggttttattctgcagctctctaacttcatgaaggagtggcacttccacctgcctcagctcatgcgtgatatccaggtcaacctgggttacttgtgccaggcatgtacctctctcctgcacagtcgaaagatgctgcagcattacttacagaacaaaaatggggatggcctcccctcagctgttgcccagcgagtccagaggccaccgtctgctgcttctgctgccccctcctcctcaaagcagcccgctgctgacacagaggcatcagagcagcaggccttgcacacagtccagtatggccttctcaagatcctcagcaagacgctggcagccctgcgccacttcaccccagatgtctgccagattctgctggatcagtccctggaccttgctgaatacaacttcctgtttgccctgagctttaccactcccacctttgactccgaagtggccccctccttcgggacccttctggccacagtgaatgtggccctcaacatgcttggagagctggacaagaaaaaggagcccctcacccaggcagtggggctcagcacacaggcagaagggaccaggacgttaaagtccctcctgatgtttaccatggaaaactgcttctacctgctcatctctcaggcgatgcggtaccttagggacccggctgtgcacccccgggacaaacagcggatgaagcaggagctcagctctgagttgagcacgctgctgtccagcctctcgcgctacttccgccggggagcccccagctcccctgccactggtgtcctcccctcgccgcagggcaagtccacctctctctccaaagccagccctgagagtcaggagcctctgatccagttggtgcaggcgtttgtccggcatatgcaaagatagggcagtgctgttctgcccacctacccctctccaccagcctacactgcaccctggctggcaggggtgctgctggctgctagggcctatacaatggagggcacctcctgtcacccccctcccggagtagccacgactccagccaccacccactgacgttatttttatactagatgaagaggtcaacagcaggcatggggagccgagtcttctgtgctcaggtcctcacgctgcagacgccccctagaggaactttccttcctttccagcattccccacagcactgccggccaggggagaggcggcagcccagcagagggctctatgcacgggtttcaaacctgttttccacactctgtctttgcagttttggtaattctgtggtctatttatacagatattaaaatcttgtttatagac

SEQ ID NO: 1005 - DNA, 6651 bp, Homo sapien
ggccgagtcgtggcgggagacggtgcagctgtacgaggacgaggtgcgcgagctggaggaggcgctgcggcgcggccaggagagcagactccaggcggaggaagagacgcggctgtgcgcgcaggaggcagaggcgctgcggcgcgaggcgctcgggttggagcagctgcgcgcgcggctggaggacgcgctgctgcggatgcgcgaggagtacgggatacaggccgaggagcggcagagagcgattgactgcctggaggatgagaaggcaaccctcaccttggccatggctgactggctgcgggactatcaggacctcctgcaggtgaagaccggcctcagtctggaggtggcgacctaccgggccttattggaaggagaaagtaatccagagatagtgatctgggctgagcacgttgaaaacatgccgtcagaattcagaaacaaatcctatcactataccgactcactactacagagggaaaatgaatggaatctattttcaaggcagaaagcacctttggcaagtttcaatcacagctcggcactgtattctaacctgtcagggcaccgtggatctcagacgggcacatctattggaggtgatgccagaagaggcttcttgggctcgggatattcttcctcggccactacccagcaggaaaactcatacggaaaagccgtcagcagtcaaaccaacgtcagaactttctctccaacctatggccttttaagaaatactgaggctcaagtgaaaacattccctgacagaccaaaagccggagatacaagggaggtccccgtttacataagtgaagattccacaattgcccgcgagtcgtaccgggatcgccgagacaaggtggcagcaggtgcttcggaaagcacacggtcaaatgagaggaccgtcattctgggaaagaaaacagaagtgaaagccacgagggagcaagaaagaaacagaccagaaaccatccgaacaaagccagaagagaaaatgttcgattctaaagagaaggcttctgaggagagaaacctaagatgggaagaattgacaaagttagataaggaagcgagacagagagaaagccagcagatgaaggagaaggctaaggagaaggactcaccgaaggagaagagtgtgcgagagagagaggtgccgattagtctagaagtatcccaggacagaagagcagaggtgtccccgaaaggtttgcagacgcctgtgaaggatgctggtggtgggaccggtagagaggcagaagcaagagagctacggttcaggttgggcaccagtgatgccactggttctctgcaaggcgattccatgacagaaaccgtagcagaaaacatcgttaccagtatcctgaagcagttcactcagtctccagagacagaagcatctgctgattcttttccagacacaaaagtcacttacgtggacaggaaagagcttcctggggaaaggaaaacaaagactgaaatagttgtggagtctaaactgactgaggatgttgatgtttccgatgaagctggcctggactaccttttaagcaaggatattaaggaagtggggctgaaaggcaagtcagccgagcagatgataggagacatcatcaacctcggcctgaaagggagggaggggagagcaaaggtcgtcaacgtggagatcgtggaggagcccgtgagttatgtcagcggggagaagccggaggagttttccgtcccattcaaagtggaggaggtcgaagatgtgtcgccaggcccctgggggttggttaaggaggaggaaggttatggagaaagcgatgtcacattctcagttaatcagcatcgaaggaccaagcagccccaggagaacacgactcacgtggaagaagtgacagaggcaggtgattcagagggcgagcagagttattttgtgtccactccagatgaacaccccggggggcacgacagagatgacggctcggtgtacgggcagatccacatcgaggaggaatccaccatcaggtactcttggcaggatgaaatcgtgcaggggactcgaaggaggacacagaaggacggtgcagtgggcgagaaggttgtgaagcccttggatgtcccagcgccctctctggagggggacctgggttccactcactggaaagaacaagctagaagcggtgaatttcatgccgaacccacagtcattgaaaaagaaattaaaataccccacgaattccacacctccatgaagggcatctcctccaaggagccccggcagcagctggtggaggtcatcgggcagctggaggaaacccttcccgagcgcatgagggaggagctgtccgccctcaccagagaggggcagggtgggccggggagcgtttccgtggatgtcaagaaggtccagggtgctggtggcagttccgtgaccctggttgctgaagtcaacgtctcacaaactgtggatgccgatcggttagacctggaggagctgagcaaagatgaggccagtgagatggagaaggctgtggagtcggtggttcgggagagcctgagcaggcaacgcagcccagcgcctggcagcccagatgaggaaggtggagcggaggccccggctgctggcattcgcttcaggcgttgggccacccgggagctgtacatcccttcaggcgagagcgaggttgctggtggggcctctcacagctcgggacagcgcactccccagggcccagtgtcggccactgtggaggtcagcagccccacaggctttgcccagtcacaggtgctggaggatgtgagccaggctgcaaggcacataaaactcggcccctctgaagtctggaggactgagcgaatgtcatatgaaggacccactgcagaagtggtggaggtaagtgcgggaggtgacctaagtcaggcagcgagcccgaccggagccagccggtctgtgaggcatgtcacgctgggtcccggtcaaagtccactgtccagagaagtcatcttcctaggccctgcccctgcctgtccagaggcatggggctcgccagaacctggcccagcagagtcttctgcagatatggacggatcagggaggcacagcacatttggctgcagacaatttcatgctgaaaaggagattatttttcagggccccatttctgctgcagggaaggttggtgattattttgcaacagaagagtcagtgggtacccagacttctgtcaggcaactccagttaggccctaaagaagggttcagtgggcaaatccagttcacagctccactttcagacaaggtggagttgggtgtcataggagattctgtacacatggaagggttgccagggagcagcacatccatcaggcacatcagcattgggcctcagaggcatcagaccacccagcagatagtttaccatgggctggttccccaactgggggaatctggtgactcagagagcactgtgcacggagagggctcagcagatgtgcaccaggccactcacagtcatacctcgggtagacaaaccgttatgactgaaaagagcaccttccaaagtgtcgtttctgaatctccccaggaggatagtgcaggggacacatcaggggcagaaatgacatcgggtgttagcagatcctttaggcacattcgactaggtcctacagaaacggaaacctctgaacacattgccatccgtggacccgtgtccagaacatttgtgcttgctggttcagcggactcccctgagctaggcaagttagcagacagcagcagaacgctaaggcacattgcaccagggcccaaagaaacttcgtttacctttcagatggatgtgagtaacgtagaggcgatccgcagccggacacaggaagcgggagctctcggtgtgtctgaccgtggttcctggagagacgcggacagtaggaatgaccaggcagttggtgtgagctttaaggcctctgctggggaaggagaccaggcccacagagaacagggcaaggagcaggccatgtttgataagaaggtgcagctccagagaatggtagaccaaaggtcggtgatttcagatgaaaagaaagttgccctcctctatctagacaatgaggaggaggagaatgatgggcattggttttaataagcagaaacattttgttttaatggcagcctgttggcgacgtgccaacatccaaaggccttaacttattttaagaggccgagggagtctatgaaaatctccccttttttacttttttaaagagtactcccggcatggtcaatttcctttatagttaatccgtaaaggtttccagttaattcatgccttaaaaggcactgcaattttatttttgagttgggacttttacaaaacacttttttccctggagtcttctctccacttctggagatgaatttctatgttttgcacctggtcacagacatggcttgcatctgtttgaaactacaattaattatagatgtcaaaacattaaccagattaaagtaatatatttaagagtaaattttgcttgcatgtgctaatatgaaataacagactaacattttaggggaaaaataaatacaatttagactctaaaaagtcttttcaaaaagaaatgggaaataggcagactgtttatgttaaaaaaattcttgctaaatgatttcatctttaggaaaaaattacttgccatatagagctaaattcatcttaagacttgaatgaattgctttctatgtacagaactttaaacaatatagtatttatggcgaggacagctgtagtctgttgtgatatttcacattctatttgcacaggttccctggcactggtagggtagatgattattgggaatcgcttacagtaccatttcattttttggcactaggtcattaagtagcacacagtctgaatgcccttttctggagtggccagttcctatcagactgtgcagacttgcgcttctctgcaccttatcccttagcacccaaacatttaatttcactggtgggaggtagaccttgaagacaatgaagagaatgccgatactcagactgcagctggaccggcaagctggctgtgtacaggaaaattggaagcacacagtggactgtgcctcttaaagatgcctttcccaaccctccattcatgggatgcaggtctttctgagctcaagggtgaaagatgaatacaataacaaccatgaacccacctcacggaagctttttttgcactttgaacagaagtcattgcagttggggtgttttgtccagggaaacagtttattaaatagaaggatgttttggggaaggaactggatatctctcctgcagcccagcaccgagatacccaggacgggcctggggggcgagaaaggcccccatgctcatgggccgcggagtgtggacctgtagataggcaccaccgagtttaagatactgggatgagcatgcttcattggattcattttattttacacgtcagtattgttttaaagtttctgtctgtaaagtgtagcatcatatataaaaagagtttcgctagcagcgcattttttttagttcaggctagcttctttcacataatgctgtctcagctgtatttccagtaacacagcatcatcacactgactgtggcgcactggggaataacagtctgagctagcaccaccctcagccaggctacaacgacagcactggagggtcttccctctcagattcacctggaggccctcagacccccagggtgcacgtctccccaggtcctgggagtggctaccgcaggtagtttctggagagcacgttttcttcattgataagtggaggagaaatgcagcacagctttcaagatactattttaaaaacaccatgaatcagatagggaaagaaagttgattggaatggcaagtttaaacctttgttgtccatctgccaaatgaactagtgattgtcagactggtatggaggtgactgctttgtaaggttttgtcgtttctaatacagacagagatgtgctgattttgttttagctgtaacaggtaatggtttttggatagatgattgactggtgagaatttggtcaaggtgacagcctcctgtctgatgacaggacagactggtggtgaggagtctaagtgggctcagtttgatgtcagtgtctgggctcatgacttgtaaatggaagctgatgtgaacaggtaattaatattatgacccacttctatttactttgggaaatatcttggatcttaattatcatctgcaagtttcaagaagtattctgccaaaagtatttacaagtatggactcatgagctattgttggttgctaaatgtgaatcacgcgggagtgagtgtgcccttcacactgtgacattgtgacattgtgacaagctccatgtcctttaaaatcagtcactctgcacacaagagaaatcaacttcgtggttggatggggccggaacacaaccagtctttttgtatttattgttactgagacaaaacagtactcactgagtgtttttcagtttcctactggtggttttgatattgtttgtttaagatgtatatttagaatgacatcatctaagaagctgattttgctaaactcctgttccctacaatgggaaatgtcacaagaatgtgcaaaaataaaaatctgagg

SEQ ID NO: 1006 - DNA, 4246 bp, Homo sapien
tttaaactgtgctttctaagcacagtcaggtagcaaaagtaataaaaaggatggttgaacaagttttcttgtatgttccaggatatgtttgggacttttctttgtttattatatgagttgttccctttgaaattaaagctattttgtaggttttgtgggacataatttgataagtagagttaattaaatttcttctggaagagatctaaattcttattcttagtgagagactgtagttaaaaggaaggcttttagaacttgggttcaaggaagatggagatgcgtcggaagctctttggcgggggtgaggaagttcagaaagtgtgcattttccttctggcatttaggtcttgtccgtgtgatttggtggtgcttgggtcataagcctgattaaaattcagggacatgtaccacggcggccaaagcggaattaatttttttatatggggactggagcgctgaaaagttgttcctgaccaggctctaatgagaaattcctctctccccaggttatgaagacagtatggagtttccagaccatagtagacatttgctacagtgtctgagcgagcagagacaccagggttttctttgtgactgcactgttctggtgggagatgcccagttccgagcgcaccgagctgtactggcttcatgcagcatgtatttccacctcttttacaaggaccagctggacaaaagagacattgttcatctgaacagcgacattgttacagcccccgctttcgctctcctgcttgaattcatgtatgaagggaaactccagttcaaagacttgcccattgaagacgtgctagcagctgccagttatctccacatgtatgacattgtcaaagtctgcaaaaagaagctgaaagagaaagccaccacggaggcagacagcaccaaaaaggaagaagatgcttcaagttgttcggacaaagtcgagagtctctccgatggcagcagccacatagcaggcgatttgcccagtgatgaagatgaaggagaagatgaaaaattgaacatcctgcccagcaaaagggacttggcggccgagcctgggaacatgtggatgcgattgccctcagactcagcaggcatcccccaggctggcggagaggcagagccacacgccacagcagctggaaaaacagtagccagcccctgcagctcaacagagtctttgtcccagaggtctgtcacctccgtgagggattcggcagatgttgactgtgtgctggacctgtctgtcaagtccagcctttcaggagttgaaaatctgaacagctcttatttctcttcacaggacgtgctgagaagcaacctggtgcaggtgaaggtggagaaagaggcttcctgtgatgagagtgatgttggcactaatgactatgacatggaacatagcactgtgaaagaaagtgtgagcactaataacagggtacagtatgagccggcccatctggctcccctgagggaggactcggtcttgagggagctggaccgggaggacaaagccagtgatgatgagatgatgaccccagagagcgagcgtgtccaggtggagggaggcatggagagcagtctgctcccctacgtctccaacatcctgagccccgcgggccagatcttcatgtgccccctgtgcaacaaggtcttccccagcccccacatcctgcagatccacctgagcacgcacttccgcgagcaggacggcatccgcagcaagcccgccgccgatgtcaacgtgcccacgtgctcgctgtgtgggaagactttctcttgcatgtacaccctcaagcgccacgagaggactcactcgggggagaagccctacacatgcacccagtgcggcaagagcttccagtactcgcacaacctgagccgccatgccgtggtgcacacccgcgagaagccgcacgcctgcaagtggtgcgagcgcaggttcacgcagtccggggacctgtacagacacattcgcaagttccactgtgagttggtgaactccttgtcggtcaaaagcgaagcactgagcttgcctactgtcagagactggaccttagaagatagctctcaagaactttggaaataattttatatatatataaataatatatatatatatacatatatataaatagatctctatatagttgtggtacggtctaaaagcagtcttgtttcctggaaataaaaagttgggatattaacttgtttttgcactttagaatagcatgagaatctcactaatttagcattctgataaaagaaactttagagcaagtcagaatagagaggtgtttttcctttgaggggataggggaagtaagccaataagaaccttttaaacaaatcgtcctgtcacaaaatgctttcatatggcttaattttgtcaacactgcattgtcttttgagctcttttttcccccccaacaaagtttttttgttttttgtttttttttttaagtagaaattccctccagttttattagcctctttatatgtctcaaattgcatgaattttttctggctgttggaaacctgaatgcttttagacccaaatggaaaatttctgaaatgctggattatctatttttaaacaagcagttgacttaaaactttctgtggcaacttctggttttctgacagttcccagtgagagaaatgctgaaagtacactgggatcactgggacactgtcttatgaaggtttgcttgggatgaaaaaggatattgcagcttcagcagtgttgaactgtgtgtttaaaaatgtgaattactgttattgtatactgtaattgattacatgggctgggggggtgtcaaagaacttgacaggttgtgttgatgctcttagttgagtcttgaaaagtaaatattaacgctacagaaatgcatgagttttcaatatattttttgtctttgtttgcattgtataactttaacgagtgagtttaaaattatttaatttccttagaaaaatagcaccatttggaaaaaaaaactggtgttatgaagaacgtaaatgcactgtttttatttttattttatataatttaaattgactttcccactgtctttaagttgaaactgttaagctgaataaaaacttaagctgcaaattgataacttcgctacataacaaggaaaatataaatgtttacaaacagcttaaagatttgcatgtgcagtgtgcatttataacaaacttctaattgcacaaaacccatgccagctcagagtttaggtgtacacatttacccagttgagcgttcttagaataactactgcacaagttgacaataggtcgttctctctttttttttgtttgctccctttttctttttctccccttcctccttaccctccctcccttactctccccccccaccaccaccctccacccccaactcatgaaaagattctatggactgaaaaagccccaggctgaaaggactggactgccttgattgacatggggaagggggttagtagactatgtggattgcggcagcagaggctgcagcctaacgtgtggttttaatgaccagcacgcaaggcaaaagcattttgcacagtgtttgttttcctgtcttgcacttacaaataaggtctatgggagtagcatggaaaacgtttgctgtttttcccttttttttttaattgcttttgtttaaaatttgatcgccttaactactgtaaacatagcctatttttgtgcttaagatactgaatggaaaactccattgtgtgttgctggactgttttggaaatatttggttaaatgtgtgttaatttggctgtaatggcatttaaagcaaacaaacaaacaaaaaaagctgtgaaaatggccttggagcattatctttagttacttgaagagtttctagtttttttaaaatacagtttatgttaaaataatttttattaatttagagaagacaatcaatgtctgtgagaaaacggactttcttttggattttctttttgtggtcattgtgagtgattgctttttccttttcttagtttcacattcttcctttgttctaaaacttagactgacatctagctttgacaatcatagtatgttttattttcctgagggggaataacttataatgctgtttagttttgtactattggtgtgttggtgaatttttaaactgtgtgctaactgcaataaattatatgaactgagaaaaaaaaaaaaaaaaaaaaaaaaaaaaaaaaaaaaaaaaaaaaaaaaa

SEQ ID NO: 1007 - protein, 522 aa, Homo sapien
MEFPDHSRHLLQCLSEQRHQGFLCDCTVLVGDAQFRAHRAVLASCSMYFHLFYKDQLDKRDIVHLNSDIVTAPAFALLLEFMYEGKLQFKDLPIEDVLAAASYLHMYDIVKVCKKKLKEKATTEADSTKKEEDASSCSDKVESLSDGSSHIAGDLPSDEDEGEDEKLNILPSKRDLAAEPGNMWMRLPSDSAGIPQAGGEAEPHATAAGKTVASPCSSTESLSQRSVTSVRDSADVDCVLDLSVKSSLSGVENLNSSYFSSQDVLRSNLVQVKVEKEASCDESDVGTNDYDMEHSTVKESVSTNNRVQYEPAHLAPLREDSVLRELDREDKASDDEMMTPESERVQVEGGMESSLLPYVSNILSPAGQIFMCPLCNKVFPSPHILQIHLSTHFREQDGIRSKPAADVNVPTCSLCGKTFSCMYTLKRHERTHSGEKPYTCTQCGKSFQYSHNLSRHAVVHTREKPHACKWCERRFTQSGDLYRHIRKFHCELVNSLSVKSEALSLPTVRDWTLEDSSQELWK

SEQ ID NO: 1008 - DNA, 1345 bp, Homo sapien
ggcgtaaaccactgcacgcagcctaccctctgcctttttaagatgatgtatttatttaatttttgccatcattggtgcttcaccttcctgcgaaggaaattccagagcctgtatttaagctacctaggcttttacactccctttattgcctttccaaatagtatctcatttggtgtactctagtgtcctatacctcttggaaacgaaagagggcccaacctacaactaagaagggacaaaccttgaactaagtaagaccttacacacccagaaagaacactgggccctccttcttcagggacaatgcagtagccacttggcttgtggaatttactgaaggctatttcctgtaacttgctagttaacttagttttgtatttcaggcagaggtgcgctctgtaatgttgggcctttgacttcacagtactggagagctgttcacacagatgtttagacctttctctctctctctcttttcttctttctcaacaactctttcacagaggcagtcattttgaaaggttgaaatatttggcctttaccaaagagctttttttttccttaagcaaaatcctttcagaaagaaacaaatggggaagggcagattaagaatgcatatgtcccaatccacttctataggagtttaatcatattcacatgagtaaaatgatggaagaactctttaaggtaatcctttgggataaaggatcctgggaagttctctcaggtaaagaaagcttacagcagatttgtaatatatgtctggagagctatttataagaaatttaagaggattgttttgttttcctttattaaagatttaagcctttttactttgcaaaaagaaaactacaaaagttttatagatataactttgctaattttttaaacttttctgaaacgattagctgtagccaaattatgtggttacgttttgctacattagaatttgaaaatgcaatatgtgtggtaaatctactgtttgaaatttataatggtctctgatatgattcgaattttggtaacttttgaaagttattttccccctttagtcatggatttctatttgttttttaatgttaatttttctagaaagcatctgaattgactaggcttttcctatataaaaaactcaaaacttgttaactctgtactttaataaaatttaaaattaaaactgtgttgtttttttctcttctgctagatacatatataattaaagtactcaagttagttgttttgcagagatgttgccttcagatgttaatcaggtctctcaagtttcatggagtctatgctgatcctttaattgacaaataaaagatatatatctgtggtgtgcaac

SEQ ID NO: 1009 - protein, 60 aa, Homo sapien
GVNHCTQPTLCLFKMMYLFNFCHHWCFTFLRRKFQSLYLSYLGFYTPFIAFPNSISFGVL

SEQ ID NO: 1010 - DNA, 4121 bp, Homo sapien
acaatgtggtcccgaagcggccagcgccgggagctgcagcgctgagacccccagcccgccccctcgggctcccggccggggccccatcatgttctccaggaagaaacgagagctcatgaaaaccccttccatctcgaaaaagaaccgcgcgggaagccccagcccgcagccctcgggggagctgcccaggaaggatggggctgacgcggtgttccccggaccaagcctggagccgcccgctgggtcctccggcgtcaaggccacagggaccctcaagcggcccaccagcctgagccgccacgccagcgcggctggcttccccctgtcgggtgctgcctcctggacactgggccggagccaccggagcccactgacagccgccagcccgggcgagctgcccaccgagggtgccggcccggacgtcgtcgaggacatctcccatctgctggcggacgtggcccgcttcgctgagggccttgagaaacttaaggagtgtgtgttgcgtgacgacctccttgaggcccgccgcccgcgggcccacgagtgcctgggtgaggctctgcgtgtcatgcatcagatcatctccaagtacccgctgctgaacaccgtggagacgctcaccgcagccggcaccctcattgccaaggtcaaagccttccattatgagagcaacaatgatctggagaaacaggagttcgagaaggccctggagacgattgctgtggccttcagtagcacagtgtccgagttcctcatgggtgaagtggacagcagcaccctcctagcagtgcctcctggggactcgagccagtccatggaaagcctgtatggaccgggcagtgagggcacgcctcccagcctggaagactgtgacgccggctgcctgcccgccgaggaggtggacgtgctgctacagcgctgtgaggggggcgtggatgccgcactgctgtatgccaagaacatggccaagtacatgaaggacctcatcagctacctggagaagcggacgacgctggagatggagtttgccaagggcctgcagaagatcgctcacaactgcagacagagcgtcatgcaggagccccacatgccgctcctgtccatctactcgctggccctggagcaggacctggagttcggccacagcatggtgcaggcggtgggcaccttgcagacccagaccttcatgcagcccctgaccctgcggcggcttgaacacgagaagcgcaggaaggagatcaaggaggcctggcaccgtgcccagaggaagctgcaagaggcggagtccaacctgcgcaaggccaagcagggttacgtgcagcgctgcgaggaccacgacaaggctcgcttcctcgtggccaaggcggaggaggagcaggctggcagcgcgccgggagcaggcagcacggccaccaagaccctggacaagcggcggcggctggaggaggaggccaagaacaaggcggaggaagctatggccacctaccgcacctgcgtggccgacgcgaagacgcagaagcaggagctggaggataccaaggtgacggcgctgcggcagatccaggaggtcatccggcagagcgaccaaaccatcaagtcggccacgatctcctactaccagatgatgcatatgcagacggcgccgctgcccgtgcacttccagatgctgtgtgagagcagcaagctgtatgacccaggccagcagtacgcctcccacgtgcgccagctgcagcgggaccaggagcccgatgtgcactacgactttgagccccacgtctccgccaacgcctggtcccccgtcatgcgtgcccggaagagcagcttcaacgtgagtgatgtggcgcggccggaggctgccgggagccccccagaagaaggcgggtgcactgagggcacacctgccaaggaccacagggccgggcgaggacaccaggttcacaagtcatggccgctctcgatctcagactcggacagtgggctggaccccggccctggcgcaggggactttaagaagttcgagcggacgtcatccagtggtaccatgtcgtccacggaggagctggtggacccagacggtggagccggggcttcagcctttgagcaggctgacctcaacggcatgacccccgagctgccggtggccgtgcccagtggaccgttccgccacgaggggctgtccaaggcggcccgtactcaccggctccggaagctccgcacgcccgccaagtgccgcgagtgcaacagctacgtctacttccagggtgctgagtgtgaagagtgctgcctggcctgccacaagaaatgtctggagacgctggccatacagtgcgggcacaagaagctgcaaggccgcctgcagctgttcggccaggacttcagccacgcggcccgcagcgcccccgacggcgtgcccttcatcgtcaagaagtgcgtctgcgagatcgagcggcgggcgctgcgcaccaagggcatctaccgggtcaatggggtaaagacacgcgtggagaagctgtgccaggccttcgagaacggcaaggagctggtcgagctgtcgcaggcctcgccccacgacatcagcaacgtcctcaagctctacctgcgtcagcttcccgagccgctcatctccttccgcctctaccacgagctcgtagggctggccaaggacagcctgaaggcagaggccgaggccaaggcggcgtcccggggccggcaggacggctcggagagcgaggcagtggcggtggccctggcaggtcggctgcgggagctcctgcgggacctgccgcctgagaaccgggcctcgctgcagtacctgctgcgtcacctacgcaggatcgtggaggtggagcaggacaacaagatgacccccgggaacctgggcatcgtgttcgggcccacgctgcttcggccacggcccaccgaggccaccgtgtccctctcctccctggtggattatccccatcaggcccgcgtcatcgagactctcatcgtccactacggcctggtcttcgaggaggagccggaggagacccccgggggccaggacgagtcatccaaccagcgagctgaggtagtcgtccaggtgccgtacctggaggcgggcgaggcggtggtctacccgctgcaggaggcggcggcggacgggtgcagagaatcccgagttgtgtccaacgattcggactcggacctagaggaggcctccgagctgctgtcctcatcggaggccagtgccctgggccacctcagcttcctggagcagcagcagagcgaggccagcctagaggtggcttctggcagccacagcggcagtgaggagcagctggaggccacagcccgggaggacggggacggggacgaggacggcccggcccagcagctctcaggattcaacaccaaccagtccaacaacgtgctgcaggccccactgccccccatgaggctccgtggcgggcggatgacactgggctcctgcagggaaaggcagccggaattcgtgtgagctggggtggggctgggaccacaggtggcttctctcttgcctgctcctgtccctccagcacgtcccctgcaccacggcatagcttaggtgcgccgtcctggggtcgctgccgagagcgcctggacttcgacgtcccaccagcgggcgcctcctcccagaggcttccaggagcacgagggccttgcggcacaggactgtgccctgtgctgtcccctgcaccccggctcagctgagctggggaacactgctgtcgtgtgaagtcacagtggccttgttggtgcccacagggctgtgtggatggaggaagctgtccctgcccagtgcatcccccaggtcatcacggggacgcaggaggcaggccctgccctgccctctcctcacaggtctgttgcagggactccagaaaccattctgggagccgtggatgggggcggagctggggtttggtgcagtttccagggtgcagtacagcagggcctgaatactggccctggactcccttttccagaacaccaggtgtggccacctggggctcaggtacacagtggggtctctcggaagccaccgtgtggttctttcacaggcacgtttattttgctgaaataaaaagtttttaatcggg

SEQ ID NO: 1011 - protein, 1165 aa, Homo sapien
QCGPEAASAGSCSAETPSPPPRAPGRGPIMFSRKKRELMKTPSISKKNRAGSPSPQPSGELPRKDGADAVFPGPSLEPPAGSSGVKATGTLKRPTSLSRHASAAGFPLSGAASWTLGRSHRSPLTAASPGELPTEGAGPDVVEDISHLLADVARFAEGLEKLKECVLRDDLLEARRPRAHECLGEALRVMHQIISKYPLLNTVETLTAAGTLIAKVKAFHYESNNDLEKQEFEKALETIAVAFSSTVSEFLMGEVDSSTLLAVPPGDSSQSMESLYGPGSEGTPPSLEDCDAGCLPAEEVDVLLQRCEGGVDAALLYAKNMAKYMKDLISYLEKRTTLEMEFAKGLQKIAHNCRQSVMQEPHMPLLSIYSLALEQDLEFGHSMVQAVGTLQTQTFMQPLTLRRLEHEKRRKEIKEAWHRAQRKLQEAESNLRKAKQGYVQRCEDHDKARFLVAKAEEEQAGSAPGAGSTATKTLDKRRRLEEEAKNKAEEAMATYRTCVADAKTQKQELEDTKVTALRQIQEVIRQSDQTIKSATISYYQMMHMQTAPLPVHFQMLCESSKLYDPGQQYASHVRQLQRDQEPDVHYDFEPHVSANAWSPVMRARKSSFNVSDVARPEAAGSPPEEGGCTEGTPAKDHRAGRGHQVHKSWPLSISDSDSGLDPGPGAGDFKKFERTSSSGTMSSTEELVDPDGGAGASAFEQADLNGMTPELPVAVPSGPFRHEGLSKAARTHRLRKLRTPAKCRECNSYVYFQGAECEECCLACHKKCLETLAIQCGHKKLQGRLQLFGQDFSHAARSAPDGVPFIVKKCVCEIERRALRTKGIYRVNGVKTRVEKLCQAFENGKELVELSQASPHDISNVLKLYLRQLPEPLISFRLYHELVGLAKDSLKAEAEAKAASRGRQDGSESEAVAVALAGRLRELLRDLPPENRASLQYLLRHLRRIVEVEQDNKMTPGNLGIVFGPTLLRPRPTEATVSLSSLVDYPHQARVIETLIVHYGLVFEEEPEETPGGQDESSNQRAEVVVQVPYLEAGEAVVYPLQEAAADGCRESRVVSNDSDSDLEEASELLSSSEASALGHLSFLEQQQSEASLEVASGSHSGSEEQLEATAREDGDGDEDGPAQQLSGFNTNQSNNVLQAPLPPMRLRGGRMTLGSCRERQPEFV

SEQ ID NO: 1012 - DNA, 1774 bp, Homo sapien
ggcacgagggagaactagtctcagtttttttttttttttttttaggtgagaaagccagctgactttattgctctgggggcagggggctcaggagctcttggtggggcgggtccgcttcctcttcaccatcacaggcttctggctgcgcaggatggcgctggccctgcggatggctgccatgcgcaggtcggggcggtacttgttcttgcggatcatgtgtctgatgctgctgagcgtggcgcgagcattcttgttgatggtggtccgcacataggaggtggcaggcttccgctggccggatctccgcttaatgaccaccacgacacctttgccgtcggctgccggctccacgcccacagtcttgcggtgaatcagtccgttgtagcggaaggaattgcgggccttcaagttattgggctcagtgctgtaggtctgcttattcctcttgatcaggaaactggagcagttccgcacgaccatccattgcagatgcgcagacatggcggcggctcccttcgcagcggcgacctgaccttcagcgcctcggctccagcgccatggcgccctccaggaagttcttcgttgggggaaactggaagatgaacgggcggaagcagagtctgggggagctcatcggcactctgaacgcggccaaggtgccggccgacaccgaggtggtttgtgctccccctactgcctatatcgacttcgcccggcagaagctagatcccaagattgctgtggctgcgcagaactgctacaaagtgactaatggggcttttactggggagatcagccctggcatgatcaaagactgcggagccacgtgggtggtcctggggcactcagagagaaggcatgtctttggggagtcagatgagctgattgggcagaaagtggcccatgctctggcagagggactcggagtaatcgcctgcattggggagaagctagatgaaagggaagctggcatcactgagaaggttgttttcgagcagacaaaggtcatcgcagataacgtgaaggactggagcaaggtcgtcctggcctatgagcctgtgtgggccattggtactggcaagactgcaacaccccaacaggcccaggaagtacacgagaagctccgaggatggctgaagtccaacgtctctgatgcggtggctcagagcacccgtatcatttatggaggctctgtgactggggcaacctgcaaggagctggccagccagcctgatgtggatggcttccttgtgggtggtgcttccctcaagcccgaattcgtggacatcatcaatgccaaacaatgagccccatccatcttccctacccttcctgccaagccagggactaagcagcccagaagcccagtaactgccctttccctgcatatgcttctgatggtgtcatctgctccttcctgtggcctcatccaaactgtatcttcctttactgtttatatcttcaccctgtaatggttgggaccaggccaatcccttctccacttactataatggttggaactaaacgtcaccaaggtggcttctccttggctgagagatggaaggcgtggtgggatttgctcctgggttccctaggccctagtgagggcagaagagaaaccatcctctcccttcttacaccgtgaggccaagatcccctcagaaggcaggagtgctgccctctcccatggtgcccgtgcctctgtgctgtgtatgtgaaccacccatgtgagggaataaacctggcactaggtaaaaaaaaaaaaaaaaaaaaa

SEQ ID NO: 1013 - protein, 249 aa, Homo sapien
MAPSRKFFVGGNWKMNGRKQSLGELIGTLNAAKVPADTEVVCAPPTAYIDFARQKLDPKIAVAAQNCYKVTNGAFTGEISPGMIKDCGATWVVLGHSERRHVFGESDELIGQKVAHALAEGLGVIACIGEKLDEREAGITEKVVFEQTKVIADNVKDWSKVVLAYEPVWAIGTGKTATPQQAQEVHEKLRGWLKSNVSDAVAQSTRIIYGGSVTGATCKELASQPDVDGFLVGGASLKPEFVDIINAKQ

SEQ ID NO: 1014 - DNA, 10302 bp, Homo sapien
atggccaagtatggagaacatgaagccagtcctgacaatgggcagaacgaattcagtgatatcattaagtccagatctgatgaacacaatgacgtacagaagaaaacctttaccaaatggataaatgctcgattttcaaagagtgggaaaccacccatcaatgatatgttcacagacctcaaagatggaaggaagctattggatcttctagaaggcctcacaggaacatcactgccaaaggaacgtggttccacaagggtacatgccttaaataacgtcaacagagtgctgcaggttttacatcagaacaatgtggaattagtgaatatagggggaactgacattgtggatggaaatcacaaactgactttggggttactttggagcatcattttgcactggcaggtgaaagatgtcatgaaggatgtcatgtcggacctgcagcagacgaacagtgagaagatcctgctcagctgggtgcgtcagaccaccaggccctacagccaagtcaacgtcctcaacttcaccaccagctggacagatggactcgcctttaatgctgtcctccaccgacataaacctgatctcttcagctgggataaagttgtcaaaatgtcaccaattgagagacttgaacatgccttcagcaaggctcaaacttatttgggaattgaaaagctgttagatcctgaagatgttgccgttcggcttcctgacaagaaatccataattatgtatttaacatctttgtttgaggtgctacctcagcaagtcaccatagacgccatccgtgaggtagagacactcccaaggaaatataaaaaagaatgtgaagaagaggcaattaatatacagagtacagcgcctgaggaggagcatgagagtccccgagctgaaactcccagcactgtcactgaggtcgacatggatctggacagctatcagattgcgttggaggaagtgctgacctggttgctttctgctgaggacactttccaggagcaggatgatatttctgatgatgttgaagaagtcaaagaccagtttgcaacccatgaagcttttatgatggaactgactgcacaccagagcagtgtgggcagcgtcctgcaggcaggcaaccaactgataacacaaggaactctgtcagacgaagaagaatttgagattcaggaacagatgaccctgctgaatgctagatgggaggctcttagggtggagagtatggacagacagtcccggctgcacgatgtgctgatggaactgcagaagaagcaactgcagcagctctccgcctggttaacactcacagaggagcgcattcagaagatggaaacttgccccctggatgatgatgtaaaatctctacaaaagctgctagaagaacataaaagtttgcaaagtgatcttgaggctgaacaggtgaaagtaaattcactaactcacatggtggtcattgttgatgaaaacagtggtgagagcgctacagctatcctagaagaccagttacagaaacttggtgagcgctggacagcagtatgccgttggactgaagaacgctggaataggttacaagaaatcaatatattgtggcaggaattattggaagaacagtgcttgttgaaagcttggttaaccgaaaaagaagaggctttaaataaagtccagacaagcaacttcaaagaccaaaaggaactaagtgtcagtgttcgacgtctggctattttgaaggaagacatggaaatgaagcgtcaaacattggatcagctgagtgagattggccaggatgtgggacaattacttgataattccaaggcatctaagaagatcaacagtgactcagaggaactgactcaaagatgggattctttggttcagagactagaagattcctccaaccaggtgactcaggctgtagcaaagctggggatgtctcagattcctcagaaggaccttttggagactgttcgtgtaagagaacaagcaattacaaaaaaatctaagcaggaactgcctcctcctcctcccccaaagaagagacagatccatgtggatattgaagctaagaaaaagtttgatgctataagtgcagagctgttgaactggattttgaaatggaaaactgccattcagaccacagagataaaagagtatatgaagatgcaagacacttccgaaatgaaaaagaagttgaaggcattagaaaaagaacagagagaaagaatccccagagcagatgaattaaaccaaactggacaaatccttgtggagcaaatgggaaaagaaggccttcctactgaagaaataaaaaatgttctggagaaggtttcatcagaatggaagaatgtatctcaacatttggaagatctagaaagaaagattcagctacaggaagatataaatgcttatttcaagcagcttgatgagcttgaaaaggtcatcaagacaaaggaggagtgggtaaaacacacttccatttctgaatcttcccggcagtccttgccaagcttgaaggattcctgtcagcgggaattgacaaatcttcttggccttcaccccaaaattgaaatggctcgtgcaagctgctcggccctgatgtctcagccttctgccccagattttgtccagcggggcttcgatagctttctgggccgctaccaagctgtacaagaggctgtagaggatcgtcaacaacatctagagaatgaactgaagggccaacctggacatgcatatctggaaacattgaaaacactgaaagatgtgctaaatgattcagaaaataaggcccaggtgtctctgaatgtccttaatgatcttgccaaggtggagaaggccctgcaagaaaaaaagacccttgatgaaatccttgagaatcagaaacctgcattacataaacttgcagaagaaacaaaggctctggagaaaaatgttcatcctgatgtagaaaaattatataagcaagaatttgatgatgtgcaaggaaagtggaacaagctaaaggtcttggtttccaaagatctacatttgcttgaggaaattgctctcacactcagagcttttgaggccgattcaacagtcattgagaagtggatggatggcgtgaaagacttcttaatgaaacagcaggctgcccaaggagacgacgcaggtctacagaggcagttagaccagtgctctgcatttgttaatgaaatagaaacaattgaatcatctctgaaaaacatgaaggaaatagagactaatcttcgaagtggtccagttgctggaataaaaacttgggtgcagacaagactaggtgactaccaaactcaactggagaaacttagcaaggagatcgctactcaaaaaagtaggttgtctgaaagtcaagaaaaagctgcgaacctgaagaaagacttggcagagatgcaggaatggatgacccaggccgaggaagaatatttggagcgggattttgagtacaagtcaccagaagagcttgagagtgctgtggaagagatgaagagggcaaaagaggatgtgttgcagaaggaggtgagagtgaagattctcaaggacaacatcaagttattagctgccaaggtgccctctggtggccaggagttgacgtctgagctgaatgttgtgctggagaattaccaacttctttgtaatagaattcgaggaaagtgccacacgctagaggaggtctggtcttgttggattgaactgcttcactatttggatcttgaaactacctggttaaacactttggaagagcggatgaagagcacagaggtcctgcctgagaagacggatgctgtcaacgaagccctggagtctctggaatctgttctgcgccacccggcagataatcgcacccagattcgagagcttggccagactctgattgatggggggatcctggatgatataatcagtgagaaactggaggctttcaacagccgatatgaagatctaagtcacctggcagagagcaagcagatttctttggaaaagcaactccaggtgctgcgggaaactgaccagatgcttcaagtcttgcaagagagcttgggggagctggacaaacagctcaccacatacctgactgacaggatagatgctttccaagttccacaggaagctcagaaaatccaagcagagatctcagcccatgagctaaccctagaggagttgagaagaaatatgcgttctcagcccctgacctccccagagagtaggactgccagaggaggaagtcagatggatgtgctacagaggaaactccgagaggtgtccacaaagttccagcttttccagaagccagctaacttcgagcagcgcatgctggactgcaagcgtgtgctggatggcgtgaaagcagaacttcacgttctggatgtgaaggacgtagaccctgacgtcatacagacgcacctggacaagtgtatgaaactgtataaaactttgagtgaagtcaaacttgaagtggaaactgtgattaaaacaggaagacatattgtccagaaacagcaaacggacaacccaaaagggatggatgagcagctgacttccctgaaggttctttacaatgacctgggcgcacaggtgacagaaggaaaacaggatctggaaagagcatcacagttggcccggaaaatgaagaaagaggctgcttctctctctgaatggctttctgctactgaaactgaattggtacagaagtccacttcagaaggtctgcttggtgacttggatacagaaatttcctgggctaaaaatgttctgaaggatctggaaaagagaaaagctgatttaaataccatcacagagagtagtgctgccctgcaaaacttgattgagggcagtgagcctattttagaagagaggctctgcgtccttaacgctgggtggagccgagttcgtacctggactgaagattggtgcaataccttgatgaaccatcagaaccagctagaaatatttgatgggaacgtggctcacataagtacctggctttatcaagctgaagctctattggatgaaattgaaaagaaaccaacaagtaaacaggaagaaattgtgaagcgtttagtatctgagctggatgatgccaacctccaggttgaaaatgtccgcgatcaagcccttattttgatgaatgcccgtggaagctcaagcagggagcttgtagaaccaaagttagctgagctgaataggaactttgaaaaggtgtctcaacatatcaaaagtgccaaattgctaattgctcaggaaccattataccaatgtttggtcaccactgaaacatttgaaactggtgtgcctttctctgacttggaaaaattagaaaatgacatagaaaatatgttaaaatttgtggaaaaacacttggaatccagtgatgaagatgaaaagatggatgaggagagtgcccagattgaggaagttctacaaagaggagaagaaatgttacatcaacctatggaagataataaaaaagaaaagatccgtttgcaattattacttttgcatactagatacaacaaaattaaggcaatccctattcaacagaggaaaatgggtcaacttgcttctggaattagatcatcacttcttcctacagattatctggttgaaattaacaaaattttactttgcatggatgatgttgaattatcgcttaatgttccagagctcaacactgctatttacgaagacttctcttttcaggaagactctctgaagaatatcaaagaccaactggacaaacttggagagcagattgcagtcattcatgaaaaacagccagatgtcatccttgaagcctctggacctgaagccattcagatcagagatacacttactcagctgaatgcaaaatgggacagaattaatagaatgtacagtgatcggaaaggttgttttgacagggcaatggaagaatggagacagttccattgtgaccttaatgacctcacacagtggataacagaggctgaagaattactggttgatacctgtgctccaggtggcagcctggacttagagaaagccaggatacatcagcaggaacttgaggtgggcatcagcagccaccagcccagttttgcagcactaaaccgaactggggatgggattgtgcagaaactctcccaggcagatggaagcttcttgaaagaaaaactggcaggtttaaaccaacgctgggatgcaattgttgcagaagtgaaggataggcagccaaggctaaaaggagaaagtaagcaggtgatgaagtacaggcatcagctagatgagattatctgttggttaacaaaggctgagcatgctatgcaaaagagatcaaccaccgaattgggagaaaacctgcaagaattaagagacttaactcaagaaatggaagtacatgctgaaaaactcaaatggctgaatagaactgaattggagatgctttcagataaaagtctgagtttacctgaaagggataaaatttcagaaagcttaaggactgtaaatatgacatggaataagatttgcagagaggtgcctaccaccctgaaggaatgcatccaggagcccagttctgtttcacagacaaggattgctgctcatcctaatgtccaaaaggtggtgctagtatcatctgcgtcagatattcctgttcagtctcatcgtacttcggaaatttcaattcctgctgatcttgataaaactataacagaactagccgactggctggtattaatcgaccagatgctgaagtccaacattgtcactgttggggatgtagaagagatcaataagaccgtttcccgaatgaaaattacaaaggctgacttagaacagcgccatcctcagctggattatgtttttacattggcacagaatttgaaaaataaagcttccagttcagatatgagaacagcaattacagaaaaattggaaagggtcaagaaccagtgggatggcacccagcatggcgttgagctaagacagcagcagcttgaggacatgattattgacagtcttcagtgggatgaccatagggaggagactgaagaactgatgagaaaatatgaggctcgactctatattcttcagcaagcccgacgggatccactcaccaaacaaatttctgataaccaaatactgcttcaagaactgggtcctggagatggtatcgtcatggcgttcgataacgtcctgcagaaactcctggaggaatatgggagtgatgacacaaggaatgtgaaagaaaccacagagtacttaaaaacatcatggatcaatctcaaacaaagtattgctgacagacagaacgccttggaggctgagtggaggacggtgcaggcctctcgcagagatctggaaaacttcctgaagtggatccaagaagcagagaccacagtgaatgtgcttgtggatgcctctcatcgggagaatgctcttcaggatagtatcttggccagggaactcaaacagcagatgcaggacatccaggcagaaattgatgcccacaatgacatatttaaaagcattgacggaaacaggcagaagatggtaaaagctttgggaaattctgaagaggctactatgcttcaacatcgactggatgatatgaaccaaagatggaatgacttaaaagcaaaatctgctagcatcagggcccatttggaggccagcgctgagaagtggaacaggttgctgatgtccttagaagaactgatcaaatggctgaatatgaaagatgaagagcttaagaaacaaatgcctattggaggagatgttccagccttacagctccagtatgaccattgtaaggccctgagacgggagttaaaggagaaagaatattctgtcctgaatgctgtcgaccaggcccgagttttcttggctgatcagccaattgaggcccctgaagagccaagaagaaacctacaatcaaaaacagaattaactcctgaggagagagcccaaaagattgccaaagccatgcgcaaacagtcttctgaagtcaaagaaaaatgggaaagtctaaatgctgtaactagcaattggcaaaagcaagtggacaaggcattggagaaactcagagacctgcagggagctatggatgacctggacgctgacatgaaggaggcagagtccgtgcggaatggctggaagcccgtgggagacttactcattgactcgctgcaggatcacattgaaaaaatcatggcatttagagaagaaattgcaccaatcaactttaaagttaaaacggtgaatgatttatccagtcagctgtctccacttgacctgcatccctctctaaagatgtctcgccagctagatgaccttaatatgcgatggaaacttttacaggtttctgtggatgatcgccttaaacagcttcaggaagcccacagagattttggaccatcctctcagcattttctctctacgtcagtccagctgccgtggcaaagatccatttcacataataaagtgccctattacatcaaccatcaaacacagaccacctgttgggaccatcctaaaatgaccgaactctttcaatcccttgctgacctgaataatgtacgtttttctgcctaccgtacagcaatcaaaatccgaagactacaaaaagcactatgtttggatctcttagagttgagtacaacaaatgaaattttcaaacagcacaagttgaaccaaaatgaccagctcctcagtgttccagatgtcatcaactgtctgacaacaacttatgatggacttgagcaaatgcataaggacctggtcaacgttccactctgtgttgatatgtgtctcaattggttgctcaatgtctatgacacgggtcgaactggaaaaattagagtgcagagtctgaagattggattaatgtctctctccaaaggtctcttggaagaaaaatacagatatctctttaaggaagttgcggggccgacagaaatgtgtgaccagaggcagctgggcctgttacttcatgatgccatccagatcccccggcagctaggtgaagtagcagcttttggaggcagtaatattgagcctagtgttcgcagctgcttccaacagaataacaataaaccagaaataagtgtgaaagagtttatagattggatgcatttggaaccacagtccatggtttggctcccagttttacatcgagtggcagcagcggagactgcaaaacatcaggccaaatgcaacatctgtaaagaatgtccaattgtcgggttcaggtatagaagccttaagcattttaactatgatgtctgccagagttgtttcttttcgggtcgaacagcaaaaggtcacaaattacattacccaatggtggaatattgtatacctacaacatctggggaagatgtacgagacttcacaaaggtacttaagaacaagttcaggtcgaagaagtactttgccaaacaccctcgacttggttacctgcctgtccagacagttcttgaaggtgacaacttagagactcctatcacactcatcagtatgtggccagagcactatgacccctcacaatctcctcaactgtttcatgatgacacccattcaagaatagaacaatatgccacacgactggcccagatggaaaggactaatgggtcttttctcactgatagcagctccaccacaggaagtgtggaagacgagcacgccctcatccagcagtattgccaaacactcggaggagagtccccagtgagccagccgcagagcccagctcagatcctgaagtcagtagagagggaagaacgtggagaactggagaggatcattgctgacctggaggaagaacaaagaaatctacaggtggagtatgagcagctgaaggaccagcacctccgaagggggctccctgtcggttcaccgccagagtcgattatatctccccatcacacgtctgaggattcagaacttatagcagaagcaaaactcctcaggcagcacaaaggtcggctggaggctaggatgcagattttagaagatcacaataaacagctggagtctcagctccaccgcctccgacagctgctggagcagcctgaatctgattcccgaatcaatggtgtttccccatgggcttctcctcagcattctgcactgagctactcgcttgatccagatgcctccggcccacagttccaccaggcagcgggagaggacctgctggccccaccgcacgacaccagcacggatctcacggaggtcatggagcagattcacagcacgtttccatcttgctgcccaaatgttcccagcaggccacaggcaatgtga

SEQ ID NO: 1015 - protein, 2000 aa, Homo sapien
MAKYGEHEASPDNGQNEFSDIIKSRSDEHNDVQKKTFTKWINARFSKSGKPPINDMFTDLKDGRKLLDLLEGLTGTSLPKERGSTRVHALNNVNRVLQVLHQNNVELVNIGGTDIVDGNHKLTLGLLWSIILHWQVKDVMKDVMSDLQQTNSEKILLSWVRQTTRPYSQVNVLNFTTSWTDGLAFNAVLHRHKPDLFSWDKVVKMSPIERLEHAFSKAQTYLGIEKLLDPEDVAVRLPDKKSIIMYLTSLFEVLPQQVTIDAIREVETLPRKYKKECEEEAINIQSTAPEEEHESPRAETPSTVTEVDMDLDSYQIALEEVLTWLLSAEDTFQEQDDISDDVEEVKDQFATHEAFMMELTAHQSSVGSVLQAGNQLITQGTLSDEEEFEIQEQMTLLNARWEALRVESMDRQSRLHDVLMELQKKQLQQLSAWLTLTEERIQKMETCPLDDDVKSLQKLLEEHKSLQSDLEAEQVKVNSLTHMVVIVDENSGESATAILEDQLQKLGERWTAVCRWTEERWNRLQEINILWQELLEEQCLLKAWLTEKEEALNKVQTSNFKDQKELSVSVRRLAILKEDMEMKRQTLDQLSEIGQDVGQLLDNSKASKKINSDSEELTQRWDSLVQRLEDSSNQVTQAVAKLGMSQIPQKDLLETVRVREQAITKKSKQELPPPPPPKKRQIHVDIEAKKKFDAISAELLNWILKWKTAIQTTEIKEYMKMQDTSEMKKKLKALEKEQRERIPRADELNQTGQILVEQMGKEGLPTEEIKNVLEKVSSEWKNVSQHLEDLERKIQLQEDINAYFKQLDELEKVIKTKEEWVKHTSISESSRQSLPSLKDSCQRELTNLLGLHPKIEMARASCSALMSQPSAPDFVQRGFDSFLGRYQAVQEAVEDRQQHLENELKGQPGHAYLETLKTLKDVLNDSENKAQVSLNVLNDLAKVEKALQEKKTLDEILENQKPALHKLAEETKALEKNVHPDVEKLYKQEFDDVQGKWNKLKVLVSKDLHLLEEIALTLRAFEADSTVIEKWMDGVKDFLMKQQAAQGDDAGLQRQLDQCSAFVNEIETIESSLKNMKEIETNLRSGPVAGIKTWVQTRLGDYQTQLEKLSKEIATQKSRLSESQEKAANLKKDLAEMQEWMTQAEEEYLERDFEYKSPEELESAVEEMKRAKEDVLQKEVRVKILKDNIKLLAAKVPSGGQELTSELNVVLENYQLLCNRIRGKCHTLEEVWSCWIELLHYLDLETTWLNTLEERMKSTEVLPEKTDAVNEALESLESVLRHPADNRTQIRELGQTLIDGGILDDIISEKLEAFNSRYEDLSHLAESKQISLEKQLQVLRETDQMLQVLQESLGELDKQLTTYLTDRIDAFQVPQEAQKIQAEISAHELTLEELRRNMRSQPLTSPESRTARGGSQMDVLQRKLREVSTKFQLFQKPANFEQRMLDCKRVLDGVKAELHVLDVKDVDPDVIQTHLDKCMKLYKTLSEVKLEVETVIKTGRHIVQKQQTDNPKGMDEQLTSLKVLYNDLGAQVTEGKQDLERASQLARKMKKEAASLSEWLSATETELVQKSTSEGLLGDLDTEISWAKNVLKDLEKRKADLNTITESSAALQNLIEGSEPILEERLCVLNAGWSRVRTWTEDWCNTLMNHQNQLEIFDGNVAHISTWLYQAEALLDEIEKKPTSKQEEIVKRLVSELDDANLQVENVRDQALILMNARGSSSRELVEPKLAELNRNFEKVSQHIKSAKLLIAQEPLYQCLVTTETFETGVPFSDLEKLENDIENMLKFVEKHLESSDEDEKMDEESAQIEEVLQRGEEMLHQPMEDNKKEKIRLQLLLLHTRYNKIKAIPIQQRKMGQLASGIRSSLLPTDYLVEINKILLCMDDVELSLNVPELNTAIYEDFSFQEDSLKNIKDQLDKLGEQIAVIHEKQPDVILEASGPEAIQIRDTLTQLNAKWDRINRMYSDRKGCFDRAMEEWRQFHCDLNDLTQWITEAEELLV

SEQ ID NO: 1016 - DNA, 5113 bp, Homo sapien
gctggcggagagcggcctgcgggcgatcgggccgagcctcgctcaaggagcacccccggggcaccctcctgtccgatggcagcccggccctgtccaggaatgtcggtatgacggtctctcagaaagggggtccccagccaacaccgagcccggctggccctgggacgcaactcggaccaatcacaggagagatggatgaagccgattctgcgtttttaaaatttaagcagacagctgatgactctctgtcccttacatctccaaacaccgagtccatttttgtagaagatccctacaccgcctcgctgaggagtgagattgagtcagacggccacgagtttgaagctgagtcctggagcctcgccgtggatgcagcctacgccaagaagcaaaagagggaggtggtgaaaagacaagatgtcctttatgagctgatgcagacagaggtgcaccacgtgcggacgctcaagatcatgctgaaggtgtactccagggccctgcaggaggagctgcagttcagcagcaaggccattggccgcctcttcccatgcgctgacgacctgctggagacgcacagccacttcctcgctcggctcaaggagcgccgccaggagtccctggaggagggcagtgaccggaattatgtcatccagaaaatcggcgacctcctggttcagcagttttcaggtgaaaatggggagagaatgaaagaaaagtacggtgtgttttgtagtggccacaatgaagctgttagtcattacaagttgctgcttcagcaaaacaagaaatttcaaaacttgatcaagaaaattggcaacttctccatcgtgcggcggcttggcgtgcaggagtgcattctcctggttacacaacgcataaccaaatacccagtgctggtggagcgcatcatccagaacacggaagctggcactgaggactatgaagacctgacccaggccttgaacctcatcaaagatatcatctcacaagtggacgccaaggtcagtgagtgtgagaagggccagcgcctcagggagatcgcagggaagatggacctgaagtcttccagcaaactcaagaacgggctcaccttccgcaaggaagacatgcttcagcggcagctccacctggagggcatgctatgctggaagaccacatcagggcgcttgaaagatatcctggctatcctgctgaccgacgtacttttgctgctacaagaaaaagatcagaaatacgtctttgcttctgtggactcaaagccacccgtcatctcgttacaaaagctcatcgtgagggaagtggccaacgaggagaaagcgatgtttctgatcagcgcctccttgcaagggccggagatgtatgaaatctacacgagctccaaagaggacaggaacgcctggatggcccacatccaaagggctgtggagagctgccctgacgaggaggaggggcccttcagcctgcccgaagaggaaaggaaggtggtcgaggcccgcgccacgagactccgggactttcaagagcggttgagcatgaaagaccagctgatcgcacagagcctcctagagaaacagcagatctacctggagatggccgagatgggcggcctcgaagacctgccccagccccgaggcctattccgtggaggggacccatccgagaccctgcagggggagctaattctcaagtcggccatgagcgagatcgagggcatccagagcctgatctgcaggcggctgggcagcgccaacggccaggcggaagacggaggcagctccacaggcccgcccaggagggctgagaccttcgcgggctacgactgcacaaacagccccaccaagaatggcagtttcaagaagaaagtcagcagcactgaccccaggccccgagactggcgaggccccccaaacagcccggacttgaagctcagtgacagtgacattcctgggagctctgaggaatcgccgcaggtggtggaggcgccaggcacggaatccgatccccgtctgcccaccgtcctggagtcggagcttgtccagcggatccagacactgtcccagctgctcctgaaccttcaggcggtaatcgcccaccaggacagctatgtggagacgcagcgggctgccatccaggagcgggagaagcagttccggctgcagtcgacgcgtgggaacctgctgctggagcaggagcggcaacgcaacttcgagaagcagcgggaggagcgcgcggccctggagaagctgcagagccagctgcggcacgagcagcagcgctgggagcgcgagcgccagtggcagcaccaggagctggagcgtgcgggcgcgcggctgcaggagcgcgagggcgaggcgcggcagctacgcgagcggctggagcaggagcgggccgagctggagcgccagcgccaggcctaccagcacgacctggagcggctgcgcgaggcccagcgtgccgtggagcgcgagcgggagcgcctggagctgctgcgccgcctcaagaagcagaacaccgcgccaggcgcgctgccgcccgacacactggccgaggcccagcccccaagccaccctcccagcttcaacggggaagggctggagggccctcgggtgagcatgctgccatccggcgtggggccagagtacgcagagcgccccgaggtggctcgccgggacagcgcccccaccgagagccggctggccaagagcgatgtgcccatccagctgctcagcgccaccaaccagttccagaggcaggcggccgtgcagcagcagatccccaccaagctggcggcctccaccaagggtggcaaggacaagggcggcaagagcaggggctctcagcgctgggagagctcagcgtccttcgacctgaagcagcagctgctgctcaacaagctcatggggaaagatgagagcacctcacggaaccgccgctcgctgagccctatcctgcccggcagacacagtcctgcgcccccaccagaccctggcttccccgccccgagcccaccgccagctgacagcccctccgagggcttctctctcaaggccgggggcacagccctcctgcccggccccccagctccctcgccactgccggccacaccactcagcgccaaggaggacgccagcaaagaagacgtcatcttcttctaaaagggccgtgactcaaggaaagtttttaatggaaagttgagccagaactaaaccagggagctgtctgaaatcatagcaccccatccgggtggcggggagatcaactccgagctgtttttccgaggcagtgaggaacggtgccggctctgcacggagctgaggacaggacagaccttgctttgagaaggagctgccggccggggccacgctccacagccgccgcgcgacagtggagccaagggttagggcaccaggaggggccaggtggcgtcggcagcatctgtccccagaatcaggcagaatccacttcccaaacagagccccacgcaggttcaccatgaacctcagggtcagggaatgagccaggcacgggggcatgggcagagagggccacggggcagggcccactgagggaacatcagtggccctccagtcaggttctgtgggtttggaagcccatcgtgaaaggggctgacctttgcccctttttacttggcattggttttgaaaccagctgtttcccaaactctgcttcccaagggcaaccgttgctgttcacacgctcagcctgtctgggggagcgggcctctagcttcagccagggcgggtacacaccctgggcacagggtcctcagcccccgggaaatgagctcccagggctggcgtcccaccttccaggtgggggctggcacatcacagactgtcgagagcgccatgtcccagggcatgcagaggttgcacctagagacgttgcagcaagtggacaagtggccgctgtgcgggcccctcgcttgtagtgagctgttgcagcttacggtccgttccctggaggggtggaggaaggaggtgttgggcagcatcaaaggtgctgggacatcccagggtggtgagatccatccacgatccagctccggtggagaaagggcccatgtcaagccttgttctgcaccccaagcattggtggtaggactgggtcctggctgatcgtccttgttcccagtggggtacatgtgagcccctgccagggccaagtccttctcccgaacccagggtcctgggaactgcagatcccggggggattcagcccttctcccactgtgctggcagaggcactcctgtgacgctgaatacagtgaacagggacattcccgccactcggggacagatgggcacaagggaggggaaactccatcaggaagtgctcccctgggcagaggcgcccactgggtgctgtgggctcaggagggggcggggcaggagctggtgccaaccgggaaccagagccccacagccatacagcccattggtgacaaggtcctgagaacacagtggccaggtgtccccaggctcctggcccctccgacgacctcaactctgcccagcccggtccctggccatcagcgacgctgtccgccccccgtcagatcccatgtgtgccatgtttatcatcagtgttttgtatttttgtactgagtatcggagcactttacagaagctgactgtacattcctgttctgttgtgaagagaacattcccagaccctggcaccctcctgagccggcgtgtgccggtccagccctccgagatgccacaattccttggatgggggagaagttcaaggaatttctgctcggccacgcggtgggaaccccgcgtccccgccatgtggcagaggggtctcagtcgtgctaggcatcgggcggcagcgccgacagcccttccctcgccagtgcccctcggccactcctgggttggagcccgattttatttgtaaagttgacagtcgagcaaatgttcctattttcgtgggatctgcacacgtctttgtcagttgtggtcatgatcttagtcacctgctaattatttttacaatgattacaacatttcctcactgcgggatatttctgacccgctttagaacttaagacctgattctagcaataaacgtgtccgagatg

SEQ ID NO: 1017 - protein, 1015 aa, Homo sapien
MTVSQKGGPQPTPSPAGPGTQLGPITGEMDEADSAFLKFKQTADDSLSLTSPNTESIFVEDPYTASLRSEIESDGHEFEAESWSLAVDAAYAKKQKREVVKRQDVLYELMQTEVHHVRTLKIMLKVYSRALQEELQFSSKAIGRLFPCADDLLETHSHFLARLKERRQESLEEGSDRNYVIQKIGDLLVQQFSGENGERMKEKYGVFCSGHNEAVSHYKLLLQQNKKFQNLIKKIGNFSIVRRLGVQECILLVTQRITKYPVLVERIIQNTEAGTEDYEDLTQALNLIKDIISQVDAKVSECEKGQRLREIAGKMDLKSSSKLKNGLTFRKEDMLQRQLHLEGMLCWKTTSGRLKDILAILLTDVLLLLQEKDQKYVFASVDSKPPVISLQKLIVREVANEEKAMFLISASLQGPEMYEIYTSSKEDRNAWMAHIQRAVESCPDEEEGPFSLPEEERKVVEARATRLRDFQERLSMKDQLIAQSLLEKQQIYLEMAEMGGLEDLPQPRGLFRGGDPSETLQGELILKSAMSEIEGIQSLICRRLGSANGQAEDGGSSTGPPRRAETFAGYDCTNSPTKNGSFKKKVSSTDPRPRDWRGPPNSPDLKLSDSDIPGSSEESPQVVEAPGTESDPRLPTVLESELVQRIQTLSQLLLNLQAVIAHQDSYVETQRAAIQEREKQFRLQSTRGNLLLEQERQRNFEKQREERAALEKLQSQLRHEQQRWERERQWQHQELERAGARLQEREGEARQLRERLEQERAELERQRQAYQHDLERLREAQRAVERERERLELLRRLKKQNTAPGALPPDTLAEAQPPSHPPSFNGEGLEGPRVSMLPSGVGPEYAERPEVARRDSAPTESRLAKSDVPIQLLSATNQFQRQAAVQQQIPTKLAASTKGGKDKGGKSRGSQRWESSASFDLKQQLLLNKLMGKDESTSRNRRSLSPILPGRHSPAPPPDPGFPAPSPPPADSPSEGFSLKAGGTALLPGPPAPSPLPATPLSAKEDASKEDVIFF

SEQ ID NO: 1018 - DNA, 2577 bp, Homo sapien
cacatgtcggcgcaggcggccaaagtcagtaaaaaggagctcaactccaaccacgacggggccgacgagacctcagaaaaagaacagcaagaagcgattgaacacattgatgaagtacaaaatgaaatagacagacttaatgaacaagccagtgaggagattttgaaagtagaacagaaatataacaaactccgccaaccattttttcagaagaggtcagaattgatcgccaaaatcccaaatttttgggtaacaacatttgtcaaccatccacaagtgtctgcactgcttggggaggaagatgaagaggcactgcattatttgaccagagttgaagtgacagaatttgaagatattaaatcaggttacagaatagatttttattttgatgaaaatccttactttgaaaataaagttctctccaaagaatttcatctgaatgagagtggtgatccatcttcgaagtccaccgaaatcaaatggaaatctggaaaggatttgacgaaacgttcgagtcaaacgcagaataaagccagcaggaagaggcagcatgaggaaccagagagcttctttacctggtttactgaccattctgatgcaggtgctgatgagttaggagaggtcatcaaagatgatatttggccaaacccattacagtactacttggttcccgatatggatgatgaagaaggagaaggagaagaagatgatgatgatgatgaagaggaggaaggattagaagatattgacgaagaaggggatgaggatgaaggtgaagaagatgaagatgatgatgaaggggaggaaggagaggaggatgaaggagaagatgactaaatagaacactgatggattccaaccttcctttttttaaattttctccagtccctgggagcaagttgcagtctttttttttttttttttttttttccctcttgtgctcagtcgccctgttcttgaggtctcttttctctactccatggttctcaatttatttggggggaaataccttgagcagaatacaatgggaaaagagtctctacccctttctgttcgaagttcatttttatcccttcctgtctgaacaaaaactgtatggaatcaacaccaccgagctctgtgggaaaaaagaaaaacctgctccctttgctctgctggaagctggagggtgctaggcccctgtgtagtagtgtatagaattctagcttttttcctcctttctctgtatattgggctcagagagtacactgtgtctctatgtgaatatggacagttagcatttaccaacatgtatctgtctactttctcttgtttaaaaaaagaaaaaaaaacttaaaaaaatggggttatagaaggtcagcaaaggggtggggtttgagatgtttgggtgggttagtgggcattttgacaacatggcttctcctttggcatgtttaattgtgatatttgacagacatccttgcagtttaagatgacacttttaaaataaattctctcctaatgatgacttgagccctgccactcaatgggagaatcagcagaacctgtaggatcttatttggaattgacattctctattgtaattttgttcctgtttatttttgggtttctttttgtttcactggaaaggaaagatgatgctcagttttaaacgttaaaagtgtacaagttgctttgttacaataaaactaaatgtgtacacaaaggatttgatgcttttctctcagcataggtatgcttactatgaccttccaagtttgacttgtataacatcactgtcaaactttgtcaccctaacttcgtattttttgatacgcacttttgcaggatgacctcagggctatgtggattgagtaatgggatttgaatcaatgtattaatatctccatagctgggaaacgtgggttcaatttgccattggtttctgaaaagtattcacatcatttgggataccagatagctcaatactctctgagtacattgtgcccttgatttttatctccaagtggcagtttttaaaattggccttttacctggatataaattaattgtgcctgccaccaccatccaacagacctggtgctctaatgccaagttatacacgggacagttgctggcatgtcttcattggctctctaaaatgtggccaagaagataggctctcagtaagaagtctgatggtgagcagtaactgtccctgctttctggtataaagctctcaaatgtgaccatgtgaatctgggtgggataatggactcagctctgtctgctcaatgccattgtgcagagaagcaccctaatgcataagctttttaatgctgtaaaatatagtcgctgaaattaaatgccactttttcagaggtgaattaatggacagtctggtgaacttcaaaagctttttgatgtataaaacttgataaatggaactattccatcaataggcaaaagtgtaacaacctatctagatggatagtatgtaatttctgcacaggtctctgtttagtaaatacatcactgtataccgatcaggaatcttgctccaataaaggaacataaagatttaaaaaaaaaaaaaaa

SEQ ID NO: 1019 - protein, 277 aa, Homo sapien
MSAQAAKVSKKELNSNHDGADETSEKEQQEAIEHIDEVQNEIDRLNEQASEEILKVEQKYNKLRQPFFQKRSELIAKIPNFWVTTFVNHPQVSALLGEEDEEALHYLTRVEVTEFEDIKSGYRIDFYFDENPYFENKVLSKEFHLNESGDPSSKSTEIKWKSGKDLTKRSSQTQNKASRKRQHEEPESFFTWFTDHSDAGADELGEVIKDDIWPNPLQYYLVPDMDDEEGEGEEDDDDDEEEEGLEDIDEEGDEDEGEEDEDDDEGEEGEEDEGEDD

SEQ ID NO: 1020 - DNA, 4783 bp, Homo sapien
cgggagcccaggcgggcaggccgctggggtcggggctgcacgtacgagagccgggacgcccgggttcagagcgaaggaggaggcatggcttcggtgttcatgtgtggcgtggaggacctgctgttcagcggcagccgcttcgtatggaacttgaccgtgtccacgctgcggagatggtacacggagaggctgcgggcttgccaccaggtgctgcggacgtggtgcgggctgcaggacgtgtaccagatgacagaaggcaggcactgccaggtgcacctcctggatgataggagactggagctgctggttcagcccaaacttctagcaagagagttgctggacctagtggcttcacatttcaacctgaaagaaaaggagtattttggaataacattcatagatgacacaggtcagcagaactggctgcagttagatcaccgagttcttgaccacgatttgcccaagaaaccaggcccaaccattttgcactttgctgtgaggttttacattgagagcatatcgtttttaaaggataaaaccaccgtggagctgtttttcctgaatgcaaaggcctgtgtgcacaaggggcaaatcgaagtagagagcgaaaccatcttcaagttagcagcgtttattttacaggaagccaagggagattataccagtgatgaaaatgccaggaaagatttaaagacattaccagcctttccaaccaaaactcttcaggagcatccatcccttgcctactgtgaggacagggtaattgagcattatttgaaaatcaaaggtctcactcgaggtcaagctgtggttcagtatatgaaaatagtagaagctctaccgacttacggtgtccattattatgcagtaaaggataagcaaggacttccttggtggcttggaataagctataagggaattggccaatatgatatacaagacaaggtgaagcctcggaagttattccaatggaaacagctggagaacttatatttccgtgagaaaaaatttgctgttgaagttcatgatccacgaaggatttcagtttcaagaagaacctttgggcaaagtggcctgtttgtgcaaacatggtatgctaactcttctctcatcaagtccatttgggtaatggcaattagtcagcatcagttttacttggaccggaagcaaagcaaagcaaaaattccttcagccaggagtttagatgagattgcaatggatttgacagagacaggaacacaaagggcctccaagctggtgacactggaggcgaaaagtcagttcatcatggcaagtaatggcagtttaatctcctcaggttctcaagactcagaagttagtgaagagcaaaagagagaaaaaatccttgaactaaagaagaaggagaaactattacaagaaaaacttctgaaaaaagttgaggagcttaagaagatctgtctgcgggaggctgagctcacaggcaaaatgccaaaggagtatcccctgaacataggcgagaagcctcctcaggtcagaagacgtgtgggtactgcgttcaaattagatgacaacttgctgccgagtgaagaagatcctgctttgcaagaactggagagtaattttctaatacaacaaaagctggtggaagctgcaaagaaacttgccaatgagccagacctttgtaaaactgtgaagaaaaagcgaaagcaagattacacagatgcgatgaaaaagcttcaggagattgaaaatgcaataaacgaataccgaattaggtgtggaaagaaacccagccagaaagcaacagtgttaccagaagacataatcccctcagagagtagctctttgtctgacaccaccacctatgatgatcccagtgatgccttcacttttcctgggcagcgatcaagttcagtacctcattctccaagaattcttccccccaagtctcttggtattgagcgaatccatttcagaaagtcgtccatcaatgaacagtttgtggataccaggcagtccagagaaatgctgtccacacacagcagcccttacaaaactctggagaggcggccccagggaggacgaagcatgcccaccacgccagttcttacccgaaacgcctacagcagcagccacttggaacccgaatcttcatctcagcactgccgccagcggagtggaagcctggagtcccagtcccatctgctctccgagatggacagcgataagccatttttctccctctccaaatcccaaagaagcagcagcacagaaatcctcgatgacgggtcttcttatacaagccaatcaagcacagagtattactgtgtgacaccagttaccggcccctattacaccacccagaccctggacactcgcaccaggggtcggaggaggtcaaagaaacagaatgtttctacttcaaattcaggaagcatgcccaacctagcacaaaaggatagtttgaggaatggtgtttactcaaagagtcaggagccaccgtcttccagttactacattgccgggtacacaccctatgcagagtgtgacttttattacagtggtggttatgtctatgagaatgacaccgagggacagtatagtgtcaacccttcctaccggtcctcagcccactatggatatgagcgccagagggactacagcagatcctttcacgaagatgaggtcgaccgggtaccccataacccatatgcaactctccggctgccaaggaaggctgctgcaaaatcggagcacatcaccaaaaacatccacaaggccttagttgccgagcacttgcgtggctggtaccagcgggcctctgggcagaaggatcagggacacagcccgcagaccagctttgactcagacaggggatcacagagatgcctggggtttgcggggctgcaagtaccttgttctccaagcagtcgtgcatccttgtactcttcagtgtcttctacaaatgcttctgggaactggaggacccagttaaccatagggctgtcggattacgagactccagcacattcttcttacaccagctgctatggcaatgtctataatcctttaccctctccaagcagacaatacacagaaatcagtcaactggatggtacagatggaaaccagctggaagacaacctggagagtagtgagcagagactcttttggcatgaagattcaaagcctggaacattagtctgaactgcagttggacctcctgaccaagcactgcgttctcacactagtgtgccttgcaaattgtatttgtcttccgagaggatgttcgttttagaaacctaaagacatcaaaggttgaagagaagacttagttgccctggaagtgaatcagtgaatcacacaccaagccccacaaagcccctaaaggaggatttggcctttcaaactctaggcactaacgtaactgtagggtctgcccacatgttgaagtattgccaagagaggactcagtgtgaagccttcatcaatagcaagcactttttaagggagtaaaagttgttaaaggcaaacgtcaaaaacatgaaagggcattcaggatgtcccatggcaataagaacaggggaaatctcagagcacaattcagcaggatgagagaaggggaaccagaagctccggagtcattgctcacttcagagtttgaattcgtgagctgacaaagagtaacatgctctttctacacagacatggacaatttagacagtattggaaaattacttgaagctggattttcatgaagttctgaatgagtgtaaatgttttttaggatactataaagagtgatgtttttcataagcaccataaaatgggttctggaaaaactgattaccttagcatcctgtaatataacttatggtagcagattggggaaaatgaagcagcccactgaataattgacaaagtctgcttggagaacattctaaggtacaatatcatggagctcctttttcctttctccactaattgcgtgatgagctattgttctggctggtaattctccaactcggctgtcatttgaagtggcagacttaatatggaaagtttttataattatgagtttgaaaaagcattttaagatgatacagaaagtatccaaaacaacagaaaaaaaaagccacgtcattttagatgaattgcgtgccttaaaatggtgaacgttagaaaattaaacaagtctggattccacaagtagttccaagtcaccaagtgacaaaaacaaggttaacattaaaaaagaaaaacaacaacaacgacaaaaagctccaagctgcagtggatttaattatgaggctaaaactacctcatactttccttggaagaactaattagctatggtttattgtagggttttgtttgtttgttttttaaagcaaatgatttccatattcctgattgatcttttttgtcatctttgcttcaaaattacataaaaggtgctcctttcccccttcttttatacaagtttcttgttcatattgtgaatagaaaagtttctgaacaacttttttggaacattttctatctatattccaaagcatgtaatatatacataaaaacgatttgttaaactggtccttagtcatttgtataattagaaatgaagtttgggaaaaaattttggaaaaaagacaagcaaaaaaaaaataacttattccttttttgcatatttgtatagccttctagaatcagaaataacctttttgcatattcttttattgttctgacttttcaagacctattatttttttacataggtcaataaacaaaaggtgtgctactg

SEQ ID NO: 1021 - protein, 1062 aa, Homo sapien
REPRRAGRWGRGCTYESRDARVQSEGGGMASVFMCGVEDLLFSGSRFVWNLTVSTLRRWYTERLRACHQVLRTWCGLQDVYQMTEGRHCQVHLLDDRRLELLVQPKLLARELLDLVASHFNLKEKEYFGITFIDDTGQQNWLQLDHRVLDHDLPKKPGPTILHFAVRFYIESISFLKDKTTVELFFLNAKACVHKGQIEVESETIFKLAAFILQEAKGDYTSDENARKDLKTLPAFPTKTLQEHPSLAYCEDRVIEHYLKIKGLTRGQAVVQYMKIVEALPTYGVHYYAVKDKQGLPWWLGISYKGIGQYDIQDKVKPRKLFQWKQLENLYFREKKFAVEVHDPRRISVSRRTFGQSGLFVQTWYANSSLIKSIWVMAISQHQFYLDRKQSKAKIPSARSLDEIAMDLTETGTQRASKLVTLEAKSQFIMASNGSLISSGSQDSEVSEEQKREKILELKKKEKLLQEKLLKKVEELKKICLREAELTGKMPKEYPLNIGEKPPQVRRRVGTAFKLDDNLLPSEEDPALQELESNFLIQQKLVEAAKKLANEPDLCKTVKKKRKQDYTDAMKKLQEIENAINEYRIRCGKKPSQKATVLPEDIIPSESSSLSDTTTYDDPSDAFTFPGQRSSSVPHSPRILPPKSLGIERIHFRKSSINEQFVDTRQSREMLSTHSSPYKTLERRPQGGRSMPTTPVLTRNAYSSSHLEPESSSQHCRQRSGSLESQSHLLSEMDSDKPFFSLSKSQRSSSTEILDDGSSYTSQSSTEYYCVTPVTGPYYTTQTLDTRTRGRRRSKKQNVSTSNSGSMPNLAQKDSLRNGVYSKSQEPPSSSYYIAGYTPYAECDFYYSGGYVYENDTEGQYSVNPSYRSSAHYGYERQRDYSRSFHEDEVDRVPHNPYATLRLPRKAAAKSEHITKNIHKALVAEHLRGWYQRASGQKDQGHSPQTSFDSDRGSQRCLGFAGLQVPCSPSSRASLYSSVSSTNASGNWRTQLTIGLSDYETPAHSSYTSCYGNVYNPLPSPSRQYTEISQLDGTDGNQLEDNLESSEQRLFWHEDSKPGTLV

SEQ ID NO: 1022 - DNA, 1860 bp, Homo sapien
gggacgtgagccgctgcgcccaccgggctagacccggcgccatcatgctgcttctgccaagcgccgcggacggccggggcaccgccatcacccacgctctgacctctgcctctacactctgtcaagttgaacctgtgggaagatggtttgaagcttttgttaagaggagaaacagaaatgcttctgcctcttttcaggaactggaggataagaaagagttatccgaggaatcagaagatgaagaattgcagttggaagagtttcccatgctgaaaacacttgatcccaaagactggaagaaccaagatcattatgcagttcttggacttggccatgtgagatacaaggctacacagagacagatcaaagcagctcataaagcaatggttttaaaacatcacccagacaaacggaaagcagctggtgaaccaataaaagaaggagataatgactacttcacttgcataactaaagcttatgaaatgttatctgatccagtgaaaagacgagcatttaacagtgtagatcctacttttgataactcagttccttctaaaagtgaagcaaaggataatttcttcgaagtgtttaccccagtgtttgaaaggaattccagatggtcaaataaaaaaaatgttcctaaacttggtgatatgaattcatcatttgaagatgtagatatattttattctttctggtataattttgattcttggagagaattttcttatttagatgaagaagaaaaagaaaaagcagaatgtcgtgatgagaggagatggattgaaaagcagaacggagcaacaagagcacaaagaaaaaaagaagaaatgaacagaataagaacattagttgacaatgcatacagctgtgatccaaggataaaaaagttcaaggaagaagaaaaagccaagaaagaagcagaaaagaaagcaaaagcagaagctaaacggaaggagcaagaagctaaagaaaaacaaagacaagctgaattagaagctgctcggttagctaaggagaaagaagaggaggaagtcagacagcaagcattgctggcaaagaaggaaaaagatatccagaaaaaagccattaagaaggaaaggcaaaaacttcgaaactcatgcaagatagaagaaataaatgagcaaatcagaaaagagaaagaggaagctgaggctcgtatgcgacaagcatctaagaacacagagaaatcaactggtggaggtggaaatggaagtaaaaattggtcagaagatgatctacaattactaattaaagctgtgaatctgttccctgctagaacaaattcaagatgggaagttattgctaattacatgaacatacattcttcctctggagtcaaaagaactgccaaagatgttattggcaaagcaaagagtctccaaaaacttgaccctcatcaaaaagatgacataaataaaaaggcatttgataagttcaaaaaagaacatggagtggtacctcaagcagacaacgcaacgccttcagaacgatttgaaggtccatatacagacttcaccccttggacaacagaagaacagaagcttttggaacaagctttgaaaacatacccagtaaatacacctgaaagatgggaaaaaatagcagaagcggtgcctggcaggacaaagaaggactgcatgaaacgatacaaggaacttgtcgagatggtaaaagcaaagaaagctgctcaagaacaagtgctgaatgcaagtagagccaagaaatgacaatctttgttgtgtgtgcatttttataataaaactgaaaatactgtaaacattttcattcttaaaattatactcatggtaataatttgaaagtaaaaaaaaaaaaaaa

SEQ ID NO: 1023 - protein, 582 aa, Homo sapien
DVSRCAHRARPGAIMLLLPSAADGRGTAITHALTSASTLCQVEPVGRWFEAFVKRRNRNASASFQELEDKKELSEESEDEELQLEEFPMLKTLDPKDWKNQDHYAVLGLGHVRYKATQRQIKAAHKAMVLKHHPDKRKAAGEPIKEGDNDYFTCITKAYEMLSDPVKRRAFNSVDPTFDNSVPSKSEAKDNFFEVFTPVFERNSRWSNKKNVPKLGDMNSSFEDVDIFYSFWYNFDSWREFSYLDEEEKEKAECRDERRWIEKQNGATRAQRKKEEMNRIRTLVDNAYSCDPRIKKFKEEEKAKKEAEKKAKAEAKRKEQEAKEKQRQAELEAARLAKEKEEEEVRQQALLAKKEKDIQKKAIKKERQKLRNSCKIEEINEQIRKEKEEAEARMRQASKNTEKSTGGGGNGSKNWSEDDLQLLIKAVNLFPARTNSRWEVIANYMNIHSSSGVKRTAKDVIGKAKSLQKLDPHQKDDINKKAFDKFKKEHGVVPQADNATPSERFEGPYTDFTPWTTEEQKLLEQALKTYPVNTPERWEKIAEAVPGRTKKDCMKRYKELVEMVKAKKAAQEQVLNASRAKK

SEQ ID NO: 1024 - DNA, 8162 bp, Homo sapien
gcggcggtgcggcccaggctgcagctgagcgctctgcgcggcgcagccgggtctcccgcgtgtaccacgccgtgacaggtgcagagtccgggctgaggacccacctgcagccgccgccgcgatgcccaccatgcggaggaccgtgtcggagatccgctcgcgcgccgaaggttatgagaagacagatgatgtttcagagaagacctcactggctgaccaggaggaagtaaggactattttcatcaaccagccccagctgacaaaattctgcaataaccatgtcagcactgcaaaatacaacataatcacattccttccaagatttctctactctcagttcagaagagctgctaattcattttttctctttattgcactgctgcagcaaatacctgatgtgtcaccaacaggtcgttatacaacactggttcctctcttatttattttagctgtggcagctatcaaagagataatagaagatattaaacgacataaagctgataatgcagtgaacaagaaacaaacgcaagttttgagaaatggtgcttgggaaattgtccactgggaaaaggtggcagtaggggagatagtgaaagtgaccaatggggaacatctcccagcagatctcatcagtctgtcctcaagtgagccccaagccatgtgctacattgaaacatccaacttagatggtgaaacaaacttgaaaattagacagggcttaccagcaacatcagatatcaaagacgttgacagtttgatgaggatttctggcagaattgagtgtgaaagtccaaacagacatctctacgattttgttggaaacataaggcttgatggacatggcaccgttccactgggagcagatcagattcttcttcgaggagctcagttgagaaatacacagtgggttcatggaatagttgtctacactggacatgacaccaagctgatgcagaattcaacaagtccaccacttaagctctcaaatgtggaacggattacaaatgtacaaattttgattttattttgtatcttaattgccatgtctcttgtctgttctgtgggctcagccatttggaatcgaaggcattctggaaaagactggtatctcaatctaaactatggtggcgctagtaattttggactgaatttcttgaccttcatcatccttttcaacaatctcattcctatcagcttattggttacattagaagttgtgaaatttacccaggcatacttcataaattgggatcttgacatgcactatgaacccacagacactgctgctatggctcgaacatctaatctgaatgaggaacttggccaggttaaatacatattttctgacaaaactggtactctgacatgcaatgtaatgcagtttaagaagtgcaccatagcgggagttgcttatggccatgtccctgaacctgaggattatggctgctctcctgatgaatggcagaactcacagtttggagatgaaaaaacatttagtgattcatcattgctggaaaatctccaaaataatcatccaactgcacctataatatatgaatttcttacaatgatggcagtctgtcacacagcagtgccagagcgagaaggtgacaagattatttatcaagcagcatctccagatgagggagcattggtcagagcagccaagcaattgaattttgttttcactggaagaacacccgactcggtgattatagattcactggggcaggaagaaagatatgaattgctcaatgtcttggagtttaccagtgctaggaaaagaatgtcagtgattgttcgcactccatctggaaagttacgactctactgcaaaggagctgacactgtaatttatgatcgactggcagagacgtcaaaatacaaagaaattaccctaaaacatttagagcagtttgctacagaagggttaagaactttatgttttgctgtggctgagatttcagagagcgactttcaggagtggcgagcagtctatcagcgagcatctacatctgtgcagaacaggctactcaaactcgaagagagttatgagttgattgaaaagaatcttcagctacttggagcaacagccattgaggataaattacaagatcaagtgcctgaaaccatagaaacgctaatgaaagcagacatcaaaatctggatccttacaggggacaagcaagaaactgccattaacatcggacactcctgcaaactgttgaagaagaacatgggaatgattgttataaatgaaggctctcttgatggaacaagggaaactctcagtcgtcactgtactacccttggtgatgctctccggaaagagaatgattttgctcttataattgatgggaaaaccctcaaatatgccttaacctttggagtacgacagtatttcctggacttagctttgtcatgcaaagctgtcatttgctgtcgggtttctcctcttcaaaaatctgaagttgttgagatggttaagaaacaagtcaaagtcgtaacgcttgcaatcggtgatggagcaaatgatgtcagcatgatacagacagcgcacgttggtgttggtatcagtggcaatgaaggcctgcaggcagctaattcctctgactactccatagctcagttcaaatatttgaagaatttactgatgattcatggtgcctggaactataacagagtctccaagtgcatcttatactgcttctacaagaatatagtgctctatattatcgagatctggtttgcctttgttaatggcttttctggacagatcctctttgaaagatggtgtataggtctctataacgtgatgtttacagcaatgcctcctttaactcttggaatatttgagagatcatgcagaaaagagaacatgttgaagtaccctgaattatacaaaacatctcagaatgccctggacttcaacaccaaggttttctgggttcattgtttaaatggcctcttccactcagttattctgttttggtttccactaaaagcccttcagtatggtactgcatttggaaatgggaaaacctcggattatctgctactgggaaactttgtgtacacttttgtggtgataactgtgtgtttgaaagctggattggagacatcatattggacatggttcagccacatagcgatatgggggagcatcgcactctgggtggtgtttttgggaatctactcatctctgtggcctgccattccgatggcccctgatatgtcaggagaggcagccatgttgttcagttctggagtcttttggatgggcttgttattcatccctgtggcatctctgctccttgatgtggtgtacaaggttatcaagaggactgcttttaaaacattggtcgatgaagttcaggagctggaggcaaaatctcaagacccaggagcagttgtacttggaaaaagcctgaccgagagggcgcaactgctcaagaacgtctttaagaagaaccacgtgaacttgtaccgctctgaatccttgcaacaaaatctgctccatgggtatgcgttctctcaagatgaaaatggaatcgtttcacagtctgaagtgataagagcatatgataccacgaaacagaggcccgacgaatggtgatggggagagcctgaaaggcaggctctgttacctctctaaggagagctaccaggttgtcaccgcagtctgctaaccaattccagtctggtccatgaagaggaaaggtagatctgagctcatctcgctgatggacattcagattcatgtatattatagacataagcactgtgcaactgtactgtaacaccatctcttttggatttttttaaggtatttgctaagtctttgtaaacggaaattgaaaatgacctggtatcttgccagagggctttcttaaacggagaataagtcagtattcttatgccattactgtggggctgtaactgactgtcagtttattggctgtaccacaaggtaaccaaccattaaaaaactctaaatgatatttagttaaagggactcttggtatccagacttagatttcaggatatgctgaaacaaaccagcattcttaaggaactgactcaccttcctgagcaaaatttctaaacaagcatttgtgtccaaaattgtcttgataaatgtttgccaaagaggttcagtaagtgtttttctagttcagtagtcatatgcccagaaatgtaagagaaagtttacttccagttccgctgtaagatctgcatgcctgactttccaaatgtaagagtgatttacaaaaatgaatatttcaaggcatttgctactaaaatcggtgatgttgcacctttggccttacaaatgcttctttgttgtttgtcgtgtttatttgttagaggacacacgtgttaatgtgactctgttgttatgacactgatttttcaaactatgtatgtttcaggtatttctgatgaagtttcatcatcatttagatttttctaaaaatctggctaatgcagtagattgagtgatgtcattttgtcttaaagtttttcctcttaagaaacatatgctacgtatttacgtgggatttccaaagcttctgttgcaatatttggaataacatgtcagataaatgcatgggcttttgtcctgtgttccagttcccactagagatgcctgtgtcttgtgtagcacacccagtgttatggtgactgccccctatactgaagactgaaaattatttcacagttcactcatcaaatagttcccaaaattcgtcacatgctgcttattgggacaaataggtagtacattttccccatttaaaaaatgcggattttactcaggccggtaactttacagtcagaggacacgttcatcatgagtagcttttgttagtatgttttaaaatgtatcttcagttcaattattttcagcatttacaagacatctgaaaatggctattttgctaccaacagtaaatgaaggggctgtttaaaaaccacaaccagttttctacactattttttaaataatactttcatttgaaaaaaaggaattagttttcagatacacttcagagattgaagcaaactatttgccttttactcaaaagcctgcttgcctttacatggacttaccagcaaaataggtagaactttctcttttaaaaaaagtcaactagaattgagaagaggtgattttttttcagatcgcttctcgagtttaatattttcacattcttttcaccctttttctcaatctagatttaaaattaggatatatgtcatttccttgtctgtatttgtagctccttagttaccagtatgcctctccattttctacaaataagaggttataacacatatacataattctaaccttaagggaacacacgtttacatactttacttcccaagcccttcctgtttggggtacagattgagagagtcatgaatcaacacatctagcaagaccacaggtgtaagagtctaagatcgtcttcaaaattctgaagtcccagtctttacctgtccagtgaatgaatattcagagcagcttttcctgggcttcccagtggtgatagctgaggtcaaaccacaaaaaataagaaagcaagagtgaaatgcacccctccagagaaacactttgtagtgtttaattctgttaatagagaagagctgcttctgtttgcgctcacttcatcagtggcacccttctgcagaattttaatataaaaacattatggatataatagaactggattttctgacttaaaaatgtaagttttattttaatcttgaaacgtggattgtttctgtggagctcttaaacatgagaagaatacttacggttgataatgtgtaacatgatctgaaatgtgactaatttgagcctctttgtcccatcgtcctgtttttgaattattgacattgtcagtctctttgcttcctgggtgagacttggggtttgagggacagggaatgaccttcttggtgaaacttaaaatataacattgcaattgcagtgactttacagtgttaaattagagaaaatagtctgattttttaaaccttccttaactggaaaaaagtcacatggttttaccaggattgaaataaacagtcaatgtgacttttaacatgtgtttttttgaaataaagggcacgtactcttcaattaaaaagttccttatagggactctggcaaatgctaacacagttgctttacaatgtttacaattcagacaatacgacttataatagaaaatcctcattcatttagcattgaaaagctggaagttgcttctttaatgttgaatagtatacagtggtattgagcatggactttctaaatgttttatatatacatataaaaatatattggtgtctcacacccagaaagatgttatattgtagatattattaggaaaacagtgtttctcaggaacgttgtaaattttaaatgatatatgtacttcccgtcctcccacctccactctgtgctctaatgtgagactgcttcagcagtgttgctaagttaatggaaaactttttctaatcaagtcaggtgaatgtgtattctgctaaataatgttagccatttacatgaattgtatggtcattaaatggaatcagtgattcctctttaatttccagaggggaaatgaattatggaaatcagtcagcattctgatcattaaattttatactttaattttgccgttcagcattctaaatatccaatgtgaaagtcacatgataatttgttttgcattgcgtgcactgtacaacacttacaacttgtcatttaaaatgttttctcgggaaatgaatgctagtcagaaagtaatagattgtattattcatagttttaaaattatgacaatgtcataattactacaaagctaaataatcgtgtttatttttgtgcagttgccctttgatagttcctggttttaaaacctattaagtgtataatcttacaaatagtcatctacaaaatttatggagaaagtgcccagcccattcacatcacatggaccaggaattcttttgtaaatgacttaaggtaacatcatgcagttcagtgcctaataaatgctttttaatgatgagcatttctataatgactcgtaagataccatagtctgatttttctcacattaaaataactgaagtcacttgtgtaacgtagttatactttgctgcattttaattaaccttcaacagctattaaagtggaatgtaagttaaattttgaaggaaaggaaataaatgttttccatatttcgtcttgatttactttctgtatgagaacagctgtgtttttgataggtttatggtttgcatgagttcatatttaaagtgatccaggccaatgcatggctattgctgtaaatcttgatgtttatttctgccttgtaaagttctatcacggcctacctggaatttaaaattcagtagacaaattaattggtcctctgcacaacttttttaataagtagattattttacaaagaaatttgaacaaatttaattgaatcttttgtttagcttgcctctaagaacttttcttaataaagctcccaaaacttctcagcaaataaatctcccttaagtaggaaaactagatttcatatttgcttactttgaattaacagcaactttccacaggtaaatctgttcttgcaaagatgtgagcagaatagttaaaaataatatttttatgtttcatggttctaaatggaagccataaatgcagtaaatactatctgttgtttaactactttaatcgtcattttttacattttcaagtttattaggttaagaaaaacagggcagccttggaaggcagctactacagaaaactgcagttttgcgttaaagataaagtagtattttcagctccctgaaaaaccattcctgctgaaactgctgtagaaattgtgaagctgcatgagtggagagtattgaatctgtggttatagtagttttctcaggtttgtttatcttgatgtttgatgcactgtgttttatagttattaaaattgagtaatattatttctatgcagtgttatgtgtcattggccttttgtgaatgtgcatgttttaaactgcaaattttaaacattttgtcctctaattgttattaaaaatgaaataaactttaccattacttaaaaaaa

SEQ ID NO: 1025 - protein, 1164 aa, Homo sapien
MPTMRRTVSEIRSRAEGYEKTDDVSEKTSLADQEEVRTIFINQPQLTKFCNNHVSTAKYNIITFLPRFLYSQFRRAANSFFLFIALLQQIPDVSPTGRYTTLVPLLFILAVAAIKEIIEDIKRHKADNAVNKKQTQVLRNGAWEIVHWEKVAVGEIVKVTNGEHLPADLISLSSSEPQAMCYIETSNLDGETNLKIRQGLPATSDIKDVDSLMRISGRIECESPNRHLYDFVGNIRLDGHGTVPLGADQILLRGAQLRNTQWVHGIVVYTGHDTKLMQNSTSPPLKLSNVERITNVQILILFCILIAMSLVCSVGSAIWNRRHSGKDWYLNLNYGGASNFGLNFLTFIILFNNLIPISLLVTLEVVKFTQAYFINWDLDMHYEPTDTAAMARTSNLNEELGQVKYIFSDKTGTLTCNVMQFKKCTIAGVAYGHVPEPEDYGCSPDEWQNSQFGDEKTFSDSSLLENLQNNHPTAPIIYEFLTMMAVCHTAVPEREGDKIIYQAASPDEGALVRAAKQLNFVFTGRTPDSVIIDSLGQEERYELLNVLEFTSARKRMSVIVRTPSGKLRLYCKGADTVIYDRLAETSKYKEITLKHLEQFATEGLRTLCFAVAEISESDFQEWRAVYQRASTSVQNRLLKLEESYELIEKNLQLLGATAIEDKLQDQVPETIETLMKADIKIWILTGDKQETAINIGHSCKLLKKNMGMIVINEGSLDGTRETLSRHCTTLGDALRKENDFALIIDGKTLKYALTFGVRQYFLDLALSCKAVICCRVSPLQKSEVVEMVKKQVKVVTLAIGDGANDVSMIQTAHVGVGISGNEGLQAANSSDYSIAQFKYLKNLLMIHGAWNYNRVSKCILYCFYKNIVLYIIEIWFAFVNGFSGQILFERWCIGLYNVMFTAMPPLTLGIFERSCRKENMLKYPELYKTSQNALDFNTKVFWVHCLNGLFHSVILFWFPLKALQYGTAFGNGKTSDYLLLGNFVYTFVVITVCLKAGLETSYWTWFSHIAIWGSIALWVVFLGIYSSLWPAIPMAPDMSGEAAMLFSSGVFWMGLLFIPVASLLLDVVYKVIKRTAFKTLVDEVQELEAKSQDPGAVVLGKSLTERAQLLKNVFKKNHVNLYRSESLQQNLLHGYAFSQDENGIVSQSEVIRAYDTTKQRPDEW

SEQ ID NO: 1026 - DNA, 5727 bp, Homo sapien
cgcccttagccgatcggggcgctcagcccacacgcaccgctgctcggggcttggagatccgcgcaggctgggctcccggacgcggcggaccgacgcgcggaggatcgggatccggcgctgtggggctggggtgggcgggggaggctgggcccggggcctctggcgcgacacccgcatgaggacgcgagtgaaatagaccaaggtggaatttccaagggaaaagcttcggggtggttttggtccatttctccagcgaagaagtagacatggcgagcgactccccggctcgaagcctggatgaaatagatctctcggctctgagggaccctgcagggatctttgaattggtggaacttgttggaaatggaacatacgggcaagtttataagggtcgtcatgtcaaaacgggccagcttgcagccatcaaggttatggatgtcacaggggatgaagaggaagaaatcaaacaagaaattaacatgttgaagaaatattctcatcaccggaatattgctacatactatggtgcttttatcaaaaagaacccaccaggcatggatgaccaactttggttggtgatggagttttgtggtgctggctctgtcaccgacctgatcaagaacacaaaaggtaacacgttgaaagaggagtggattgcatacatctgcagggaaatcttacgggggctgagtcacctgcaccagcataaagtgattcatcgagatattaaagggcaaaatgtcttgctgactgaaaatgcagaagttaaactagtggactttggagtcagtgctcagcttgatcgaacagtgggcaggaggaatactttcattggaactccctactggatggcaccagaagttattgcctgtgatgaaaacccagatgccacatatgatttcaagagtgacttgtggtctttgggtatcaccgccattgaaatggcagaaggtgctccccctctctgtgacatgcaccccatgagagctctcttcctcatcccccggaatccagcgcctcggctgaagtctaagaagtggtcaaaaaaattccagtcatttattgagagctgcttggtaaagaatcacagccagcgaccagcaacagaacaattgatgaagcatccatttatacgagaccaacctaatgagcgacaggtccgcattcaactcaaggaccatattgatagaacaaagaagaagcgaggagaaaaagatgagacagagtatgagtacagtggaagtgaggaagaagaggaggagaatgactcaggagagcccagctccatcctgaatctgccaggggagtcgacgctgcggagggactttctgaggctgcagctggccaacaaggagcgttctgaggccctacggaggcagcagctggagcagcagcagcgggagaatgaggagcacaagcggcagctgctggccgagcgtcagaagcgcatcgaggagcagaaagagcagaggcggcggctggaggagcaacaaaggcgagagaaggagctgcggaagcagcaggagagggagcagcgccggcactatgaggagcagatgcgccgggaggaggagaggaggcgtgcggagcatgaacaggaatacatcaggcgacagttagaggaggagcagagacagttagagatcttgcagcagcagctactgcatgaacaagctctacttctggaatataagcgcaaacaattggaagaacagagacaagcagaaagactgcagaggcagctaaagcaagaaagagactacttagtttcccttcagcatcagcggcaggagcagaggcctgtggagaagaagccactgtaccattacaaagaaggaatgagtcctagtgagaagccagcatgggccaaggaggtagaagaacggtcaaggctcaaccggcaaagttcccctgccatgcctcacaaggttgccaacaggatatctgaccccaacctgcccccaaggtcggagtccttcagcattagtggagttcagcctgctcgaacaccccccatgctcagaccagtcgatccccagatcccacatctggtagctgtaaaatcccagggacctgccttgaccgcctcccagtcagtgcacgagcagcccacaaagggcctctctgggtttcaggaggctctgaacgtgacctcccaccgcgtggagatgccacgccagaactcagatcccacctcggaaaatcctcctctccccactcgcattgaaaagtttgaccgaagctcttggttacgacaggaagaagacattccaccaaaggtgcctcaaagaacaacttctatatccccagcattagccagaaagaattctcctgggaatggtagtgctctgggacccagactaggatctcaacccatcagagcaagcaaccctgatctccggagaactgagcccatcttggagagccccttgcagaggaccagcagtggcagttcctccagctccagcacccctagctcccagcccagctcccaaggaggctcccagcctggatcacaagcaggatccagtgaacgcaccagagttcgagccaacagtaagtcagaaggatcacctgtgcttccccatgagcctgccaaggtgaaaccagaagaatccagggacattacccggcccagtcgaccagctagctacaaaaaagctatagatgaggatctgacggcattagccaaagaactaagagaactccggattgaagaaacaaaccgcccaatgaagaaggtgactgattactcctcctccagtgaggagtcagaaagtagcgaggaagaggaggaagatggagagagcgagacccatgatgggacagtggctgtcagcgacatacccagactgataccaacaggagctccaggcagcaacgagcagtacaatgtgggaatggtggggacgcatgggctggagacctctcatgcggacagtttcagcggcagtatttcaagagaaggaaccttgatgattagagagacgtctggagagaagaagcgatctggccacagtgacagcaatggctttgctggccacatcaacctccctgacctggtgcagcagagccattctccagctggaaccccgactgagggactggggcgcgtctcaacccattcccaggagatggactctgggactgaatatggcatggggagcagcaccaaagcctccttcaccccctttgtggaccccagagtataccagacgtctcccactgatgaagatgaagaggatgaggaatcatcagccgcagctctgtttactagcgaacttcttaggcaagaacaggccaaactcaatgaagcaagaaagatttcggtggtaaatgtaaacccaaccaacattcggcctcatagcgacacaccagaaatcagaaaatacaagaaacgattcaactcagaaatactttgtgcagctctgtggggtgtaaaccttctggtggggactgaaaatggcctgatgcttttggaccgaagtgggcaaggcaaagtctataatctgatcaaccggaggcgatttcagcagatggatgtgctagagggactgaatgtccttgtgacaatttcaggaaagaagaataagctacgagtttactatctttcatggttaagaaacagaatactacataatgacccagaagtagaaaagaaacaaggctggatcactgttggggacttggaaggctgtatacattataaagttgttaaatatgaaaggatcaaatttttggtgattgccttaaagaatgctgtggaaatatatgcttgggctcctaaaccgtatcataaattcatggcatttaagtcttttgcagatctccagcacaagcctctgctagttgatctcacggtagaagaaggtcaaagattaaaggttatttttggttcacacactggtttccatgtaattgatgttgattcaggaaactcttatgatatctacataccatctcatattcagggcaatatcactcctcatgctattgtcatcttgcctaaaacagatggaatggaaatgcttgtttgctatgaggatgagggggtgtatgtaaacacctatggccggataactaaggatgtggtgctccaatggggagaaatgcccacgtctgtggcctacattcattccaatcagataatgggctggggcgagaaagctattgagatccggtcagtggaaacaggacatttggatggagtatttatgcataagcgagctcaaaggttaaagtttctatgtgaaagaaatgataaggtattttttgcatccgtgcgatctggaggaagtagccaagtgtttttcatgaccctcaacagaaattccatgatgaactggtaacagaagagcacttggcacttatcttcatggcgttatttctaatttaaaagaacataactcatgtggacttatgccagtctagaggcagaatcagaaggcttggttgaacatatcgctttccctttttcctctccctccgcccctcccagtacagtccatctttcaatgttgcagcctggttgagaaggagagaaaaaggtggcaggaatttccaggagatccccaagaatgctgccttgtctgtggacaaagatggaccatgtgcccttcggaattagggatagaaacaaatattgtgtgctcttaacgattaagctgtgttatggtgggttttcaggtttttaccttttttctttacccctttactctgcaagaatggggaaagaatgcatactgcgaaaatgagtcttttaaattctgtctgcctactagttttaagtatatggtatgttgtaaaatttccaatgatgagagacagcacaataaatgtaccttatctccttaggctgaaggccataactacatagtggagtaatttaagaactctcttgccttcaccaacccaaaaggttgctttttgatagcaactggctaatgaatttttaaaaagagaagaaaaatactagttttcccctcttttgggaaatagattttaaatggctaaactactagccttaaaactactagtctaataaaatcaactaccacttttgtgaatctgacaggccacatttttatatggccctttacagaatggagtgtgttgaacaggatactaacgccattgagttgagctggcctagcgatggagggacactctaacacaactttccctcagctattatgcaacagatcagggaaaaagatgggatgacagatggggtcagacagaaagagcttctgggaaacaagcttacatagtcttttttaaaatgcacaaagcctcccagctaagaggtcacttggtttgggcttcattaggactgagactttgttgagttctttctgggacttggagagtggatgatattcaggctctgaacattcccagcgctctcccgagggtgccactttctcaagatgaaaactgtgactgaaaaaattaataataaatgtttctgagctgcctgtgttctccctgtgtgggtgagagaagggactagactcctaagcctgcctcagatacaagaggcatcattggctccaattttagagaacttgaaagcaaggctttggacaaaattttgagaccctaatcactttaccttcctccaaattacccaacatacggtaaacaacatttgtgcagaagtatgtatgtatttagttcaggttgacttgtgtccttataaactcttactcaaatgatttgaacttt

SEQ ID NO: 1027 - DNA, 1521 bp, Homo sapien
gaaaaaaatgcaatacaagaagcaagaccaaacagatatctaaacactacaaccacttctactacgaaaggccaaaacagcagacttgattgtgacatcaggtgacctagtaatcagctgtgtattctagctggtgcctctaccagcttcccatgtgaccttgaacatgtcattgaatgctcgctaggcctctgtttctttatctgtgaaatgggcttgatattcctcctctaccccaaccgatagtgcagaatgaaaagtaactgaaagtccttcctccagggcaccatagtgtctgggtgaaaagtagaatataaactcggtagacttctggtcccttcattggtcatggaatggaccagtgcttgcttcattgagcaacagttctgttgttcagaattcctggatttcacctcacttctgctctccctgcaggtgaatgtgatgttcatgcttgccattcttctgacattcttccacccctttctggtatatcgggaatgccgtacttggaaagaaagtccctctgcaattgcatagttcagaagccctcacttttcagccccgaggatggttttgttcatcttccaccacctttgaggacctcgtgtcccaaaagactttgcctatcccagcaaaacacacacacacacacacacacacacacaataaagacacacaaggacgtctgcgcagcaagaaaagaatctcagttgccaagcagattgatatcacacagactcaaagcaaaggcatgtggaacttctatatttcaaaacagaagtgtctccttgcacttagccttggcagacccttgactccaggggagatgacctgggggaggaagtgtgtcaactatttctttaggcctgtttggctccgaagcctatatgtgcctggatcctctgccacgggttaaattttcaggtgaagagtgaggttgtcatggcctcagctatgcttcctggctctccctcaagagtgcagccttggctagagaactcacagctctgggaaaaagaggagcagacagggttccctgggcccagtctcagcccagccactgatgctggatgaccttggcctgaccctggtctggtctcagaatcacttttcccatctgtaaaattgagatgaattttggtgttgaaagttcttcctggagcagatgtcctagaaggttttaggaatagtgacagagtcaggccaccccaagggccatgggagccagctgacctgcttgaccgaaggatttctgacagactatctttggggatgttttcaagaagggatataagttatttactttgggcatttaaaagaaaatttctctcgggaataattttatagaaaaataaagcttctgtgtctaaggcaaaaaaaaaaaaaaaaaaaaaaaaaaaaaaaaaaaaaaaaaaaaaaaaaaaaaaaaaaaaaaaaaaaaaaaaaaaaaaaaaaaaaaaaaaaaaaaaaaaaaaaaaaaaaaaaaaaaaaaaaaaaaaaaaaaaaaaaaaaaaaaaa

SEQ ID NO: 1028 - DNA, 4625 bp, Homo sapien
ggacaaagtgaatacggctttgctgaaaaagtagttgagggaatttctgtttctgtaaattctatagtcatcagaattggagcaaaagccttcaatgcatcatttgaactttctcagcttcggatctatagtgtaaatgcacactgggaacatggagatttgagatttactcgtattcaggatccacagagaggagaggttttgacttttaaagaaataaattggcagatgataagaatagaggcagatgccacccaaagttcacatcttgaaattatgtgtgctcctgttcgattaataaccaaccaatcaaaaatcagagtcacacttaaaagaaggttaaaggactgcaatgtcatagcaacaaagttagttctaatattggatgacttattatgggttttgactgattcccagttgaaagctatggtacaatatgcaaagtctcttagtgaagcaatagaaaaatcaacagaacaaaggaagagtatggctcctgaacctacacagagctctacagtagtcgcatctgcccagcaagtgaagacaacgcaaacttcaaatgctcctgatgtaaatgatgcaattgtgaaactattcaatgattttgatgttaaggaaacctcccatcatttagtgatttctcatctagatctacacatatgtgatgacattcatgctaaagaaaaagagtcaaacagacgtattactggaggggcaatgcaactctcttttacacagctaactatagattattatccttatcataaagcaggagatagttgtaatcattggatgtattttagtgatgcaaccaaaacaaaaaatggatgggccaatgagttattgcatgaatttgagtgcaacgttgaaatgcttaaacaggctgtgaaggatcataatgtaggttcacctcctaaatccccaacacatgcctctccccagcacacacaaacagagaaggactaccctctgaaagggacatgcagaacaccttcagtattatctcaacaatcaaaagctaagctaatgtctagttctgttgtggttagacttgcagatttcaatatataccaggtctctacagcggaacaatgtcgttcttcccccaaaagcatgatttgctgcaataaaaaatccctatatcttccacaagaaatgtcagctgtctatatagaattcacagaatattactatccagatggaaaggattttccaattccatctcccaacctctatagccagctgaatgcactacagtttactgtggatgaaagaagcattctatggttaaatcaatttctgttggatttaaaacagagtcttaatcagttcatggctgtgtacaagttgaatgacaattcaaaatctgacgagcatgttgatgttcgagttgatggcttaatgctaaagtttgtcattccttctgaagtgaaatctgaatgtcatcaagatcagccacgtgcaatttctattcagagttctgaaatgattgccacaaatacaaggcactgtccaaactgtcgacattctgacctagaagctttgtttcaagactttaaagattgtgatttttttagtaaaacatataccagcttccccaaatcttgtgacaattttaatcttctacatccaattttccagagacatgctcatgaacaagataccaaaatgcatgaaatttataaaggaaatattactccccaattgaataaaaacactcttaaaacttctgctgccacggatgtttgggctgtgtacttttctcaattttggatagattatgaagggatgaaaagtggaaaaggacggccaataagttttgtagactcattccctctttccatttggatttgtcaaccaacaagatatgcagagtcacaaaaagagccgcagacttgtaatcaggtatctctaaatacatcacaaagtgaatctagtgatctggctggccgattgaagcggaagaagctcttgaaggagtattatagtacagagtctgagcctttgacaaatggtggtcagaagccttcttcatcagatacatttttcagattttccccttcctcgtcagaggcagatattcatctcctagttcatgttcataaacatgtcagtatgcagattaatcactaccagtatctgcttctacttttcctgcatgagtcacttatcctgctttcagagaacttaaggaaagatgtagaagctgtaactggcagtcctgctagtcagacatccatttgtattggaattttacttagaagtgcagaactggctcttttgctccatccagtggatcaagcaaatactcttaagtctcctgtttctgaaagtgtgagcccagtggtacctgattatttgcctacagaaaatggggattttttgtcttcaaaaagaaaacaaattagtagggatataaatagaattagaagtgtaactgttaatcatatgtcagacaacagatctatgagtgttgaccttagccatatccctttaaaggatcctttgctttttaaatcagctagtgatacaaatctgcaaaaaggcatttcttttatggactatttatcagataaacatttagggaaaataagtgaagatgaaagtagtggacttgtttacaaaagtggctcaggagaaattggatcagaaacaagtgacaaaaaggattcattttatacagattcaagtagtatcttaaactacagagaagattcgaatatactttcatttgatagtgatggtaatcaaaacatactttcaagtactttaactagtaaaggaaatgaaaccatagagtccatctttaaagctgaagatttgcttccagaagcagcttcactctctgaaaacctggatatcagtaaagaagagacccccccagttagaacacttaaatcacagtcatctttaagtggaaagcctaaggaacgttgcccacccaacctggctcctctctgtgtttcttataagaatatgaaaagaagctcttcacaaatgtcattggataccatttcacttgacagcatgatattggaagaacagttattagaaagtgatggaagtgatagccatatgtttttggaaaaaggaaataaaaagaactcaactacaaattacaggggcacagcagaaagtgtgaatgctggtgcaaacctacagaattatggtgaaacttctccagatgccatcagtacaaattcagagggtgctcaggaaaatcatgatgacctgatgtccgttgtggtatttaaaattactggtgttaatggggaaattgacatccgaggggaagatacagaaatctgtcttcaagtgaaccaggtgacaccagaccaattaggcaatatcagccttcggcattacctttgtaatcgtccagttggttccgatcagaaagctgtaattcattccaaatcctctcctgagatttctctgagatttgaaagtgggcctggtgctgtaatacactctttacttgcagaaaaaaatggatttctgcagtgccacatagaaaacttcagcactgagtttcttacatcttctcttatgaatattcaacattttttggaagatgaaactgttgcaacagtaatgccaatgaagatacaagtttctaacacgaaaataaatttaaaagatgatagtccccggagtagtacagtatcccttgaaccagctcctgtaactgtacatattgatcatcttgtggtagagagaagtgacgatggctcttttcatatcagagattctcacatgcttaacactggaaatgatttgaaagaaaatgtcaaaagcgattcagtgctgctgaccagtggaaagtatgatctgaagaaacaacgcagtgtcacgcaagccactcagacaagcccaggggttccttggccttctcagtcagctaactttcctgagttctcctttgacttcactagggaacagctcatggaagagaatgaatctcttaaacaggaactggctaaagctaaaatggctcttgcagaggctcacttggaaaaagatgctcttcttcatcatataaagaagatgacagttgaatagcaggagtggcagtcaaaactgaaattatagctctggagtaggaaggttatatttataatgtggatgttaccagttaggggaagacttttattttcatgaaaagacaataaaacaaaatggaatgtgatgaagtggtgactatttcaaagccagtttagaaagtattagtacgggcattacaatcttttggttgttttgtgttttggggcttaaccctcttttaagctgttgtgatctagggaagtcaacacatagtgtaaaataattacatgcctaatgaaaagaagatgtcatttcctaattttgatatctcattttcggcattttttaaaatgtaaaaggaaaacctcttgtgttcacacagattgctgaattgatttctccatatttgttaataatttactattatttacaaagattcaaatgcttttatgactaatgtaaaatgaaaagaggcttacattttaaatgttattaaaattatgtacttaaatctataattatttaattattgtaaaaagtccaagcagatcaataaactatataattaatgggtttgg

SEQ ID NO: 1029 - DNA, 2173 bp, Homo sapien
cggtccggacagccgcgcgctgagggtctcggggcgggcgccgcgggacctctccgggccatggcagcccctgtcaaagggaacaggaagcagtccacggagggtgacgccctagacccacctgcatcccccaaacctgctggcaagcagaacggaatccagaaccccatctcgctggaggactcccccgaggcaggcggggagcgggaggaggagcaggagcgggaggaggagcaggccttcctggtcagcctctacaagttcatgaaggagcgacacacgcccatcgagagggtgccccatctcggcttcaagcagattaacctgtggaagatctacaaagcagtggagaagctgggggcctatgagctggtgaccgggcgccgcctctggaagaacgtgtacgacgagctggggggcagcccaggcagcaccagcgcggccacgtgcacgcgccgccactacgagaggctggtcctgccatacgtgcggcacctgaagggggaggatgacaagccgctgcccacctccaagcccaggaaacagtacaagatggctaaggagaacaggggggatgatggggccaccgagaggccgaagaaggccaaggaggagcggcgcatggaccagatgatgccaggaaagaccaaagcagatgctgctgacccagcaccacttcccagccaggagccccccaggaacagcacagaacagcagggcctggcctctgggtcttctgtgtcctttgtgggtgccagcggctgtcctgaggcctacaagcggctcctatccagcttctactgcaaggggacacacggcatcatgtcaccactggccaaaaagaagctcctggcccaggtgagcaaggtggaggccttgcagtgccaggaggagggctgccgccatggggcagagccccaggcgtccccagctgttcacctcccagagagtccccagagccccaaagggctgactgagaactccaggcaccggctgacccctcaggagggattgcaggccccaggtggcagcctcagagaggaggcgcaggcaggcccctgcccggcagcccccatcttcaagggctgcttctacacccaccccaccgaggtgctgaagcctgtcagccagcaccccagggacttcttctctagacttaaagatggggtgctattggggcctcctggcaaagaggggctgtcagtgaaagagccccagctggtgtggggcggagacgctaaccgcccttctgcgttccataaaggtggctccagaaagggcatcctctaccccaagcccaaagcctgctgggtgtcccccatggccaaggtcccagccgagagccccacgctcccgcccaccttccccagtagcccaggcctgggcagcaagcgcagcctggaggaagagggtgctgcccacagtgggaagagactgcgggccgtgtctccctttcttaaggaggcggatgccaagaagtgtggggccaaacctgcagggtccggcctggtctcctgccttctgggcccagccctggggcctgtgcccccagaggcctacaggggcaccatgctgcactgcccgctgaacttcactggcaccccgggccccttgaagggccaggctgcactccccttcagccccctggtcatcccggccttcccggcccacttcctggccaccgcaggcccctcgcccatggccgctggcctgatgcacttccccccaacgtccttcgacagtgccctccgccacagactttgcccggcctcatctgcctggcacgcaccaccagtcacaacctatgcagcgccccacttcttccacctcaacaccaagctgtaggccagcccatggtgttgtgtacactgtggagtcgacaggggcctacaacaggcaggtactgctgccagggggctctgaactagtgcctgctacccaggacacccgggccatgcccctggctgggcagcctggcacaagtgaagaagaaggcagtgggaaaactgggtttatctcaaggcagcagcctgagcccaggagcagaggacccagttgttataaggcgctgggagaggatgggcagctcccactgccccagagcggasstcgaagcacccaggttgcccacggaaaatccaataaaaagacaccagtgtgaatccaaaaaaaa

SEQ ID NO: 1030 - protein, 614 aa, Homo sapien
RSGQPRAEGLGAGAAGPLRAMAAPVKGNRKQSTEGDALDPPASPKPAGKQNGIQNPISLEDSPEAGGEREEEQEREEEQAFLVSLYKFMKERHTPIERVPHLGFKQINLWKIYKAVEKLGAYELVTGRRLWKNVYDELGGSPGSTSAATCTRRHYERLVLPYVRHLKGEDDKPLPTSKPRKQYKMAKENRGDDGATERPKKAKEERRMDQMMPGKTKADAADPAPLPSQEPPRNSTEQQGLASGSSVSFVGASGCPEAYKRLLSSFYCKGTHGIMSPLAKKKLLAQVSKVEALQCQEEGCRHGAEPQASPAVHLPESPQSPKGLTENSRHRLTPQEGLQAPGGSLREEAQAGPCPAAPIFKGCFYTHPTEVLKPVSQHPRDFFSRLKDGVLLGPPGKEGLSVKEPQLVWGGDANRPSAFHKGGSRKGILYPKPKACWVSPMAKVPAESPTLPPTFPSSPGLGSKRSLEEEGAAHSGKRLRAVSPFLKEADAKKCGAKPAGSGLVSCLLGPALGPVPPEAYRGTMLHCPLNFTGTPGPLKGQAALPFSPLVIPAFPAHFLATAGPSPMAAGLMHFPPTSFDSALRHRLCPASSAWHAPPVTTYAAPHFFHLNTKL

SEQ ID NO: 1031 - DNA, 1746 bp, Homo sapien
gatttcttttagtcatgttgatttgatttcagtttctggctatgaaaaacatttttaaactcgtcacccacaacaaactgaacaaaactactacagtgaaagcccttttcagtgaaagatgtcagaaacctcaaaacctttggcctgactcagaactaccatgtgaaaatcagtactctcttaatgtttgaaataaaaactgaaaaaaaaaacaaaaaaacaaaaaaccttttttgaagcaccttaacgtggccatccatttgagaagtgggtgccactttttttctttgagcaccttattgatgtgtttgctatctgctgtctttctgttacctgttggctgaatggctagctgttaacatatacatgtgcacagaagagatatctgggcatgtatgttctcaatgaagtttactgtggtgactgctgaaaggtgaacccatttcctgatttttcccgccgcagtgttgtgataagattcgaagaaacctttttccctgcacagaaatgtttcttatcacattgtatcttagtatggaaaggaatatggtcccttttttgcaattgctactgtgtacacacacacacacacacacacacacacacacacacacacactctgtatgtttagacctaaaatacacacacccacgcacacactgtatgtttatgtgacctaaaacatacacacatgcacacacacatacatatccattcattcattcattcaagtggtgtttccagtgtctgtgtgtcactgtttatgcagtttccatttcccagtgaattatgagtggagggcaacttttctaaccagattgtcttttcagaacaaagacctgggaattgaggaagagtttggaaagagggagaggcaaggaaagagagctttaaattgaaaggttaatttcctaagaggaacctgggctgaatgactacagtgttataccctccaatctttgcaggtgggcatggaacactgcttgtatcactctgtgcacggtataaatccatatatccacaaaaacacacatccatccatcaacatatacatggtttgggatgagcaggtcaatagttttgagagggagtttgttcctttttttttctcattatactcttaaattgttgtcagttatcaaacaaacaaacagaaaaattgtttggaaaaaccttgcatacgccttttctatcaagtgctttaaaatatagactaaatacacacatcctgccagttttttcttacagtgacagtatccttacctgccatttaatattagcctcgtatttttctcacgtatatttacctgtgacttgtatttgttatttaaacaggaaaaaaaacattcaaaaaaagaaaaattaactgtagcgcttcattatactattatattattattattattgtgacattttggaatactgtgaagttttatctcttgcatatactttatacggaagtattacgccttaaaaatacgaaaataaattttacaaggtttctgttttgtgtggaagagtaattgatgttgctaagaatgatgtttgtttttttggggtttttgttgttttttttttaaatgttaccagcactttttttgtaagtttcactttccgaggtattgtacaagttcacactgtttgtgaagtttgaatatgaaggaataattaaaaaaaaaaaaaactcttaaaaaaaaaaaaaaaaaaaaaaaaaaaaaaaaaaaaaaaaaaaaaaaagggcggccg

SEQ ID NO: 1032 - DNA, 696 bp, Homo sapien
atgacggtgggcaagagcagcaagatgctgcagcatattgattacaggatgaggtgcatcctgcaggacggccggatcttcattggcaccttcaaggcttttgacaagcacatgaatttgatcctctgtgactgtgatgagttcagaaagatcaagccaaagaactccaaacaagcagaaagggaagagaagcgagtcctcggtctggtgctgctgcgaggggagaatctggtctcaatgacagtagagggacctcctcccaaagatactggtattgctcgagttccacttgctggagctgccgggggcccagggatcggcagggctgctggcagaggaatcccagctggggttcccatgccccaggctcctgcaggacttgctgggccagtccgtggggttggcgggccatcccaacaggtgatgaccccacaaggaagaggtactgttgcagccgctgcagctgctgccacagccagtattgccggggctccaacccagtacccacctggccgtgggggtcctcccccacctatgggccgaggagcaccccctccaggcatgatgggcccacctcctggtatgagacctcctatgggtcccccaatggggatcccccctggaagagggactccaatgggcatgccccctccgggaatgcggcctcctccccctgggatgcgaggccttctttga

SEQ ID NO: 1033 - protein, 231 aa, Homo sapien
MTVGKSSKMLQHIDYRMRCILQDGRIFIGTFKAFDKHMNLILCDCDEFRKIKPKNSKQAEREEKRVLGLVLLRGENLVSMTVEGPPPKDTGIARVPLAGAAGGPGIGRAAGRGIPAGVPMPQAPAGLAGPVRGVGGPSQQVMTPQGRGTVAAAAAAATASIAGAPTQYPPGRGGPPPPMGRGAPPPGMMGPPPGMRPPMGPPMGIPPGRGTPMGMPPPGMRPPPPGMRGLL

SEQ ID NO: 1034 - DNA, 8859 bp, Homo sapien
ggtcttcaggagagccaggagaggccagttgtcacgtgcctgaaacatgaggacttcgagttggctttccttctcttgaccaagggcgcagacccccgtgctatttctctcacggaaggtgatactcctttgcatgcagcactccacatctttctagagattaaagctgacattggttttagcttcctcagccatctgttggatctgttttggtccaaccccactgaattcgactacctcaaccccaatgtccaggacagcaatgggaacacgctgatgcacatcctcttccagaagggcatgctaaagcgcgtgaagaagctgttagacctgctggtgaagtttgacatcaacttcaatctgaagaacaaagagggcaaagatgcacggcaccggattaagaagaacgactctctgctcttggcctggaacaaagctctgatggagaacaggaggaggagccggcaggactctgctgcccacctggggaagctctcaaagtccactgcccctggtcacacatctcagctcaagtcccagggttcattcaagtcagtgccatgtggtgccactgccagaacactgcctgaaggaagtgcagtccctgacagctgggagactctcccaggtacccaggtgaccaggaaggagcctggagctctcaggccctgctcgctgagagactgccttatgcaggacatcacagttttgattcagcaggttgaagtggatccgtctttcccagaggactgtcttcagagctctgagcctctggaggcaggagctggcaaagaaggaaagaaagatgacaagccgactctgggtgcaggggcccctgactgtagtgaggtgggggaaggacatgctcaggtgggtcttggggccttgcagcttgtgcctgatgataacagggggaaggagggcaatgatgatcaggatgactggagcacgcaggagattgaggcctgcctccaggacttcgataacatgacctgggagatcgagtgcacttcagaaatgctgaagaagctgtctagtaaggtaatgaccaaggtcatcaagaagaaaatcatccttgccattcagcagctgggaaatggcgagtggacccagggcctgcagaagcgactgaagcacctgaaaggaagcatccagctcttcgaagctaagctggacaaaggagcccggatgctctgggagctcgccattgacttctcccctcgatgcagtgagaaccctgagaagatcattgccacggagcagaacacgtgtgcaatggagaaatcagggcggatctacacggaaatcatccggatttgggacatcgtcttagatcactgcaaactggctgattccatcaaggccatctgcaatgcctacaaccggggcttgtcctgtgtcctgcggaagaagctgaaaggtatcaataaaggccaagtgtcagctaacatgaaaattcaaaagcgtatacctcgctgctatgtggaggacacagaggccgagaagggcagggagcatgtcaatcctgagtactttcccccagccagtgcagtggagacagaatataacatcatgaagttccacagcttcagcaccaacatggcctttaacatcctcaatgacacgacagccacagtggagtaccccttccgggtgggtgagcttgagtacgcggtgatcgacctcaatcccaggccactggagcccatcatccttattgggcgaagtggcactgggaagacaacctgctgcttgtacagattgtggaagaaattccacgtttactgggaaaaagctgagcaggcaggaagcccattgctggccaaacaggtctggctgaagagaaggttggaagtggaacccggaaaagagagtccaggtggggaggaagagggggaggaagaggacgaggaagaggaagattctattgaagtggaaacagtagaaagcatagatgagcaggagtatgaagcctgcgcaggaggagccggtgtggagccagcaggggacggccaagctgcagaagtatgtgcaccagaacatccccaccagctggagcatttacatcagatctttgtgaccaagaaccatgtgctgtgccaggaggtacaaaggaatttcattgagctttccaagtccaccaaggccactagtcattacaaaccactggaccccaacattcacaaactccaggacctgagggacgagaactttcctctgtttgtcacttccaagcagctgcttcttctgcttgatgcttctctgcccaaaccattttttctgagaaacgaagatggaagcttgaaaagaaccatcataggatggtctgcacaggaagagtcaaccattcctagttggcaagaggatgaagaggaggctgaggtggatggggactacagtgaggaggataaagctgtagaaatgcgtacgggtgacagtgacccccgggtgtacgtgacgtttgaggtgttcaaaaatgaaatatggcccaaaatgaccaaagggaggactgcctacaaccctgcactgatttggaaagaaataaaatcttttctaaagggttcttttgaggccctcagctgtccccatgggagactcactgaagaagtatataagaaattagggaggaaacggtgccccaatttcaaggaagaccggagtgagatctacagcctcttcagtctgtatcagcaaatcaggtcccagaaaggttattttgatgaagaggatgttctgtacaacatatcccggaggctgtcgaagctcagggtgctcccatggtccatccacgagctctatggtgatgagattcaagactttacccaggccgagctggcgctgctgatgaaatgcatcaatgaccccaactctatgttcctcacgggggacacggcccagagcatcatgaagggcgtggccttccgcttcagcgatctgcgctctctgttccattatgccagcagaaacaccatagacaagcagtgtgctgtccggaagcccaagaagatccaccagctgtaccagaattacaggtcccactcaggaatcctcaatctggcatctggagtggtggatttacttcagttctatttcccagaatcttttgatcgccttccaagggattctggcctctttgatggtcctaagccaactgttctggagtcttgtagtgtaagcgacttggcaattttgctacgagggaataaaaggaaaactcagcccattgaatttggagcccaccaggtaatccttgtggccaatgaaacggcaaaggagaaaattccagaagagctggggttagcacttgtgctaacaatttatgaagcaaaaggcttagaatttgatgatgtcctcctttacaacttttttactgattctgaggcttataaggaatggaagatcatttcctcattcacacctacctcaactgactccagagaggaaaaccggccattggttgaagtacccctggacaaaccaggctcttctcagggtcgatctctcatggtgaatccagaaatgtacaagctcctcaacggagagctgaagcagctgtacaccgccatcacacgggctcgggtcaacctctggatctttgatgaaaaccgagagaaacgggctcccgcattcaaatatttcattagaagagattttgtccaagttgtaaagacagatgaaaataaagactttgatgatagcatgttcgttaagacctcaactcctgcggagtggattgcacagggagattactacgccaagcaccagtgctggaaggttgcagccaagtgttaccagaaaggaggtgcatttgagaaggagaagttggccctggcccatgacactgccctgagcatgaaatccaagaaagtcagccccaaggaaaagcagttggaatatttggaattggctaagacctatttggagtgcaaagagccaacactgtcccttaagtgtctgagctatgccaaggagttccagctctctgcccagctgtgcgagaggctgggaaagataagagatgctgcctatttctataagcgaagccagtgctacaaagacgctttcagatgctttgagcagattcaggaatttgatctagcactcaaaatgtactgccaagaggagctttttgaagaagctgctattgcagtggaaaagtatgaagaaatgctaaagactaagacccttcccatttccaagctctcctattctgccagtcagttttacttggaagctgcagcaaagtatctgagtgcaaataagatgaaggaaatgatggctgtcctctcaaagctagacatagaagaccagctggtgttcttgaagtctcggaaacgcttagcagaagctgcagacctgctgaacagggaaggtaggagagaagaggctgccctgctgatgaagcaacatggctgcctcctggaggctgccaggctcactgccgacaaggacttccaggcctcatgtctgctgggggccgcccgcctcaatgtggccagggattccgacatagaacacaccaaggacattctgagagaagcacttgatatctgctatcaaactggccagttgtctggcattgcggaggcccacttcctgcaaggggtaatcctgagagactttcagaagctcagggatgccttcttcaagtttgacacgctcaaccactcagctggagtggtggaagcactctacgaagcagccagccagtgtgaggccgagcctgagaagattctgggcctggctccagggggcttggaaatcctcctcagtctggtcagggctctcaaaagagtgaccaacaatgctgagaaggaaatggtcaaatcttgctttgagttttttgggatttcccaggtggatgccaagtattgccagatagctcagaatgaccctgggcccatattaagaataatttttgacctggatttgaacttgagagagaaaaaaacaaaagatcattttttgataatgactgaccaagtgaaattagccctaaacaaacaccttttgggcaggctgtgtcagatcacacggagcctgcttgggaagacctaccgaggagtctgcatgaggtttattgtaggcttaaaatgtgaggatgaaaactgtgaacattttcacaggcctctgcggcgttgtgaagccaagtgtttagttcagtcgaaaatgaacttggtggcaatcaacgggttgcttttggaagccaaaaaagtattccctaaaatcttagcagaagaacttaaagaaattgattatattttgtctacagatatgtatggcctttgcaagtccattctggatgtccttttccctaagcatttccatcagagagtgttgtcagaaaaccccatggcatgcaaagaaatcctcaaaccaaattacaaatccttccggttctacagatttgctttgaaggagtacatccactttctgtttgaaaatgaaagcgcacgcaaccgccgggaatccacagacctgtggctgagtgccatgcaagctttccttctctcttccaactacccggaggagtttgaaaagctgctccaccaggaggaggacaactacaacagggaactcaaagctctagagtctgaaaaggatgaaaggggcagggggagaggcagcaggataaaaggaatagaagggaaatttggcatgctggcacccaacagggatgatgaaaatatggacaagacccacctgtgcttcatccggcttctggagaattgcattgatcaattctacgtgtacaggaacccagaagactacaagaggctctttttccgtttcatgaatgtcctcatcaagaggtgcaaagaaccactcatccccagcattggaaacacagtagccctcctggagttccagttcatccactgtggggtggtgctggcccgcctctggaagaatgtcattctatgcctccccaagagctacattgcactcttgcactactgggagttcctgtttagcaagaaggacaaggagcttggggatgtgttctccatcattcaggaatacaaacccaaggacgtgacaagagccattcaggatttccggttccatctctcctacctcgccaaggtgctatgtggctatgagaatgtgaacttcaacgtcctgcttgatgccttcagtgaaatagactatgtggtctcgggtgaggctgagcggacactggtgctgtgcttggtgatgctagtgaatgctgaggagatcctgcagccatactgcaagcctctcctgtatcgccacttccgggagattgagtcaaggctgcagctcatgagcatggactgccctggccaggttcccgagaggctcctgaaggtggtgaagcgggtcttggtggcagtcaatgtgaagtctgtggctgaggcactgcaggacctgctctttgagcgggatgaagagtacctaatggactgtgactggcggtgggaccctgtgcacaccaaagggtccatagtccgtggcctctattatgaggaggtcagactaaaccgcctgctctgtttggaccctgtggactactttgctgaacctgagtgtgagtttggccaggatgagatggatgaactggcattagaagaccgagaccacgtcctggccaccattctttcccaaaagcaacggaaggcctccatacagcggaagttgaggagggcatgcctggtggtgtctctgtgcatcagttggaggagaagagtgggcacccagatggagcgtgtcagggaggaggccagggagcccagggctgggaacttcaaaaaggcagacgtggacaggacccagtgtgacctatgtggagtgaagtttacccgtggcccagagaactatttcagccccagcaaagcgtttgagggggcagcttccgaggtggcagtcctttccagggctgagctggaaagggaggagtgtcaggagaggaacagcgagtcttacgagcagcatatccatctagaacaccaccagaggcagcaagtggcctaccagaaatactcagaatttttccacgagaaggtggacccggccattgatgaaggcaagctggtggtgcaggacatcgagcaaagtgtatggatccacagtcacgtgggctccaaggagcacagccacatgctgcagaaggtccaggagcacatcaagagggtttcggatatggtggaggacctctacaggcggaaggcctgggctggcgcggaggaggcgatgactcggctggtcaacattctgatcctgtcagtcagggatgcacgagactggttgatgaaaacagagacccgcttaaagaaggaaggtattgttcaggaagatgattatgaaaatgaagttgaagactttggtgagcttcggcctagaaggcgttctcggaaatgtggaaagcagagaaaatactaatgtccacacagctgcagcctcctcatccttcggaacattccattctgacttagaattctgagcgctggggcagaagacaaaaagaatgtgaattagcattttaaaaataggggagtctaacaacaccattgctttttattctcattacttctctttcagtggcttaggatctgattgctccctcacctctaaagtgtttccaagtagagtctggcagtattagtttcccccacaaacaaattcaggtagagaagttgtagtcgaagggaatgttgggactcctcactgcatggtccctggggtgtctggctcatccccatcatgacgtgagttggtagcagaggactaggtgttaggacagactctcctcacctcagttgctgctgctctgggccaggaaatctctctatggattccctcatctcctgccacactgctgcagcatcaagtgtgctatgagagctgtatgtgcccaggggtgggccctgccactggccaccccgagcccaggacgcattctggtcatctctgagcccacttgtagtgtagcttcttctgttagagatgttagccttttctctctgtggcgacttttctgccttcccttcttctgttttttgtgatcattcttagctacctgtgccaagtcacagttagactacctcagaatgtagtcaagaattcacccagtgttctttggatgtcccttccctagggggaaaggctggggaatgttgctgggagcattcccagctgcctctccaaagtggtcctaactctgccttggctatggtgcagacattccaaaaagtgttttgtatacagccctgtacatctagttttcttggttctccctggcaagttcgctaccctagcttaggctgacgttctgatgagtctctgcttgctgagctcatcactgtgggatggtgacctgcagagctgcagattggagcaagtggacagaggagggagccagctaagccaaatccgtcactgccacttggctggcaggccttataagagggcggatctgggcccgtttgcaggaggccattgcctaccctctccccacagtgagccagcagccatcagctgatcccacctgggaaaccttcatgcctctctgatggttactgcccacccttaccccacccctcagctcagcctggtatggaaagcaaggtgcacgttggtctttgattgttctgtcctcacagcagagccagctttccccccatgttgctgctgcttttgctgctcatgctgcttgttgttttctcttccttatctttccaaattgtttccttgaaatgcttgtttccaatttttcttagattatgtttctaatttttattccaggtgtttttttttcttacttgacagaaaaaaagaaaaccccaacaatatcttgctgtattatcacattttttataaagttaaagcatttctctt

SEQ ID NO: 1035 - protein, 1347 aa, Homo sapien
GSPKRGRAYKEWKIISSFTPTSTDSREENRPLVEVPLDKPGSSQGRSLMVNPEMYKLLNGELKQLYTAITRARVNLWIFDENREKRAPAFKYFIRRDFVQVVKTDENKDFDDSMFVKTSTPAEWIAQGDYYAKHQCWKVAAKCYQKGGAFEKEKLALAHDTALSMKSKKVSPKEKQLEYLELAKTYLECKEPTLSLKCLSYAKEFQLSAQLCERLGKIRDAAYFYKRSQCYKDAFRCFEQIQEFDLALKMYCQEELFEEAAIAVEKYEEMLKTKTLPISKLSYSASQFYLEAAAKYLSANKMKEMMAVLSKLDIEDQLVFLKSRKRLAEAADLLNREGRREEAALLMKQHGCLLEAARLTADKDFQASCLLGAARLNVARDSDIEHTKDILREALDICYQTGQLSGIAEAHFLQGVILRDFQKLRDAFFKFDTLNHSAGVVEALYEAASQCEAEPEKILGLAPGGLEILLSLVRALKRVTNNAEKEMVKSCFEFFGISQVDAKYCQIAQNDPGPILRIIFDLDLNLREKKTKDHFLIMTDQVKLALNKHLLGRLCQITRSLLGKTYRGVCMRFIVGLKCEDENCEHFHRPLRRCEAKCLVQSKMNLVAINGLLLEAKKVFPKILAEELKEIDYILSTDMYGLCKSILDVLFPKHFHQRVLSENPMACKEILKPNYKSFRFYRFALKEYIHFLFENESARNRRESTDLWLSAMQAFLLSSNYPEEFEKLLHQEEDNYNRELKALESEKDERGRGRGSRIKGIEGKFGMLAPNRDDENMDKTHLCFIRLLENCIDQFYVYRNPEDYKRLFFRFMNVLIKRCKEPLIPSIGNTVALLEFQFIHCGVVLARLWKNVILCLPKSYIALLHYWEFLFSKKDKELGDVFSIIQEYKPKDVTRAIQDFRFHLSYLAKVLCGYENVNFNVLLDAFSEIDYVVSGEAERTLVLCLVMLVNAEEILQPYCKPLLYRHFREIESRLQLMSMDCPGQVPERLLKVVKRVLVAVNVKSVAEALQDLLFERDEEYLMDCDWRWDPVHTKGSIVRGLYYEEVRLNRLLCLDPVDYFAEPECEFGQDEMDELALEDRDHVLATILSQKQRKASIQRKLRRACLVVSLCISWRRRVGTQMERVREEAREPRAGNFKKADVDRTQCDLCGVKFTRGPENYFSPSKAFEGAASEVAVLSRAELEREECQERNSESYEQHIHLEHHQRQQVAYQKYSEFFHEKVDPAIDEGKLVVQDIEQSVWIHSHVGSKEHSHMLQKVQEHIKRVSDMVEDLYRRKAWAGAEEAMTRLVNILILSVRDARDWLMKTETRLKKEGIVQEDDYENEVEDFGELRPRRRSRKCGKQRKY

SEQ ID NO: 1036 - DNA, 5338 bp, Homo sapien
ggccgcgagtgcatcttccacgaacctaattcatctctccagcaaaggacacatctctccagcaaaggacacctctctccagcaaaggacacctgcagagatgtccccagtccttcacttctatgttcgtccctctggccatgagggggcagcctctggacacactcggaggaaactgcaagggaaactgccagagctgcagggcgtcgagactgaactgtgctacaacgtgaactggacagctgaggccctccccagtgctgaggagacaaagaagctgatgtggctgtttggttgccccttactgctggatgatgttgctcgggagtcctggctccttcctggctccaatgacctgctgctggaggtcgggcccaggctgaacttctccaccccaacatccaccaacatcgtgtcagtgtgccgcgccactgggctggggcctgtggatcgtgtggagaccacccggcgctaccggctctcgtttgcccaccccccgtcagctgaggtggaagccattgctctggctaccctgcacgaccggatgacagagcagcacttcccccatcccatccagagtttctcccctgagagcatgccggaacccctcaatggccctatcaatatactgggtgagggccggcttgcgctggagaaggccaaccaggagcttggtctggctttagactcttgggacctagacttctacaccaagcgcttccaggagctacagcggaacccgagcactgtggaggcctttgacttggcgcagtccaatagcgagcacagccgacactggttcttcaagggccagctccacgtggatgggcagaagctggtgcactcactgtttgagtccatcatgagcacccaggaatcctcgaaccccaacaacgtcctcaaattctgtgataacagcagtgcaatccagggaaaggaagtccgattcctacggcctgaggaccccacacggccaagccgcttccagcaacagcaagggctgagacatgttgtcttcacagcagagactcacaactttcccacaggagtatgcccctttagtggtgcaaccactggcacagggggccggattcgagatgtccagtgcacaggccgcggggcccacgtggtggctggcactgccggctattgctttggaaatctgcatattccaggttacaatctgccctgggaggatctaagcttccagtatcctgggaattttgcccggcccctggaggttgccattgaagccagtaatggagcttctgactatggcaacaagtttggggaaccagtgctggctggcttcgcccgctccttgggcctccagctcccagacggccagcggcgtgagtggatcaagcccatcatgtttagtgggggcattgggtccatggaagctgaccacataagcaaggaggccccagagccaggcatggaagttgtaaaggttggaggtcccgtctacaggattggagttggaggtggagctgcttcatctgtgcaggtgcagggagataacaccagtgacctggactttggggctgtgcagcgaggagacccggagatggaacagaagatgaaccgtgtgatcagggcttgtgtggaggcccccaagggaaaccccatctgcagccttcatgatcagggcgctggtggcaatggcaatgtcctaaaagagctgagtgacccagctggagccatcatttacaccagccgcttccagcttggggacccaaccctgaatgccctggaaatctggggggctgagtaccaggaatcaaatgctcttctgctgaggtcccccaaccgggacttcctgactcatgtcagtgcccgtgaacgttgcccggcttgcttcgtgggcaccatcactggagaccggagaatagtgctggtggacgatcgggagtgtcctgtcagaagaaatggccagggggatgcccccccgacacccccgccaacccctgtggacctggagctcgaatgggtgctgggcaagatgcctcggaaggagttcttcctgcagaggaagccccccatgctgcagcctctggccttgcccccagggctgagcgtgcaccaggctctggagagggttctgaggctgcccgccgtggccagcaagcgctacctcaccaataaggtggaccgctccgtgggaggcctggtggcccagcagcagtgcgtggggcccctgcaaactcctctggcagatgtagcggttgtggcactgagccatgaggagctcataggggctgccacagccttgggagaacagccagtcaagagcctgctggacccaaaagtcgccgcccggctggccgtggccgaagccctcaccaacctggtgtttgctctggtcactgacctccgggatgtgaagtgtagcgggaactggatgtgggcagccaagctcccaggggagggcgcagctttggcggatgcctgtgaggctatggtggcagtgatggcagccctgggtgtggcagtggatggtggcaaggactccctcagcatggctgctcgggttggcactgagaccgtgcgggctcctgggtcactggtcatctcagcctatgccgtctgcccagacatcacagccactgtgaccccagacctcaagcatcctgaagggagaggccatctgctctatgtggctctgagccctgggcagcaccggctcgggggcacagctctggcccagtgcttctcccagcttggggaacaccctccagacctggaccttcctgagaacttggtgcgggccttcagcatcactcaggggctgctgaaagaccgcctcctctgctcaggccacgatgtcagtgacggaggcctcgtcacatgcctgctggagatggcctttgctggaaattgcgggctacaggtggatgtgcctgtccccagggttgatgtcctgtctgtgctgttcgctgaggagccaggcctcgtgctggaggtgcaggagccagacctggcccaggtgctgaagcgttaccgggatgctggcctccattgcctggagctgggccacacaggcgaggccgggccccacgccatggtccgggtgtcagtgaacggggctgtggttctggaggagcctgttggggagctgcgagccctctgggaggagacgagtttccagctggaccggctacaggcagagcctcgctgtgtggcagaggaggaacggggcctgagggagcggatggggcccagctattgcctgccccccacctttcccaaagcctccgtgccccgtgagcctggtggtcccagcccccgagtcgccatcttgcgagaggagggcagtaatggagaccgggagatggccgatgccttccacttagctgggtttgaggtatgggacgtgaccatgcaggacctctgctctggggcaattgggctggacactttccgtggcgtggccttcgtgggcggcttcagctatgcagatgtcctgggctctgccaaagggtgggcagctgctgtgacctttcatcccagggctggggctgagctgaggcgcttccggaagcggccagacaccttcagcctgggcgtgtgtaatggctgtcaactgctggctctgctcggctgggtgggaggcgaccccaatgaggatgctgcagagatgggccctgactcccagccagcccggccaggccttctgctacgccacaacctgtctgggcgctacgagtctcgctgggccagcgtgcgtgtggggcctgggccagccctgatgctgcgagggatggagggcgccgtgctgcccgtgtggagtgcgcacggggaaggttacgtagcattttcttctccggaactccaagctcagattgaggccaggggcttggctccactgcactgggctgatgatgacgggaaccccacagagcagtaccctctgaatcccaatgggtccccagggggcgtggctggcatctgctcctgtgatggccgccacctggctgtcatgcctcaccctgagcgggccgttaggccttggcagtgggcatggcgaccccctccatttgatactctgaccacctccccctggctccagctctctatcaatgcccgaaactggaccctggaagggagctgctgactggccacaggggctcacctgggccccatggcttttcacctaagtgggtcctgccccctcccccatgaccttcaggagcaccccatattatttccaaaaatatcttggacagacaaggaccaaaatgccaaaatctcagcggactcgatgatctgcctgctgatgttccttctgtggctgtgtctattttcagttctgctctaacatggcatgccctttctcagcccaggaaacagcatgtggttcagagaaaagagcgacaaggaaaagttaggactcctgaggtccgaacaggggcttctgttgcccacttcacaacacccagtgatcaccggtgtgcaattgcctccttggctctgagggatgttttgcgctcccttttctcatcattggggttagcgggtgcagacaaattcagcaatagtatgcagatcagcccctcaccacctcattgttctcatctggaactgaaactttctggatttctcttgaagtgctacactgcactgaatgtaaggaattgttgcttgtggaagtttctcagcgtttctggctgtcttagggctggcctcagaacccagcattcctgttatttgcttctaaattagcagctctctttttttttttttttttgaggcagtctcactctgtcacccaggctggagtgcagtggcgtgatctcggcccactgcaacctctgcctcctgggttcaagcaattttcctgcctcagcctcccgagtagctgggagtacaggcacacaccaccacacccagctaatttttgtatttttagtagagatagggtttcaccgtgtctcccaggctggtctcaaactcctaacctcaagtgattcgcctgcctcggcctcccaaagtgctgggattacaggtgggagccactacagctggcccagcagctctgtttctgatagaggtggttggggctctcatccctagatcctaaccctttagtatgctggaattctactcttcacttactgcattgactgttgttgattagttattattgcaaagcactgccaccggcctcagggagtttatgtgtaatagaattaaaaataatagctgtgtataacacttagctcaagccacgcatgtgtgaggcatttggtatgtatctgaattaattctcactaaaattcagcaaaggacttgatagcctctccccgccttttcaataaaggatgaatgaaggttg

SEQ ID NO: 1037 - protein, 1371 aa, Homo sapien
AASASSTNLIHLSSKGHISPAKDTSLQQRTPAEMSPVLHFYVRPSGHEGAASGHTRRKLQGKLPELQGVETELCYNVNWTAEALPSAEETKKLMWLFGCPLLLDDVARESWLLPGSNDLLLEVGPRLNFSTPTSTNIVSVCRATGLGPVDRVETTRRYRLSFAHPPSAEVEAIALATLHDRMTEQHFPHPIQSFSPESMPEPLNGPINILGEGRLALEKANQELGLALDSWDLDFYTKRFQELQRNPSTVEAFDLAQSNSEHSRHWFFKGQLHVDGQKLVHSLFESIMSTQESSNPNNVLKFCDNSSAIQGKEVRFLRPEDPTRPSRFQQQQGLRHVVFTAETHNFPTGVCPFSGATTGTGGRIRDVQCTGRGAHVVAGTAGYCFGNLHIPGYNLPWEDLSFQYPGNFARPLEVAIEASNGASDYGNKFGEPVLAGFARSLGLQLPDGQRREWIKPIMFSGGIGSMEADHISKEAPEPGMEVVKVGGPVYRIGVGGGAASSVQVQGDNTSDLDFGAVQRGDPEMEQKMNRVIRACVEAPKGNPICSLHDQGAGGNGNVLKELSDPAGAIIYTSRFQLGDPTLNALEIWGAEYQESNALLLRSPNRDFLTHVSARERCPACFVGTITGDRRIVLVDDRECPVRRNGQGDAPPTPPPTPVDLELEWVLGKMPRKEFFLQRKPPMLQPLALPPGLSVHQALERVLRLPAVASKRYLTNKVDRSVGGLVAQQQCVGPLQTPLADVAVVALSHEELIGAATALGEQPVKSLLDPKVAARLAVAEALTNLVFALVTDLRDVKCSGNWMWAAKLPGEGAALADACEAMVAVMAALGVAVDGGKDSLSMAARVGTETVRAPGSLVISAYAVCPDITATVTPDLKHPEGRGHLLYVALSPGQHRLGGTALAQCFSQLGEHPPDLDLPENLVRAFSITQGLLKDRLLCSGHDVSDGGLVTCLLEMAFAGNCGLQVDVPVPRVDVLSVLFAEEPGLVLEVQEPDLAQVLKRYRDAGLHCLELGHTGEAGPHAMVRVSVNGAVVLEEPVGELRALWEETSFQLDRLQAEPRCVAEEERGLRERMGPSYCLPPTFPKASVPREPGGPSPRVAILREEGSNGDREMADAFHLAGFEVWDVTMQDLCSGAIGLDTFRGVAFVGGFSYADVLGSAKGWAAAVTFHPRAGAELRRFRKRPDTFSLGVCNGCQLLALLGWVGGDPNEDAAEMGPDSQPARPGLLLRHNLSGRYESRWASVRVGPGPALMLRGMEGAVLPVWSAHGEGYVAFSSPELQAQIEARGLAPLHWADDDGNPTEQYPLNPNGSPGGVAGICSCDGRHLAVMPHPERAVRPWQWAWRPPPFDTLTTSPWLQLSINARNWTLEGSC

SEQ ID NO: 1038 - DNA, 4147 bp, Homo sapien
ccgcgcgcggcggcccgaggcggcggcggggacgcggggacgcgaggacgcggctttgtgcaggcgggtcgcggggcgcccatggcggagtgcggccgggggggcgccgccggcggggccctgcccacctccccgggcccggccctcggcgccaagggcgccctgaaagccggagtgggggaaggcggtggcgggggaggtcgcctcggccacgggcgggcgcgctatgacagcggcggggtttccaacggagactgcagcctcggcgtgtccggggacgaagcccgggctagccctaccaggggaccccgcggcgttgcgctcgccccgacccccagcgcggtcgtctgtaccctcccccgggagagcaagccgggcggcctgccccgccggagcagcatcatcaaggatggtacaaaacagaagagggaacggaaaaagacagtctcattcagcagcatgccaacagagaagaagatcagcagtgcaagtgattgtattaattcaatggttgagggttcagaactcaaaaaggttcgctccaactctagaatttatcataggtactttttactggatgctgacatgcagagcctaaggtgggagccatctaagaaggattctgagaaagccaagattgacattaaatccatcaaggaagtgagaacaggaaaaaacacagacatattccgcagcaatggcatttctgaccagatatctgaagattgtgcgttttccgtcatatatggagagaattatgagtcactggatttggttgccaactccgcagatgttgcaaacatctgggttacaggactgcggtacctaatttcttatggaaaacatacacttgatatgttagaaagtagccaagataacatgaggacttcttgggtttcacaaatgtttagtgaaattgatgtagataaccttggacatataactctgtgtaatgctgtgcaatgtatcagaaacctcaatcctggtttaaaaacgagcaaaattgagcttaagttcaaagaattgcataaatcaaaggacaaagctggtaccgaggtcacaaaggaagaatttattgaggtttttcatgagctttgtactagacctgaaatttatttccttttagttcagttttcaagcaataaagaattccttgataccaaggaccttatgatgtttcttgaggcagaacagggtgtggcacatataaatgaggaaataagccttgaaattattcacaaatatgaaccatccaaagagggtcaggaaaagggctggctctccatagacgggttcactaattaccttatgtcacctgactgttatatattcgatccagaacataagaaggtctgtcaggatatgaagcaacctctgtctcattactttataaactcatctcataatacatacttaatagaggatcagttccgaggtccctccgacatcacaggatatattcgagctcttaaaatgggttgccggagtgttgaattagatgtatgggatgggccggacaatgaacctgtaatttacacaggccacaccatgacctctcagatagttttccgcagtgtcattgatattattaacaagtatgcattctttgcttcagagtatcctcttatcttgtgtttagaaaaccactgttccattaaacaacagaaggtaatggttcagcacatgaagaaacttttaggagacaagctctatacaacatcacccaatgttgaggaatcttatctaccatccccagatgtcctgaaagggaaaatactaattaaagcaaagaagctgtcctcaaattgctctggggtagaaggagatgttactgacgaagatgaaggagcagaaatgtctcagaggatgggaaaagagaacatggagcaacccaataatgtgcctgtgaagcgatttcagctttgtaaagaactgtctgaactggtcagcatctgcaaatcagttcagttcaaagaatttcaggtgtcgtttcaggttcagaagtactgggaagtctgttcctttaatgaagtgcttgccagcaagtacgccaatgaaaatccaggggactttgtaaattacaacaaacgttttcttgctagggtttttcccagtccaatgagaattgattccagtaacatgaatcctcaagatttttggaaatgtggttgccaaattgtagccatgaactttcagacaccaggactgatgatggacctgaatattggctggtttaggcagaacggaaactgtggctatgtcctccggccagccatcatgagggaggaggtctccttcttcagcgccaatacaaaagactctgtcccaggggtctcacctcaacttcttcacattaaaatcatcagtgggcagaactttcccaagcccaaaggatcaggtgccaaaggtgatgtggtagatccttatgtctatgttgaaatccatggaatccctgctgattgtgcagaacaaaggacaaaaacagtgcaccagaatggagacgctcccatttttgatgaaagctttgaatttcaaatcaacctgcctgaactggccatggtgcgctttgtagtgctggatgatgactacattggggatgaattcatcggccagtacacaattccctttgaatgtttacagacgggctaccgccatgtccccctgcagtccttaactggagaggtccttgcacatgcttctttatttgtccacgtggctattactaaccgaagaggaggaggaaagcctcataaaaggggcctttctgtgagaaaagggaagaaatccagggaatatgcatctttgagaacactgtggattaaaaccgtggatgaggtattcaagaatgcccagccccctatacgggatgccacagatctgagagaaaacatgcagaatgcggtggtgtcattcaaggagctgtgtggcctctcctctgtggccaatctcatgcagtgcatgttggcggtgtctccccgctttctggggcccgataacacacccctagtggtcctaaatctcagcgagcagtaccccacaatggagctgcagggaattgtgccggaggttctgaagaagatcgtaacaacttatgacatgatgattcagtccctcaaggcgttgattgaaaatgcagatgctgtatatgaaaagatcgtacattgtcagaaggcagccatggaattccatgaacacttgcacagcataggcaccaaggaaggtttgaaggaaagaaaactacaaaaagcagtggagagctttacctggaatattaccatcttaaagggacaagcagatcttttgaaatatgctaagaatgagacattggagaacctgaaacaaatccattttgctgctgtttcatgtggactgaataaaccaggcaccgaaaatgctgatgtccagaagccacgccggagcttggaagtcatacccgaaaaagcaaacgatgaaactggagaatgaggaaacttacaataaaccattatggagtttataactctaggaccaattgtagtcagatgggacatttgctttgcactcactaatgagaataatattcgggattttaaagcacaactggaatagctaattacagtctattaaaactgtgaatgtatgtagcaatcctgcgtgtgaaggcaaataaactctttaacaggcaattatattgctggccaaaatatgctatatttgtatacaaagacattctaactcagttccagtatgaagaaagattattcactctagctccactgagaaacattttcctaagtgaaaacaatttcttaagatggaaatggattggattgtcaaattattatttattggagaaaaaaacctgatctacacatttttacttatatggggttgccagagtctctgggttctagatgattttggtggcatgcttgctgagccataattactaaagagaatgtaagtggacgggttccctgaatccccggggtccttggagagccatcgaggagaatgtgcaattggactgaagctccctggctgaagatacatgccgagtcagcacatgggtagagatgatgtaaaagcagccaatctggaaacaatacattgtaaatagtttttcattgtatgaagtagtgttcacattaaaaagatgttttatgat

SEQ ID NO: 1039 - protein, 1154 aa, Homo sapien
PRAAARGGGGDAGTRGRGFVQAGRGAPMAECGRGGAAGGALPTSPGPALGAKGALKAGVGEGGGGGGRLGHGRARYDSGGVSNGDCSLGVSGDEARASPTRGPRGVALAPTPSAVVCTLPRESKPGGLPRRSSIIKDGTKQKRERKKTVSFSSMPTEKKISSASDCINSMVEGSELKKVRSNSRIYHRYFLLDADMQSLRWEPSKKDSEKAKIDIKSIKEVRTGKNTDIFRSNGISDQISEDCAFSVIYGENYESLDLVANSADVANIWVTGLRYLISYGKHTLDMLESSQDNMRTSWVSQMFSEIDVDNLGHITLCNAVQCIRNLNPGLKTSKIELKFKELHKSKDKAGTEVTKEEFIEVFHELCTRPEIYFLLVQFSSNKEFLDTKDLMMFLEAEQGVAHINEEISLEIIHKYEPSKEGQEKGWLSIDGFTNYLMSPDCYIFDPEHKKVCQDMKQPLSHYFINSSHNTYLIEDQFRGPSDITGYIRALKMGCRSVELDVWDGPDNEPVIYTGHTMTSQIVFRSVIDIINKYAFFASEYPLILCLENHCSIKQQKVMVQHMKKLLGDKLYTTSPNVEESYLPSPDVLKGKILIKAKKLSSNCSGVEGDVTDEDEGAEMSQRMGKENMEQPNNVPVKRFQLCKELSELVSICKSVQFKEFQVSFQVQKYWEVCSFNEVLASKYANENPGDFVNYNKRFLARVFPSPMRIDSSNMNPQDFWKCGCQIVAMNFQTPGLMMDLNIGWFRQNGNCGYVLRPAIMREEVSFFSANTKDSVPGVSPQLLHIKIISGQNFPKPKGSGAKGDVVDPYVYVEIHGIPADCAEQRTKTVHQNGDAPIFDESFEFQINLPELAMVRFVVLDDDYIGDEFIGQYTIPFECLQTGYRHVPLQSLTGEVLAHASLFVHVAITNRRGGGKPHKRGLSVRKGKKSREYASLRTLWIKTVDEVFKNAQPPIRDATDLRENMQNAVVSFKELCGLSSVANLMQCMLAVSPRFLGPDNTPLVVLNLSEQYPTMELQGIVPEVLKKIVTTYDMMIQSLKALIENADAVYEKIVHCQKAAMEFHEHLHSIGTKEGLKERKLQKAVESFTWNITILKGQADLLKYAKNETLENLKQIHFAAVSCGLNKPGTENADVQKPRRSLEVIPEKANDETGE

SEQ ID NO: 1040 - DNA, 594 bp, Rattus norvegicus
ctgcccctttctttttttcaggcggccgggaagatggcggacattcagactgagcgtgcctaccaaaagcagccgaccatctttcaaaacaagaagagggtcctgctgggagaaactggcaaggagaagctcccgcggtactacaagaacatcggtctgggcttcaagacacccaaggaggctattgagggcacctacattgacaagaaatgccccttcactggtaatgtgtccattcgagggcggatcctctctggcgtggtgaccaagatgaagatgcagaggaccattgtcatccgccgagactatctgcactacatccgcaagtacaaccgcttcgagaagcgccacaagaacatgtctgtacacctgtccccctgcttcagggacgtccagatcggtgacatcgtcacagtgggcgagtgccggcctctgagcaagacagtgcgcttcaacgtgctcaaggtcaccaaggctgccggcaccaagaagcagttccagaagttctgaggctggacatcggcccgctccccacaatgaaataaagttattttctcattccaaaaaaaaaaaaaaaaaaaaaaaaaaaaaaaa

SEQ ID NO: 1041 - protein, 158 aa, Rattus norvegicus [sequence omitted]

SEQ ID NO: 1042 - DNA, 4917 bp, Homo sapien
gccaccgcagggctgctccaagtgagaatcgtgagggtggccaagtccagtttggacctctgacccttgggcagcacctcccgacagccggctcgggacccaactctgcgagccaggtgaaaatgagttcttcagtaagaagaaaaggcaagccaggcaaaggaggtggaaaagggtcttctagaggaggaagaggaggcaggagtcacgccagtaaatctcatgggagtggtggcggtggcggtggtggtggtggtggaggtggcggcaacagaaaggcctccagtagaatatgggatgatggagatgacttttgtatcttcagtgaatcaaggcgcccttccagacctagcaacagtaacataagcaaaggagagtcacgcccaaaatggaaacccaaagccaaagtaccccttcagactctacatatgacttctgagaatcaagagaaagtgaaagctcttctccgagacctgcaagaacaagatgctgatgctggatctgaaagaggcctttctggggaggaggaagatgatgagcctgattgctgtaacgatgagcggtactggccagctggacaggaaccttccctcgttcccgacttggatcctttggaatatgctggcttagcctcagtggagccttatgttccagaatttacagtctccccatttgcagtgcaaaaactttccaggtatggtttcaatactgaacgctgtcaagcggtcctgaggatgtgtgatggagatgtgggagcatcactagagcatctccttacccagtgtttttcagagacatttggagagaggatgaagatctctgaggcagtcaaccagataagcttggatgagtgtatggaacagcgacaggaagaggcatttgctctcaagtccatctgtggagaaaaatttatagaaagaattcagaacagagtctggaccattgggttagaactggagtatctgacaagtagattccgcaaatccaagccaaaagaaagtaccaaaaatgtacaagagaattcacttgaaatctgtaaattttacctcaaaggaaattgtaaatttggatcaaaatgcagattcaaacatgaagtgcccccaaatcaaattgttggaagaatagaaagaagtgtagatgattctcatcttaatgctattgaagatgcatctttttttatatgaacttgaaattcgattttctaaagaccacaaatatccctaccaagctccgctcgtggcattttattccaccaatgagaacctacctctggcttgtcgtttacatatttctgagtttctttatgacaaggccttgacatttgcggaaacttcggaacctgtcgtatattctttgataacccttttagaggaagagtcggaaatagtcaagttactaacgaatacccaccacaagtatagtgaccctcctgtgaactttctgccagtaccctctaggaccagaataaataatcctgcctgtcataaaacagtgattccaaataattcttttgtttctaatcaaattccagaagttgaaaaagcatcagaatctgaggagtcagatgaggatgacggtcctgcacctgttatagtagagaatgaaagctatgtgaaccttaagaaaaagatttccaaaagatatgactggcaggcaaagtcagtacatgctgaaaatggtaaaatctgcaagcagttccgaatgaaacaggcttccagacagttccagtccattctgcaagagaggcaatcactccctgcttgggaagaaagagaaaccattcttaacttattgcgtaagcaccaggtggttgtcataagtggtatgactggatgtgggaaaaccacacaaattccgcagtttattctggatgattctctgagtggaccacctgagaaggtagccaacatcatctgtacccaaccccgacgaatctctgcaatctctgttgctgaacgcgttgctaaagaaagagcagagagggtgggtctgaccgtgggataccagattcggttagaaagtgtcaagtcctcagccaccagactgttatactgcaccacgggagtgctgctgagaaggctagaaggagatacagctctacaaggagtttcccatatcattgttgatgaagttcatgagaggacagaagaaagtgacttcttgctgctagttttgaaggacattgtatcgcagaggccaggtcttcaagttattttaatgagtgcaactctaaacgctgagcttttttcagactattttaattcctgccccgttattactataccaggtcgtacatttcctgttgatcaattttttttggaagatgcaattgctgtgacaaggtatgtattacaggatgggagcccatatatgcggtccatgaaacagatttcaaaggaaaagcttaaagcaaggcggaacagaactgcatttgaagaagtggaagaagacctaaggctctcccttcacctccaggatcaggattctgtcaaagatgcagtgccagatcaacagttagattttaagcagctcctggcccgctataaaggggttagcaagtcagtcatcaaaacaatgtccatcatggattttgaaaaggtgaatcttgaattaatagaggccttattagagtggattgtggatggaaagcactcctaccctccaggtgctatacttgtatttttaccaggactagcagaaatcaaaatgctttatgaacagctacagtctaattctcttttcaacaacagacgtagtaatcgatgtgttattcacccacttcattcatctttatccagtgaagagcagcaggctgtgtttgtaaaacctcctgcaggagtaactaagattataatttccaccaacattgctgagacatccataaccatcgatgatgttgtctatgttatcgattctgggaaaatgaaagaaaagagatatgatgccagcaaagggatggaaagtctagaggacacctttgtatctcaagctaatgctctacaaaggaaaggccgagcaggccgtgttgcatctggggtctgcttccatttattcactagccatcactacaatcaccagcttttaaaacaacagctaccagaaatacaaagagtgccattggaacagctgtgtctaagaattaaaattttagagatgtttagtgctcataatctccagtctgtgttctctcggctcattgaacctccacacaccgattctcttcgtgcctcaaaaatacgattacgagacttaggagcattaactccagatgaaagattgacccctcttgggtatcatttggcctctctgcccgtggatgtgagaattggcaaactaatgttgtttgggtctatcttccgctgtttggatcctgctctcaccattgctgccagtttggcttttaagtctccgtttgtatctccctgggataaaaaagaagaagctaaccagaaaaagctggaatttgcattcgcaaacagtgattatctggcccttctacaagcgtataagggatggcagctaagtacaaaagaaggcgtgcgtgcaagttataattactgcagacaaaacttcttgtctggaagagttctgcaggaaatggccagcctcaaacgacaattcacggaactgttatcggatatagggtttgcaagggaagggctcagagcaagggaaattgagaaaagggcccaaggaggagatggtgtcttagatgccacaggagaagaggcaaactcaaatgctgagaaccccaagctgatatcagcaatgctgtgtgctgctttgtatccaaatgtagtgcaggtgaaaagcccagaaggaaaatttcagaagaccagtactggagctgtcagaatgcaaccaaaatcagctgagttgaagtttgtcaccaagaacgatggatatgtacacattcacccttcatcagtgaactatcaggtgagacactttgacagcccctacctgttgtaccacgagaagataaaaactagtcgagtattcatccgagactgcagcatggtgtctgtgtacccgctggtcttgtttggaggaggccaagtgaatgtgcagcttcaaagaggagagttcgttgtctccctggatgatggttggatccgttttgtagctgcttcccatcaggtggctgaactggtaaaggagcttcgttgtgaacttgatcagcttctccaggataaaattaaaaacccaagcattgatctgtgtacgtgtcctcgaggatcccggatcatcagcacaattgtgaaacttgtcaccacacaataaaaagcagtcttagagagtgcttgctactcacctgcttctagctcacctgggaaataacagcagaacctctacctcgaactaaagacctattggggctggccctggtggaggagcccagggcatgaagcccaaggcagctgaggcagtgtatatacccttagggccatttctaacaaagccttggccactcccagcacaatttggagtgtcaagggtgagagcctaaaacccagcttgcctgtctttgtctctgtgattgttctggagtgaattaagttcacctgataactcaaaagtgaatgtataatacaattctgttttaatctgtgtattctttttctcctactttttactggggtgagaggggcatgaagagaaatacgcctttttttttttcttttcctgtcgccaaggctcgactgagagaagtcagaacagagaaggggaaaaaaaacccaaaattatgtgaacaagcaaaattaaaatttcattttaggctattggctactgagtaaacttgacttgtgaggggtttttatttttactcattaaaagtcaacttaaaccaaaaaaatctatgtcgggtgcggagaaagaggtaatgaaatggcaggaattcgatatcagcttatc

SEQ ID NO: 1043 - protein, 1427 aa, Homo sapien
HRRAAPSENREGGQVQFGPLTLGQHLPTAGSGPNSASQVKMSSSVRRKGKPGKGGGKGSSRGGRGGRSHASKSHGSGGGGGGGGGGGGGNRKASSRIWDDGDDFCIFSESRRPSRPSNSNISKGESRPKWKPKAKVPLQTLHMTSENQEKVKALLRDLQEQDADAGSERGLSGEEEDDEPDCCNDERYWPAGQEPSLVPDLDPLEYAGLASVEPYVPEFTVSPFAVQKLSRYGFNTERCQAVLRMCDGDVGASLEHLLTQCFSETFGERMKISEAVNQISLDECMEQRQEEAFALKSICGEKFIERIQNRVWTIGLELEYLTSRFRKSKPKESTKNVQENSLEICKFYLKGNCKFGSKCRFKHEVPPNQIVGRIERSVDMILILMLLKMHLFLYELEIRFSKDHKYPYQAPLVAFYSTNENLPLACRLHISEFLYDKALTFAETSEPVVYSLITLLEEESEIVKLLTNTHHKYSDPPVNFLPVPSRTRINNPACHKTVIPNNSFVSNQIPEVEKASESEESDEDDGPAPVIVENESYVNLKKKISKRYDWQAKSVHAENGKICKQFRMKQASRQFQSILQERQSLPAWEERETILNLLRKHQVVVISGMTGCGKTTQIPQFILDDSLSGPPEKVANIICTQPRRISAISVAERVAKERAERVGLTVGYQIRLESVKSSATRLLYCTTGVLLRRLEGDTALQGVSHIIVDEVHERTEESDFLLLVLKDIVSQRPGLQVILMSATLNAELFSDYFNSCPVITIPGRTFPVDQFFLEDAIAVTRYVLQDGSPYMRSMKQISKEKLKARRNRTAFEEVEEDLRLSLHLQDQDSVKDAVPDQQLDFKQLLARYKGVSKSVIKTMSIMDFEKVNLELIEALLEWIVDGKHSYPPGAILVFLPGLAEIKMLYEQLQSNSLFNNRRSNRCVIHPLHSSLSSEEQQAVFVKPPAGVTKIIISTNIAETSITIDDVVYVIDSGKMKEKRYDASKGMESLEDTFVSQANALQRKGRAGRVASGVCFHLFTSHHYNHQLLKQQLPEIQRVPLEQLCLRIKILEMFSAHNLQSVFSRLIEPPHTDSLRASKIRLRDLGALTPDERLTPLGYHLASLPVDVRIGKLMLFGSIFRCLDPALTIAASLAFKSPFVSPWDKKEEANQKKLEFAFANSDYLALLQAYKGWQLSTKEGVRASYNYCRQNFLSGRVLQEMASLKRQFTELLSDIGFAREGLRAREIEKRAQGGDGVLDATGEEANSNAENPKLISAMLCAALYPNVVQVKSPEGKFQKTSTGAVRMQPKSAELKFVTKNDGYVHIHPSSVNYQVRHFDSPYLLYHEKIKTSRVFIRDCSMVSVYPLVLFGGGQVNVQLQRGEFVVSLDDGWIRFVAASHQVAELVKELRCELDQLLQDKIKNPSIDLCTCPRGSRIISTIVKLVTTQ

SEQ ID NO: 1044 - DNA, 4326 bp, Homo sapien
gcgtgaccctcgcctgatccagttgttagagttggaagcttggcagttggcctcccttcttcccatggaggacgggggcttaacagcctttgaagaggaccagagatgcctttcccagagcctccccttgccagtgtcagcagagggcccagctgcacagaccactgctgagcccagcaggtcgttttcctcagcccacagacacctgagcagaaggaatgggctttccagactctgccagagcaggacagcgctctctgaagacagatggagctcctattgtctatcatcactggctgcccagaatatttgtacaagtaaactgcactgccctgctgcccctgagcacacggacccgtccgaaccgcggggcagtgtgtcctgctgctccctgctgcggggactgtcctcagggtggtcctcacctctgcttccggcccctgtgtgcaaccctaacaaggccatcttcacggtggatgccaagaccacagagatcctcgttgctaacgacaaagcttgcgggctcctggggtacagcagccaggacctgattggccagaagctcacgcagttctttctgaggtcagattctgatgtggtggaggccctcagcgaggagcacatggaggccgacggccacgctgcggtggtgtttggcacggtggtggacatcatcacccgtagtggggagaagattccagtgtctgtgtggatgaagaggatgcggcaggagcgccgcctatgctgcgtggtggtcctggagcccgtggagagggtctcgacctgggtcgctttccagagcgatggcaccgtcacgtcatgtgacagtctctttgctcatcttcacgggtacgtgtctggggaggacgtggctgggcagcatatcacagacctgatcccttctgtgcagctccctccttctggccagcacatcccaaagaatctcaagattcagaggtctgttggaagagccagggacggtaccaccttccctctgagcttaaagctgaaatcccaacccagcagcgaggaggcgaccaccggtgaggcggcccctgtgagcggctaccgggcatctgtctgggtgttctgcaccatcagtggcctcatcaccctcctgccggatgggaccatccacggcatcaaccacagcttcgcgctgacactgtttggttacggaaagacggagctcctgggcaagaatatcactttcctgattcctggtttctacagctacatggaccttgcgtacaacagctcattacagctcccagacctggccagctgcctggacgtcggcaatgagagtgggtgtggggagagaaccttggacccgtggcagggccaggacccagctgaggggggccaggatccaaggattaatgtcgtgcttgctggtggccacgttgtgccccgagatgagatccggaagctgatggaaagccaagacatcttcaccgggactcagactgagctgattgctggaggccagctcctttcctgcctctcacctcagcctgctccaggggtggacaatgtcccagaaggaagcctgccagtgcacggtgaacaggcgctgcccaaggaccagcaaatcactgccttggggagagaggaacctgtggcaatagagagccccggacaggatcttctgggagaaagcaggtctgaaccagtggatgtgaagccatttgcttcctgcgaagattctgaagctccagtcccagctgaggatgggggcagtgatgctggcatgtgtggcctgtgtcagaaggcccagctagagcggatgggagtcagtggtcccagcggttcagacctttgggctggggctgccgtggccaagccccaggccaagggtcagctggcggggggcagcctcctgatgcactgcccttgctatgggagtgaatggggcttgtggtggcgaaggcaggacttggcccccagcccctctgggatggcaggcctctcgtttgggacacctactctagatgagccgtggctgggagtggaaaacgaccgagaagagctgcagacctgcttgattaaggagcagctgtcccagttgagccttgcgggagccctggatgtcccccacgccgaactcgttccgacagagtgccaggctgtcaccgctcctatgtcctcctgcgatctgggaggcagagacctgtgcggtggctgcacgggcagctcctcagcctgctatgccttggccacggacctccctgggggcctggaagcagtggaggcccaggaggttgatgtgaattcgttttcctggaacctcaaggaactctttttcagtgaccagacagaccaaacgtcatcaaattgttcctgtgctacgtctgaactcagagagacaccctcttccttggcagtgggctccgatccagatgtaggcagtctccaggaacaggggtcgtgtgtcctggatgacagggagctgttactactgaccggcacctgtgttgaccttggccaaggccgacggttccgggagagctgtgtgggacatgatccaacagaaccgcttgaggtttgtttggtgtcctctgagcattatgcagcaagcgacagagaaagcccaggacacgttccttccatgttggatgctggccctgaggacacgtgcccatcagcagaggagccaaggctgaacgtccaggtcacctccacgcccgtgatcgtgatgcgcggggctgctggcctgcagcgggagatccaggagggtgcctactccgggagctgctaccatcgagacggcttacggctgagtatacagtttgaggtgaggcgggtggagctccagggccccacacctctgttctgctgctggctggtgaaagacctcctccacagccaacgcgactcagccgccaggacccgcctgttccttgccagcctgcccggctccacccactctaccgctgctgagctcaccggacccagcctggtggaagtgctcagagccagaccctggtttgaggagccccccaaggctgtggaactggaggggttggcggcctgtgagggcgagtactcccaaaagtacagtaccatgagcccgctgggcagtggggccttcggcttcgtgtggactgctgtggacaaggaaaaaaacaaggaggtggtggtgaagtttattaagaaggagaaggtcttggaggattgttggattgaggatcccaaacttgggaaagttactttagagatcgcaattctatccagggtggagcacgccaatatcatcaaggtattggatatatttgaaaaccaagggttcttccagcttgtgatggagaagcacggctccggcctagacctcttcgctttcatcgaccgccaccccaggctggatgagcccctggcgagctacatcttccgacaagtgagagcaggccagagccgtctagtgtcagcagtgggatacctgcgcttgaaggacatcatccaccgtgacatcaaggatgagaacatcgtgatcgctgaggacttcacaatcaagctgatagactttggctcggccgcctacttggaaaggggaaaattattttatactttttgtgggaccatcgagtactgtgcaccggaagttctcatggggaatccctacagagggccggagctggagatgtggtctctgggagtcactctgtacacgctggtctttgaggagaaccccttctgtgagctggaggagaccgtggaggctgccatacacccgccatacctggtgtccaaagaactcatgagccttgtgtctgggctgctgcagccagtccctgagagacgcaccaccttggagaagctggtgacagacccgtgggtaacacagcctgtgaatcttgctgactatacatgggaagaggtgtgtcgagtaaacaagccagaaagtggagttctgtccgctgcgagcctggagatggggaacaggagcctgagtgatgtggcccaggctcaggagctttgtgggggccccgttccaggcgaggctcctaatggccaaggctgtttgcatcccggggatccccgtctgctgaccagctaaacaccaattttttcctgcttttctccacttggtttggaaaatcacacagttttcaggctccatctgtttggagaaaatacattctgaagcatccccaattcaccttctaaaaactcatgtgcaggtttgataaacaccagaacagaagacagtgatgctgtattattttagatttattacatagatttggaattcacttttttcatgacctagaaaaaaacattccagtgttcaactgttttatattattaaagggcttttaatttgtg

SEQ ID NO: 1045 - DNA, 2760 bp, Homo sapien
ttcatattaaaaaaatagctggtaaatctttctaggtagtaacttatccaaacaatactttgagtatcatattttgtgaatgacttgcttaaactgggaaactgaatattctttttaaatcatataattcctgtattaaatgtgaaacacacagtctccaaagtcacctgattctctgtggaaaatgaaaggcattgaaggaaaccagatacattaatacttagttttggttgaaagtgcaacattactgtacttagaaggggcttggtttatttttagatatttaagctatcattaattttagaccaatggctaataataagagagatttttggttgctcatttatggagagacaaagaacagcatggcataaacaaacatcccagaaataaatgaaaagttttaagtgataaaattgtgttttctatgaaccagtgttgtacatgaaccaacattgtgtttcttagctctgacctgtacagtgaggtacctgtcaggacccctagtcttggcactggaaatgacaaagttctcctattactaaattctcatgccttccttttctgacttagtagattgaaattggtaggtactaatgatttatgtttgataaacttaagttctgctgatatcctgttactggtaattctggtaccaaaatttcaaacggtttgattattagtagcattttgagtacctaggtgcatataatacagttagcagacccttacagagtcaaaagagattttggaatctggtgatactgttgtttattacactagcctattacattttctttctttataataactgtttatgtgagtttcattgaaaatcgtggctctattgctttattcatggtttccacaactctttttgtaacaccttaattttctctcttaggtattttcctgttaaataagatatcaaaagcatcaatcacaagacagagaaaacgtattaggaaaaacttgtattagtatattctaaactgaaatggaaaaactcattattcatattttaataaataaaactcccaaatgatcttgctaaattatcccactatttagaagtagaaaataagagaagagtgctttcaaggaaatttgtcatattctcccttctatctagaagttgacaatgaattgcaataaaactaagaaataactgaatgctgaaaaataccatgaattaatgttatggcttctttatttttgtatatccattcccacaaaattgaatttaagattattaatgaaaattctatattaagtaataatgcttgtattagtaatgggcaaagaagtctttctttgttacattaaccgttagtaaaagatgtactttgacatttctgatgtaaaacctatatgtaaatattgtaatttaaatatgattggacagctgttaagttttggggagggaagcagatgccagcgttctctgctgaaaagacaagatggcgcttgacggaccacagcagatggagctggaggaggaaaaggcaggcagtggactctgccagtattatctgtccaagattgaagaactccagggtcaactgcaatataaattggatgggggaaagccacaaggaacagttctgaactccaggtgcatttgcagctgattttgaatgataagacccaaaacctctggaggcggcaggtgcacgggaatgaactaaatgttaaagtgtgcctattacaggaggagctacagctgctgcaggaataggactcctgtgtcagggaagtagtccaggccatgggtaagaagaaagtgttggtcaaggtgcatctcaaggacaagtttgtcatagatgtggacaaaaatatcagcatcagtgatgtgacacccagttccttggtggttctaagaaatgacagctacactttgcacaagatcctacccaacaaggtggactcattggtgtcactgatgatggtgaagaaagtaccagattcagcttatgaaatgattggtagactggataggcagatcaagaagatcaaagaagtgatcgacctgcctgctaagcatcccgagctcttcaaagcactgggcattgcacagcccaagggaatgctgcttggaagagactgttggcctgggctctggctcatcatagggactgtgtacctttattcatgtctctggctctgaattggtacagaaattcattggggaatttctgtgatggcagagaaaatgctcatctgtcatcttcatggatgaaattgactcttttggctcctcagagctggagggggatgctggagggaacagtgaagtgcagcagatgatgcttcgagggtggctttgaggccaccaagagtatcacggtttatcacggctgctaatacgattgatatcctggactcggcactgctttgcccagggcacattgacagaaaaattgaattcccaacctgcaatgagtaggcctggctggtcactttgaagattcattctcagaaatgaacctgacccaggggatcaacctgagaaaaattgctgagcttatgccaggagcatcaggctgaagtgaagggcatgtgcacagaaaccggcatgtatgccctgagtagcgagtccatgtcactcagaaggactttgaggtagtccaaagtcctatctcatgccaaaggacagtgaggaaaaacatgtccatcaagaaactatggaattgagggcacatcctttgtgtgtatccctacaataaaactcagtgggacaagcaaaaaaaaaaaaaaaaa

SEQ ID NO: 1046 - protein, 132 aa, Homo sapien
MGKKKVLVKVHLKDKFVIDVDKNISISDVTPSSLVVLRNDSYTLHKILPNKVDSLVSLMMVKKVPDSAYEMIGRLDRQIKKIKEVIDLPAKHPELFKALGIAQPKGMLLGRDCWPGLWLIIGTVYLYSCLWL

SEQ ID NO: 1047 - DNA, 2268 bp, Homo sapien
  Unsure 2120-2139: Unknown base
ggcgccattttgctggagcctgcgaccgagtgggagtggagtggagcggctgtggttgccgactctttcctcttccccacggtccagtcagcgggttaattaggccatcggccctcgagccgagacttgtctcttatttagttctggggagcgcctcgtcgacatgagtgatgtggaggaaaacaacttcgagggcagagtgagtacaaagccgcgggagccgtctaggcggcggcccaatgctcggggtttcacgggaacaagcgcggtcgggcggggttgcgggtagtcccgcgaggagcaacctctggagccatcgcgattgattcctcccatcccaagatggcttctgggttccactccttccccaaacaccacggataacacccctcccccttttttggaggctgactgatacctggacttctgggtcctcttccctccccgcccccgcattgcttcctcccttctccccacccctgaggcttccttatgtctgctccgaggtgtgggtccccgtcgcggttgggcgggaggaggcggcagggagctcccctccgtccggatagtggtaggtgcttcctgcggtggcatttctggcgaccccgagcatcgtagagggtctcgggatcgaaagtgcgcggggctgctttccgggcggggagaagctggcgtgggactagctggggcctgtgtctccttggctctctatttcagtgagcggccgcgtctctgttggaaccggcggcgttgcgtctaaaaaggcgaaagccttgaggttgaaggtgggacgagcctaatgaagtggttagtcaacgaccgcaccgacccttaagcgttcttaagacgagagctgtgaggggaaactacgcaaggagcccttttcccttaatgtcccttcgactttcctttcacttcgaaatgaatgtggaaatgctgtcacgccttatttttctaattcctcgatgttgggttttttctcttctttatatctcaacttttaatgctcttcttcctatgacctttcatctaaaaactgaccactcctttacaggtttttacggtaaaaaaaaaaaaatcggtctttctttaatcttacatagctgaacgaattcattggctcagtatttttaagataactagtcagtatatactgttctgtaacttaaaagatgacctgaaaattaacaggccctctcccatttctcttctcactctatcccccaccgaagagggctcagaaaaaagtttttattaatatatttggggtcggagaaatacaaacatcacaaagaatacgatatccccagcttaaatgtactggaacgtttgtcagtgagtttcatttccaaagtttaccctacatagggaattgtagaagtgagttagtagaagtgagttcgtgtgaaaccctggaaagaaaacaaaagccccatgcaacacgttccgggctgttgtgtagatgtttattctagtcactaggggaagcacataaaaacacctgaggtgtgtgtgctgaagggcgaattttgtccttttggggagttcatgatataaacatctagaaccaaaaagtcaaatcagaaggtcagtttaggctttagttctctttgaggaaagatttaaagcaatagactataatagttacccggtagactaaaaaatttgcctttaattcttttgattggaatttttttttacaaagtttggagcatggaaacaaatgaaaattgaacctgcttattttttaggatggtgtattgatggccccaacagaactttctaaaatcatgcgataaacatatatgatagtagttgtaaaatgcttcttgttttgaaaatgttgagtaattatcgatagaaattttgctgtccattcatacattccttcaattaactttcattgttaaaaaattgggggattgatgtttggtttggtttgtggggagtgaagaggactactggagggaccttgtttgcttgctttttttctttttttaatttatcatcaagtctaggaaaggagtaagttgccgacaattgtcacttttccctcctaagaaagtaacatgttaagattcccacctaccagcctgggtgacagtgagactcccgtctcnnnnnnnnnnnnnnnnnnnnttcccacccacttttaagctaaagtatatgtaggcattaaagatttatttaatagaaataaagggccctcttacggccctttgtggtcataggaaatatttttttcacaagtggtacccaagtgtattt

SEQ ID NO: 1048 - protein, 54 aa, Homo sapien
RHFAGACDRVGVEWSGCGCRLFPLPHGPVSGLIRPSALEPRLVSYLVLGSASST

SEQ ID NO: 1049 - DNA, 2795 bp, Homo sapien
atcagcgagggattcacggcgaaatgagactgttcgtgagtgatggcgtcccgggttgcttgccggtgctggccgccgccgggagagcccggggcagagcagaggtgctcatcagcactgtaggcccggaagattgtgtggtcccgttcctgacccggcctaaggtccctgtcttgcagctggatagcggcaactacctcttctccactagtgcaatctgccgatatttttttttgttatctggctgggagcaagatgacctcactaaccagtggctggaatgggaagcgacagagctgcagccagctttgtctgctgccctgtactatttagtggtccaaggcaagaagggggaagatgttcttggttcagtgcggagagccctgactcacattgaccacagcttgagtcgtcagaactgtcctttcctggctggggagacagaatctctagccgacattgttttgtggggagccctatacccattactgcaagatcccgcctacctccctgaggagctgagtgccctgcacagctggttccagacactgagtacccaggaaccatgtcagcgagctgcagagactgtactgaaacagcaaggtgtcctggctctccggccttacctccaaaagcagccccagcccagccccgctgagggaagggctgtcaccaatgagcctgaggaggaggagctggctaccctatctgaggaggagattgctatggctgttactgcttgggagaagggcctagaaagtttgcccccgctgcggccccagcagaatccagtgttgcctgtggctggagaaaggaatgtgctcatcaccagtgccctcccttacgtcaacaatgtcccccaccttgggaacatcattggttgtgtgctcagtgccgatgtctttgccaggtactctcgcctccgccagtggaacaccctctatctgtgtgggacagatgagtatggtacagcaacagagaccaaggctctggaggagggactaaccccccaggagatctgcgacaagtaccacatcatccatgctgacatctaccgctggtttaacatttcgtttgatatttttggtcgcaccaccactccacagcagaccaaaatcacccaggacattttccagcagttgctgaaacgaggttttgtgctgcaagatactgtggagcaactgcgatgtgagcactgtgctcgcttcctggctgaccgcttcgtggagggcgtgtgtcccttctgtggctatgaggaggctcggggtgaccagtgtgacaagtgtggcaagctcatcaatgctgtcgagcttaagaagcctcagtgtaaagtctgccgatcatgccctgtggtgcagtcgagccagcacctgtttctggacctgcctaagctggagaagcgactggaggagtggttggggaggacattgcctggcagtgactggacacccaatgcccagtttatcacccgttcttggcttcgggatggcctcaagccacgctgcataacccgagacctcaaatggggaacccctgtacccttagaaggttttgaagacaaggtattctatgtctggtttgatgccactattggctatctgtccatcacagccaactacacagaccagtgggagagatggtggaagaacccagagcaagtggacctgtatcagttcatggccaaagacaatgttcctttccatagcttagtctttccttgctcagccctaggagctgaggataactataccttggtcagccacctcattgctacagagtacctgaactatgaggatgggaaattctctaagagccgcggtgtgggagtgtttggggacatggcccaggacacggggatccctgctgacatctggcgcttctatctgctgtacattcggcctgagggccaggacagtgctttctcctggacggacctgctgctgaagaataattctgagctgcttaacaacctgggcaacttcatcaacagagctgggatgtttgtgtctaagttctttgggggctatgtgcctgagatggtgctcacccctgatgatcagcgcctgctggcccatgtcaccctggagctccagcactatcaccagctacttgagaaggttcggatccgggatgccttgcgcagtatcctcaccatatctcgacatggcaaccaatatattcaggtgaatgagccctggaagcggattaaaggcagtgaggctgacaggcaacgggcaggaacagtgactggcttggcagtgaatatagctgccttgctctctgtcatgcttcagccttacatgcccacggttagtgccacaatccaggcccagctgcagctcccacctccagcctgcagtatcctgctgacaaacttcctgtgtaccttaccagcaggacaccagattggcacagtcagtcccttgttccaaaaattggaaaatgaccagattgaaagtttaaggcagcgctttggagggggccaggcaaaaacgtccccgaagccagcagttgtagagactgttacaacagccaagccacagcagatacaagcgctgatggatgaagtgacaaaacaaggaaacattgtccgagaactgaaagcacaaaaggcagacaagaacgaggttgctgcggaggtggcgaaactcttggatctaaagaaacagttggctgtagctgaggggaaaccccctgaagcccctaaaggcaagaagaaaaagtaaaagaccttggctcatagaaagtcactttaatagatagggacagtaataaataaatgtacaatctctata

SEQ ID NO: 1050 - protein, 900 aa, Homo sapien
MRLFVSDGVPGCLPVLAAAGRARGRAEVLISTVGPEDCVVPFLTRPKVPVLQLDSGNYLFSTSAICRYFFLLSGWEQDDLTNQWLEWEATELQPALSAALYYLVVQGKKGEDVLGSVRRALTHIDHSLSRQNCPFLAGETESLADIVLWGALYPLLQDPAYLPEELSALHSWFQTLSTQEPCQRAAETVLKQQGVLALRPYLQKQPQPSPAEGRAVTNEPEEEELATLSEEEIAMAVTAWEKGLESLPPLRPQQNPVLPVAGERNVLITSALPYVNNVPHLGNIIGCVLSADVFARYSRLRQWNTLYLCGTDEYGTATETKALEEGLTPQEICDKYHIIHADIYRWFNISFDIFGRTTTPQQTKITQDIFQQLLKRGFVLQDTVEQLRCEHCARFLADRFVEGVCPFCGYEEARGDQCDKCGKLINAVELKKPQCKVCRSCPVVQSSQHLFLDLPKLEKRLEEWLGRTLPGSDWTPNAQFITRSWLRDGLKPRCITRDLKWGTPVPLEGFEDKVFYVWFDATIGYLSITANYTDQWERWWKNPEQVDLYQFMAKDNVPFHSLVFPCSALGAEDNYTLVSHLIATEYLNYEDGKFSKSRGVGVFGDMAQDTGIPADIWRFYLLYIRPEGQDSAFSWTDLLLKNNSELLNNLGNFINRAGMFVSKFFGGYVPEMVLTPDDQRLLAHVTLELQHYHQLLEKVRIRDALRSILTISRHGNQYIQVNEPWKRIKGSEADRQRAGTVTGLAVNIAALLSVMLQPYMPTVSATIQAQLQLPPPACSILLTNFLCTLPAGHQIGTVSPLFQKLENDQIESLRQRFGGGQAKTSPKPAVVETVTTAKPQQIQALMDEVTKQGNIVRELKAQKADKNEVAAEVAKLLDLKKQLAVAEGKPPEAPKGKKKK

SEQ ID NO: 1051 - DNA, 2711 bp, Homo sapien
caggagaagctgaccagccgcaagatggacagccgctggggcgggcgcagcgagtccatcaatgtgaccctcaacgtggagcaggcagcctacacccgtgatgccctggccaaggggctctatgcccgcctcttcgacttcctcgtggaggccatcaaccgtgctatgcagaaaccccaggaagagtacagcatcggtgtgctggacatttacggcttcgagatcttccagaaaaatggcttcgagcagttttgcatcaacttcgtcaatgagaagctgcagcaaatctttatcgaacttaccctgaaggccgagcaggaggagtatgtgcaggaaggcatccgctggactccaatccagtacttcaacaacaaggtcgtctgtgacctcatcgaaaacaagctgagccccccaggcatcatgagcgtcttggacgacgtgtgcgccaccatgcacgccacgggcgggggagcagaccagacactgctgcagaagctgcaggcggctgtggggacccacgagcatttcaacagctggagcgccggcttcgtcatccaccactacgctggcaaggtctcctacgacgtcagcggcttctgcgagaggaaccgagacgttctcttctccgacctcatagagctgatgcagtccagtgaccaggccttcctccggatgctcttccccgagaagctggatggagacaagaaggggcgccccagcaccgccggctccaagatcaagaaacaagccaacgacctggtggccacactgatgaggtgcacaccccactacatccgctgcatcaaacccaacgagaccaagcacgcccgagactgggaggagaacagagtccagcaccaggtggaatacctgggcctgaaggaaaacatcagggtgcgcagagccggcttcgcctaccgccgccagttcgccaaattcctgcagaggtatgccattctgacccccgagacgtggccgcggtggcgtggggacgaacgccagggcgtccagcacctgcttcgggcggtcaacatggagcccgaccagtaccagatggggagcaccaaggtctttgtcaagaacccagagtcgcttttcctcctggaggaggtgcgagagcgaaagttcgatggctttgcccgaaccatccagaaggcctggcggcgccacgtggctgtccggaagtacgaggagatgcgggaggaagcttccaacatcctgctgaacaagaaggagcggaggcgcaacagcatcaatcggaacttcgtcggggactacctggggctggaggagcggcccgagctgcgtcagttcctgggcaagaaggagcgggtggacttcgccgattcggtcaccaagtacgaccgccgcttcaagcccatcaagcgggacttgatcctgacgcccaagtgtgtgtatgtgattgggcgagagaagatgaagaagggacctgagaaaggtccagtgtgtgaaatcttgaagaagaaattggacatccaggctctgcggggggtctccctcagcacgcgacaggacgacttcttcatcctccaagaggatgccgccgacagcttcctggagagcgtcttcaagaccgagtttgtcagccttctgtgcaagcgcttcgaggaggcgacgcggaggcccctgcccctcaccttcagcgacacactacagtttcgggtgaagaaggagggctggggcggtggcggcacccgcagcgtcaccttctcccgcggcttcggcgacttggcagtgctcaaggttggcggtcggaccctcacggtcagcgtgggcgatgggctgcccaagaactccaagcctaccggaaagggattggccaagggtaaacctcggaggtcgtcccaagcccctacccgggcggcccctggcgccccccaaggcatggatcgaaatggggcccccctctgcccacaggggggggccccctgccccctggagaaattcatttggcccagggggcacccacaggcctccccggccctccgtccacatccctgggatgccagcagacgaccccgggcacgtccgccctcagagcacaacacagaattcctcaacgtgcctgaccaggggatggccggcatgcagaggaagcgcagcgtggggcaacggccagtgcctgtgggccgacccaagccccagcctcggacacatggtcccaggtgccgggccctataccagtacgtgggccaagatgtggacgagctgagcttcaacgtgaacgaggtcattgagatcctcatggaagatccctcgggctggtggaagggccggcttcacggccaggagggccttttcccaggaaactacgtggagaagatctgagctgggccctgggatactgccttctctttcgcccgcctatctgcctgccggcctggtggggagccaggccctgccaatgaaagcctcgtttacctgggctgcaatagcctaaaagtccaatcctttggcctccagtccttgcccaggccctgggtcaccaggtcactggtgcagcccccgcccctgggccctggttttcctccaacatcacacctgctgcccattgtccaaaactgtgtgtgtcaaaggggactaacagcagaatttacctcccaactgccatgtgattaagaaatgggtcttgagtcctgtgctgttggcaaagttccaggcacagttggggagggggggccggaatccgc

SEQ ID NO: 1052 - DNA, 4362 bp, Homo sapien
  Unsure 265-287: Unknown base
tcgagaccaaaaaaagatgacattaacaaaaatgatgcggagaaacggcggcggcggggcggcatcggcagcagtagcagaggctgtagcatcggacaccctcctctctcccgcaatccggttcctcttccccctccttctcactgtttgttgtgtgtttgatgtgttaaagcaggagcgagaacccgagcagcgccatgagcaacactaccgtcgtccccagcactgcaggtccgggccccagcggcgggcccggtggcggaannnnnnnnnnnnnnnnnnnnnnncggcaccgaggtaatccaggtgactaatgtctccccgagcgctagctctgagcagatgcggactctcttcggtttcctaggcaagatcgacgaactgcgcctcttcccgccggatgattcgcctttgccagtctcatctcgtgtctgctttgttaagttccatgatccagactcagcagttgtggcacagcatctgacaaacactgtattcgttgacagagctttgatagtcgtaccatatgcagaaggtttgtgctttgtttaactacctatgtgggcatcctaagatgaccatctacctcagtagatgtagagtgagcattagtagcatgttaaatctaagctattaacatttttaaacccttgttatactgcagtccgtaatttttgcttgcagattttttttaattctaaaaattagaaattaggtctgttattataaggtatttaccttttgttttcttttaaaacatttttaagttgtttaaaaccatgtcccttattgtaactccctgagatacatctacttagttaatttaatgttaagttttatgaaaaagccctgaaggtaaatgattcactccatgtatgcttacagagccttcaaataaatgcatgatgttatttctgttttaaataaatgagtaggttgattttattttcttaaagcttcctcacattgataatctggaaaaaaaaaaaacacattgaatttcagtataccaagggttgcagtgattttggttttcgtgaaagttcaagatttcctgtagcttaggtgccaaatgggcactgggtgttttattttatgccagattttcttgttcattcttgctatatttctagaatatctctaaataataaattcttctctctgttatttgtgtgtgtgatttttatagtggagaaggcaaatgcaaaacccttccagatgcctgaaaaacagtgggtcctctgcagctacaggggattctagacattaactaaaggccagcaagcactcaagtgccccaagtgttttcctggtgtaaccatttgttaactacattttctctctttttacattttaggctgttaaagtaatttgacagaaaaaaatgagcaggttttttggatctaaaaagccactgtgacaagaaattttaataccattttgtaaaattttctaaggcgtattttataattagtttgttcccaatgtactgctacttgatttgcattttggtaactataaattttactcgaatcactgaaatatgataaaactgctggattttaagttaataatttaatatgctgaccaggatttaaatgctttcccctttccttaataaactggtcagtggaagtggaatcttaatattgttcattttagatgctatctgaaatctttgaaaacaaatgtgagcatttacaccataccttgtaaaagttgtgaaatgtctagtccttaacagagaagttgcctctggttttctaaagaaattaacttatatttataaatgggttaagacatgttatgtaatagtacctctgtctccatgatattaaagtgtatgagcccagttttaaggttttgtaatgtatagatagataaatttttgagttagtgtgttttggttaagcaatttcttttatgtcagtgtgcctgttgtaggataagaccatcaacagaaaatttacagaattcaaattcaggatgaataaaatagagtataggtcttggaacaagggtcaaatcatgtgagtaatatgtaaaacattttggttagcctgtaaatttaaattttttattggctaagtattatagttcccaatccctgaacataatacagtatatcatataaatgactttcataaatattttcaggccatagtaatttttctagacctatttttggaagtgaagtatttaggaatatacagtatatagaattaggggaatatttcattcagaattctattgttggtgaatttaattctggtatgatatgctgtattaatgttacctccagtaaatacaattccctccagatttagctattacacttcggtgttagctcttggtcagtgttttagaacagtagacatagtctacggtaaggaatagtcttaattggtaaaactaagatagctgaatttggaaggaactcttaatagtaatggatttggggattttttaggttccttggttaatgtttgtttcttttgtctgtttctttttctttcatttctacacattcatgcagtatttcatggttctatcaaagcagcagtaaaaaaaatactcttgacgcatgaaaattaactggtgaggggcctcattgctatttttaaattgtagttttatttttaaatagtctttttttaatcagaggatcagatgcatgactttttttttttaatggatgcagatcttctatcaggtgtctcacaataaattcaagaggattttagtttgccagaaatgttgcaaatgcactaatttgagtaagatgttgatactgaatatatcctcttgagacataattttgcatgcaaaattatcccataatctttgtaggtttgttaatattgatgcattactgccctatatctaaatgatcttctcccccttcccctccataactcttggtatctaaattgatgacagctctgacacaagcaagataacagtgctgtgtagtatacatttgtttatattatcggcacttctcagtataggtggaaggaaccattacctttatttaacagtggtttttcttttttgttgttgtgttttacagttcttttccctggttcagcctgaactatataccaggccctgctgaaaataccacccaacagttttcttctgcagcttatccagtttctcttaagtgccctgtacatattgtatgttttatgatgagatgcagtttcttaatatgtattacagaaatactactggtatttgcaaatatgtagtttaattgtattattgaactctcattttgggggcttgggcacattaacagattaatccatctgtatagggcttttgctgttggatagaatttaaattgtctacataaatatttgttttaggacccttagattttatctgaatacacagattaggctttaaaaacagatatatatgtcatttttggcttaaggagtttggctaagttagcttttcaactggcactgtatggcagcattttttggtatggttagcatggcacatggcgaaacataaagcattttactgtacaggtaaggaatgtgccatgttgttttacctatctctctttctctctcactcccatgcacacatcctgtgtgtattcagagaccttcagaaacattcatattcattttcatgagtcagcaaaagccctacgcttgattccaacagaatatttcctttacatactttcttctcttaatttttacaaaatttgtatggtaggtgtaaaagaaaatcatagtaactgtaccatattattaacccctaaatcaaactttttttgtcttgtgtatcttgatttttctgtgtgctttatagtgaagcagccgacacgagtcgttgttcataaaacagcttttgaaagttgagagcacacccctggagaaccgactgtgcttgcttacgtttggttcatgacttaaaaatcgagtacaggagttattcctgatgaagctaaagctttgtctctgttggcaccagctaatgcagtggcaggtcttctgcctggtggtggactcctgcctactcctaacccacttacccagattggcgctgttccactggctgctttgggggctcctactcttgatcctgcccttgctgcacttgggcttcctggagcaaacttgaactctcagtctcttgctgcagatcagttgctgaagcttatgagtactgttgatcccaagttgaatcatgtagctgctggtctcgtttcaccaagtctgaaatcggatacctctagtaaagaaatagaggaagctatgaaaagagtacgagaagcacagtccctaatttctgctgctatagaaccagataagaaagaagaaaaaagaaggcatt

SEQ ID NO: 1053 - protein, 99 aa, Homo sapien
  unsure 88: unknown amino acid
  unsure 89: unknown amino acid
  unsure 90: unknown amino acid
  unsure 91: unknown amino acid
  unsure 92: unknown amino acid
  unsure 93: unknown amino acid
  unsure 94: unknown amino acid
  unsure 95: unknown amino acid
  unsure 96: unknown amino acid
RDQKKMTLTKMMRRNGGGGAASAAVAEAVASDTLLSPAIRFLFPLLLTVCCVFDVLKQEREPEQRHEQHYRRPQHCRSGPQRRARWRXXXXXXXXXAPR

SEQ ID NO: 1054 - DNA, 1895 bp, Homo sapien
cggaaaaaaaaatggttgaagcagatcgcccaggaaagctcttcattggtgggcttaatacggaaacaaatgagaaagctcttgaagcagtatttggcaaatatggacgaatagtggaagtactcttgatgaaagaccgtgaaaccaacaaatcaagaggatttgcttttgtcacctttgaaagcccagcagacgctaaggatgcagccagagacatgaatggaaagtcattagatggaaaagccatcaaggtggaacaagccaccaaaccatcatttgaaagtggtagacgtggaccgcctccacctccaagaagtagaggccctccaagaggtcttagaggtggaagaggaggaagtggaggaaccaggggacctccctcacggggaggacacatggatgacggtggatattccatgaattttaacatgagttcttccaggggaccactcccagtaaaaagaggaccaccaccaagaagtgggggtcctcctcctaagagatctgcaccttcaggaccagttcgcagtagcagtggaatgggaggaagagctcctgtatcacgtggaagagatagttatggaggtccacctcgaagggaaccgctgccctctcgtagagatgtttatttgtctccaagagatgatgggtattctactaaagacagctattcaagcagagattacccaagttctcgtgatactagagattatgcaccaccaccacgagattatacttaccgtgattatggtcattccagttcacgtgatgactatccatcaagagaatatagcgatagagatggatatggtcgtgatcgtgactattcagatcatccaagtggaggttcctacagagattcatatgagagttatggtaactcacgtagtgctccacctacacgagggcccccgccatcttatggtggaagcagtcgctatgatgattacagcagctcacgtgacggatatggtggaagtcgagacagttactcaagcagccgaagtgatctctactcaagtggtcgtgatcgggttggcagacaagaaagagggcttcccccttctatggaaagggggtaccctcctccacgtgattcctacagcagttcaagccgcggagcaccaagaggtggtggccgtggaggaagccgatctgatagagggggaggcagaagcagatactagaaacaaacaaaactttggaccaaaatcccagttcaaagaaacaaaaagtggaaactattctatcataactacccaaggactactaaaaggaaaaattgtgttactttttttaaattccctgttaagttcccctccataatttttatgttcttgtgaggaaaaaagtaaaacatgtttaattttatttgacttctgcattgcttttcaacaagcaaatgttaaatgtgttaagacttgtactagtgttgtaactttccaagtaaaagtatcccctaaaggccacttcctatctgatttttcccagcaaatgaggcaggcaattctagtcttccacaaaacatctagccatctaaaatggagagatgaatcattctacctatacaaacaagctagctattagagggtggttggggtatgctactcataagatttcagggtgtcttccaactgaaatctcaatgttctcagtacgaaaaacctgaaatcacatgcctatgtaaggaaagtgctattcacccagtaaacccaaaaaagcaaatggataatgctggccattttgcctttctgacatttccttgggaatctgcaagaacctcccctttcccttcccccaataagaccatttaagtgtgtgttaaacaactacagaatactaagtaaaaagtttggccaaaaccaaaaaaaaaaaaaaaaaaaaaaaaaaaaaaa

SEQ ID NO: 1055 - protein, 391 aa, Homo sapien
MVEADRPGKLFIGGLNTETNEKALEAVFGKYGRIVEVLLMKDRETNKSRGFAFVTFESPADAKDAARDMNGKSLDGKAIKVEQATKPSFESGRRGPPPPPRSRGPPRGLRGGRGGSGGTRGPPSRGGHMDDGGYSMNFNMSSSRGPLPVKRGPPPRSGGPPPKRSAPSGPVRSSSGMGGRAPVSRGRDSYGGPPRREPLPSRRDVYLSPRDDGYSTKDSYSSRDYPSSRDTRDYAPPPRDYTYRDYGHSSSRDDYPSREYSDRDGYGRDRDYSDHPSGGSYRDSYESYGNSRSAPPTRGPPPSYGGSSRYDDYSSSRDGYGGSRDSYSSSRSDLYSSGRDRVGRQERGLPPSMERGYPPPRDSYSSSSRGAPRGGGRGGSRSDRGGGRSRY

SEQ ID NO: 1056 - DNA, 1445 bp, Homo sapien
attttgtggaatagagttgatcgctgtctcctccgcaaagcattttaactcgaataagcaaatgccgcctctgtttgaacgttttggtatttacaagagagaaatcattttacctaagagaactaattgaattggcagcatccttgaaatacctccggacaaggatctgggggtgggggtggaaaagcaactgcgaaatagcagacggagaaattcctttggaagttattccgtagcataagagctgaaacttcagagcaagttttcattgggcaaaatgggggaacaacctatcttcagcactcgagctcatgtcttccaaattgacccaaacacaaagaagaactgggtacccaccagcaagcatgcagttactgtgtcttatttctatgacagcacaagaaatgtgtataggataatcagtttagatggctcaaaggcaataataaatagtaccatcaccccaaacatgacatttactaaaacatctcagaagtttggccagtgggctgatagccgggcaaacaccgtttatggattgggattctcctctgagcatcatctttcgaaatttgcagaaaagtttcaggaatttaaagaagctgctcgactagcaaaggaaaaatcacaagagaagatggaacttaccagtacaccttcacaggaatccgcaggcggggatcttcagtctcctttaacaccggaaagtatcaacgggacagatgatgaaagaacacctgatgtgacacagaactcagagccaagggctgaaccaactcagaatgcattgccattttcacatagttcagcaatcagcaaacattgggaggctgaactggctaccctcaaaggaaataatgccaaactcactgcagccctgctggagtccactgccaatgtgaaacaatggaaacagcaacttgctgcctatcaagaggaagcagaacgtctgcacaagcgggtgactgaacttgaatgtgttagtagccaagcaaatgcagtacatactcataagacagaattaaatcagacaatacaagaactggaagagacactgaaactgaaggaagaggaaatagaaaggttaaaacaagaaattgataatgccagagaactacaagaacagagggattctttgactcagaaactacaggaagtagaaattcggaacaaagacctggagggacaactgtctgacttagagcaacgtctggagaaaagtcagaatgaacaagaagcttttcgcaataacctgaagacactcttagaaattctggatggaaagatatttgaactaacagaattacgagataacttggccaagctactagaatgcagctaaggaaagtgaaatttcagtgccaattaattaaaagatacactgtctctcttcataggactgtttaggctctgcatcaagattgcacaaaaaaaaaaaaaaaaaa

SEQ ID NO: 1057 - protein, 354 aa, Homo sapien
MGEQPIFSTRAHVFQIDPNTKKNWVPTSKHAVTVSYFYDSTRNVYRIISLDGSKAIINSTITPNMTFTKTSQKFGQWADSRANTVYGLGFSSEHHLSKFAEKFQEFKEAARLAKEKSQEKMELTSTPSQESAGGDLQSPLTPESINGTDDERTPDVTQNSEPRAEPTQNALPFSHSSAISKHWEAELATLKGNNAKLTAALLESTANVKQWKQQLAAYQEEAERLHKRVTELECVSSQANAVHTHKTELNQTIQELEETLKLKEEEIERLKQEIDNARELQEQRDSLTQKLQEVEIRNKDLEGQLSDLEQRLEKSQNEQEAFRNNLKTLLEILDGKIFELTELRDNLAKLLECS

SEQ ID NO: 1058 - DNA, 3587 bp, Homo sapien
gaattcagcacaatgaaggagccatggaatgccaatttaacgtcagtcttgtacttgaagggaaaaaaaacacttgtaatggtggcaacagtgaagctgttcctttaacatccccaaatatagccaagtttagcactccaccagccatcctcagaaagaagagaaaaatgcgagtgggtcattccccaggcagcgaacttagggatggctcattgaacgatggtggtaatatggcgctaaaacatacaccactgaaaacactaccattttctccttcacagtttttcaacacatgtcctggtaatgaacaacttaatatagaaaatccttcatttacatcaacccctatttgtgggcagaaagctctcattacaactcctcttcataaggaaacaactcccaaagatcaaaaggaaaatgtagggtttagaacacctactattagaagatctatactgggtaccacaccaagaactcctactccttttaagaatgcgcttgctgctcaggagaaaaaatatggacctcttaaaattgtgtcccagccacttgctttcttggaagaagatattcgggaagttttaaaagaagaaactggaacagacctattcctcaaagaggaagatgaacctgcttacaaaagctgcaaacaagagaataccgcttctgggaagaaagtcagaaaatcactagtcttagataattgggaaaaagaagaatcaggcactcaactgttgactgaagacatttcagacatgcagtcagaaaatagatttactacatccttattaatgataccattattggaaatacatgacaataggtgcaacttgattcctgaaaaacaagatataaattcaaccaacaaaacatatacacttactaaaaagaaaccaaaccctaacacttccaaagttgtcaaattggaaaagaatcttcagtcaaattgtgaatgggaaacagtggtttatgggaagacagaagaccaacttattatgactgaacaagcaagaagatatctgagtacttacacagctaccagtagtacttcaagagctctcatactgtaattgttattaaaattgatgaaatgccccactcccttactgcagtctctactaaattaggttgcagtgaaatttttctcaattagttgtttttaaagttgtaagatacccttttaatacagcatcttttttctattctatatagtaggcagaaagctagtaagtcacttaaggggtagatagtttcatagtttattttttaagagatgagatttttaaaaattgtttttaaagaacaagatgggaaaataatagaatgttcatggatttctaaaagtaaattctcatatattttcttcacaagatatatgttgctactctcttgatgctgcagttttgttatagataggtgtatgagtatatatgatttctgaaattagtctatgtatggaaagcacacatgattttatgaaggtacttttgcccatgtgctgatttacttaggctaccatttacaaagaaacacattgaaaaggaatttaaaggaaggatagaaagttgcactactaattttttgttttttttttcagaagcagtaaaattaactacagtgttaaatgtatttatttgagcatagtactgaaaacaaaaagcattcaaaaaagagttttttctttattagtaaatagtattttcttaatctcagaggagctgagagttttgttgaatgtattgtacagtatgtaggagcaggagaactttgtaaattggaaagaagtctgtttttataatttatttttatttttaaagcttaaatgtagatatttatagtatacagggagcctagaagccaatgttgtttcctgttattacagctaacacagtaaagaataattttgactttaagtatgaaacagtagtaagttatagctgcaaagaatacaatatctatactgtatgtcacatctacctaaatgttgcactatgccctttaaatcatgctggttataaagtagttctaaaaatgtactaaataataatttaatattttctttttaaattatatcgggggtggtcatatacattaatctggtgatttgtatatgtgtttgaaattttttgcttttgtttaaaaaaaaataatatggtaccttggtccctaaaaacagtctgcacttagaagttatatttactcagtgtttcagaagtggagaacttatcttttatttataaaaatattttgtccttttttaaatgttttgtgtttctctacaggttacaacagttgcttcagttgcctgttttaggtgtttgcacttattttatttcttcttgaaagaatttttatttgcttttgtggtagagattatatgtaattttttttcagtcatataatggtgtgctgtcaacttaaacactgacaggtaaatagaattgtacactgtagtttgaattatttataattgacacactctctccctctccactcctgaagtatgctgctatagaaaatagcagaatcggcttgctgctacgagagaaggaaagagcgaccaccacttgcactgtgtgaaaagataaaaaacaaatgatggcaagttctcaagttaactaaatggaatcaaccattaccaggcaaattcttgcaaataccaaaatactactatgccttataaaacaaaatgaaagcaggttaagattttctgctctgtttgtatgttaatagaaatggaaatactaagtattttaatgcttagctattgaacagtagacctaaaagggttttaagctatttaaatctacttgctagtttttgcatattttatatatatatatatttatatatatatatagtgagaagtgaagaaaatgtatggtactaagattatgccttattgataaatagataaaccaatttgaatcctcttagcatgtttaagtatgttgattgctttctaattaatgaacttctcacagaaatttcacttagtgaaaccaatgattgtagcaaactcatactggatcatttcagttaccttgaactaatagcacataatggttttttgttgttgttgtttttaatgtagcccttacctggatatacatagtctgcaatcaccaaagtataatatcttgtaaggctatattttttaaagcatattttttcttgagcattaaattatcctaaatggtaatatattgtggataagtctgggcttattggacataatacatatttgggttggtactggttgaatccttcagttaactgctttgttgctttttgcaagattttttatcttaaacatgtcaggcatcttaagtcacctttatactgttttgttcctctgagtttctttcagtatgttatacaaatgccagacataacatgtagcagccatacttgcatggaaactgactacacatacataatactgcattttattgtaaggttttcacattaatacagcaattaccctgactaaattgagttttgtgatatatggaaaacttcattgtaagagaatcttgcatacaatgttgactattaacatccaaaataaagcatctgtgtacaag

SEQ ID NO: 1059 - DNA, 2117 bp, Homo sapien
gcgtgctggcccggggtggcaggagccgcagaggcttgggctgcagaaaaaggatcctgtttgctgtgtaatcctgagaatggactgcaagagaggaaaaactgggcgtctgcttgggaatctattgtggaaacccagggtgtttcccgaccagtccctgggcgccaactagagtatggactgaccaggtacctggatggagacctgagctggagaaggagatgcgcttgggaggaaattgcagaggccgtcaacatggaaaagcagccccagaacagcaggagaggcctcgccccccgagaggtgccgccagctgttgggctgctgctgatcatggccctgatgaatactctactctacctctgcctcgaccacttcttcatcgctcctcgacaatccactgtggaccccacacactgtccctatggtcacttcaggataggacagatgaaaaactgctcaccttggctgtcctgcgaggagctgagaacagaagtgagacagctgaagcgtgttggggaaggagctgtaaagagagtctttctgtctgagtggaaggagcacaaagttgcactctcacagctcaccagcctggagatgaaagatgatttcctccatggactgcagatgctgaaatctctccaaggcacacatgttgtcacgctgcttggctattgtgaggatgacaacactatgcttactgaatatcaccctctaggttccttgagtaacctggaagaaacactaaacctttcaaagtaccaaaatgtgaacacgtggcagcacaggctggagctggccatggactatgtcagcatcattaattacctgcaccacagccctgtgggcacacgggtcatgtgcgactccaacgacctgccgaagacactgtcccagtatctgctaacaagcaacttcagcattttggcaaatgacttggacgccttacccctggtgaaccacagctccgggatgctggtgaagtgcggccacagggagctgcatggggatttcgtggctccagagcaactgtggccctatggagaggacgtgcctttccacgatgatctcatgccctcatatgatgagaagattgacatttggaagatcccagacatctccagtttccttctggggcacattgaagggagtgatatggtccgattccatttgtttgatattcacaaagcatgcaagagccagactccctcagaaagacccactgcccaggacgttctggagacctaccagaaggtcttggatacacttagagatgccatgatgtctcaggcaagagagatgctgtgaaaaccagtccagccaatgaaggtgggattgaagggctgaatggaagttacagcattctactctgatggtggagttttttgcctgagtttcgtgttttattgttttttttatggcttagccatgtggttcgttgtccacatccacatgtacgtttgtatgtagtccacattggttgttagattttttttttttttctttgagatgcggtcttgctctgttgctgaggctggagtgcagtgatgtgatcttggctcactgcagcctctgcctcccaggttcaagcaattctcccacctcagcctccaaagtgctgggattacaggcgtgagccactgcgcccggccacattcagttcttatcaaagaaataacccagacttaatcttgaatgatacgattatgcccaatattaagtaaaaaatataagaaaaggttatcttaaatagatcttaggcaaaataccagctgatgaaggcatctgatgccttcatctgttcagtcatctccaaaaacagtaaaaataaccactttttgttgggcaatatgaaatttttaaaggagtagaataccaaatgatagaaacagactgcctgaattgagaattttgattttttaaagtgtgtttctttctaaattgctgttccttaatttgattaatttaattcatgtattatgattaaatctgaggcagatgagcttacaagtattgaaataattactaattaatcacaaatgtgaagttatgcatgatgtaaaaaatacaaacattctaattaaaggctttgcaacaccaaaaaaaaaaaaaaaaaa

SEQ ID NO: 1060 - protein, 350 aa, Homo sapien
MEKQPQNSRRGLAPREVPPAVGLLLIMALMNTLLYLCLDHFFIAPRQSTVDPTHCPYGHFRIGQMKNCSPWLSCEELRTEVRQLKRVGEGAVKRVFLSEWKEHKVALSQLTSLEMKDDFLHGLQMLKSLQGTHVVTLLGYCEDDNTMLTEYHPLGSLSNLEETLNLSKYQNVNTWQHRLELAMDYVSIINYLHHSPVGTRVMCDSNDLPKTLSQYLLTSNFSILANDLDALPLVNHSSGMLVKCGHRELHGDFVAPEQLWPYGEDVPFHDDLMPSYDEKIDIWKIPDISSFLLGHIEGSDMVRFHLFDIHKACKSQTPSERPTAQDVLETYQKVLDTLRDAMMSQAREML

SEQ ID NO: 1061 - DNA, 878 bp, Homo sapien
gaacaacccagaaaccttcacctctcatgctgaagctcacacccttgccctccaagatgaaggtttctgcagcgcttctgtgcctgctgctcatggcagccactttcagccctcagggacttgctcagccagattcagtttccattccaatcacctgctgctttaacgtgatcaataggaaaattcctatccagaggctggagagctacacaagaatcaccaacatccaatgtcccaaggaagctgtgatcttcaagacccaacggggcaaggaggtctgtgctgaccccaaggagagatgggtcagggattccatgaagcatctggaccaaatatttcaaaatctgaagccatgagccttcatacatggactgagagtcagagcttgaagaaaagcttatttattttccccaacctcccccaggtgcagtgtgacattattttattataacatccacaaagagattatttttaaataatttaaagcataatatttcttaaaaagtatttaattatatttaagttgttgatgttttaactctatctgtcatacatcctagtgaatgtaaaatgcaaaatcctggtgatgtgttttttgtttttgttttcctgtgagctcaactaagttcacggcaaaatgtcattgttctccctcctacctgtctgtagtgttgtggggtcctcccatggatcatcaaggtgaaacactttggtattctttggcaatcagtgctcctgtaagtcaaatgtgtgctttgtactgctgttgttgaaattgatgttactgtatataactatggaattttgaaaaaaaatttcaaaaagaaaaaaatatatataatttaaaactaagaaaaaaaaaaaaaaaaaaaaaaaaa

SEQ ID NO: 1062 - protein, 99 aa, Homo sapien
MKVSAALLCLLLMAATFSPQGLAQPDSVSIPITCCFNVINRKIPIQRLESYTRITNIQCPKEAVIFKTQRGKEVCADPKERWVRDSMKHLDQIFQNLKP

SEQ ID NO: 1063 - DNA, 392 bp, Rattus norvegicus
cttcctttctgggctcggacctaggtcgcggcgacatggccaaacgtaccaagaaagtcgggatcgtcggtaaatacgggacccgctatggggcctccctccggaaaatggtgaagaaaattgaaatcagccagcacgccaagtacacttgctctttctgtggcaaaaccaagatgaagagacgagctgtggggatctggcactgtggttcctgcatgaagacagtggctggcggtgcctggacgtacaataccacttccgctgtcacggtaaagtccgccatcagaagactgaaggagttgaaagaccagtagacgctcctctactctttgagacatcactggcctataataaatgggttaatttatgtaacaaaaaaaaaaaaaaaaaaa

SEQ ID NO: 1064 - protein, 92 aa, Rattus norvegicus [sequence omitted]

SEQ ID NO: 1065 - DNA, 723 bp, Homo sapien
atggccgggcctccgaggctcctgctgctgcccctgcttctggcgctggctcgcggcctgcctggggccctggctgcccaagaggtgcagcagtctccccactgcacgactgtccccgtgggagcctccgtcaacatcacctgctccaccagcgggggcctgcgtgggatctacctgaggcagctcgggccacagccccaagacatcatttactacgaggacggggtggtgcccactacggacagacggttccggggccgcatcgacttctcagggtcccaggacaacctgactatcaccatgcaccgcctgcagctgtcggacactggcacctacacctgccaggccatcacggaggtcaatgtctacggctccggcaccctggtcctggtgacagaggaacagtcccaaggatggcacagatgctcggacgccccaccaagggcctctgccctccctgccccaccgacaggctccgccctccctgacccgcagacagcctctgccctccctgacccgccagcagcctctgccctccctgcggccctggcggtgatctccttcctcctcgggctgggcctgggggtggcgtgtgtgctggcgaggacacagataaagaaactgtgctcgtggcgggataagaattcggcggcatgtgtggtgtacgaggacatgtcgcacagccgctgcaacacgctgtcctcccccaaccagtaccagtga

SEQ ID NO: 1066 - protein, 240 aa, Homo sapien
MAGPPRLLLLPLLLALARGLPGALAAQEVQQSPHCTTVPVGASVNITCSTSGGLRGIYLRQLGPQPQDIIYYEDGVVPTTDRRFRGRIDFSGSQDNLTITMHRLQLSDTGTYTCQAITEVNVYGSGTLVLVTEEQSQGWHRCSDAPPRASALPAPPTGSALPDPQTASALPDPPAASALPAALAVISFLLGLGLGVACVLARTQIKKLCSWRDKNSAACVVYEDMSHSRCNTLSSPNQYQ

SEQ ID NO: 1067 - DNA, 3373 bp, Homo sapien
ggcacgaggctctacaatctgtggcctcagcccttgccaactctgcctcttcccccgctgactgggcctctgcagagatgtgggcagctggtcaggatggccattcgggctcagcacagcaacgcagcccagactcagactggggaagcaaacaggggctggacaggccaggagagcctgtcggacagtgatcctgagatgtgggagttgctgcagagggagaaggacaggcagtgtcgtggcctggagctcattgcctcagagatactatgggggagcagaggtggtggatgaaattgagctgctgtgccagcgccgggccttggaagcctttgacctggatcctgcacagtggggagtcaatgtccagccctactccgggtccccagccaacctggccgtctacacagcccttctgcaacctcacgaccggatcatggggctggacctgcccgatgggggccatctcacccacggctacatgtctgacgtcaagcggatatcagccacgtccatcttcttcgagtctatgccctataagctcaacggctttagctgtttgtgtgtctgtccagcccaaaactggcctcattgactacaaccagctggcactgactgctcgacttttccggccacggctcatcatagctggcaccagcgcctatgctcgcctcattgactacgcccgcatgagagaggtgtgtgatgaagtcaaagcacacctgctggcagacatggcccacatcagtggcctggtggctgccaaggtgattccctcgcctttcaagcacgcggacatcgtcaccaccactactcacaagactcttcgaggggccaggtcagggctcatcttctaccggaaaggggtgaaggctgtggaccccaagactggccgggagatcccttacacatttgaggaccgaatcaactttgccgtgttcccatccctgcaggggggcccccacaatcatgccattgctgcagtagctgtggccctaaagcaggcctgcacccccatgttccgggagtactccctgcaggttctgaagaatgctcgggccatggcagatgccctgctagagcgaggctactcactggtatcaggtggtactgacaaccacctggtgctggtggacctgcggcccaagggcctggatggagctcgggctgagcgggtgctagagcttgtatccatcactgccaacaagaacacctgtcctggagaccgaagtgccatcacaccgggcggcctgcggcttggggccccagccttaacttctcgacagttccgtgaggatgacttccggagagttgtggactttatagatgaaggggtcaacattggcttagaggtgaagagcaagactgccaagctccaggatttcaaatccttcctgcttaaggactcagaaacaagtcagcgtctggccaacctcaggcaacgggtggagcagtttgccagggccttccccatgcctggttttgatgagcattgaaggcacctgggaaatgaggcccacagactcaaagttactctccttccccctacctgggccagtgaaatagaaagcctttctattttttggtgcgggagggaagacctctcacttagggcaagagccaggtatagtctcccttcccagaatttgtaactgagaagatcttttctttttcctttttttggtaacaagacttagaaggagggcccaggcactttctgtttgaacccctgtcatgatcacagtgtcagagacgcgtcctctttcttggggaagttgaggagtgcccttcagagccagtagcaggcaggggtgggtaggcaccctccttcctgtttttatctaataaaatgctaacctgccctgagtttccattactgtgggtggggttcccctgggccaaacagtgaaaaaaaaaaaaaaaaaaaactcgagactagttctctcctgaaaactggagggccttcaaggctctcatcgctgctcagtacagcggggctcaggtccgcgtgctctccgcaccaccccacttccattttggccaaaccaaccgcacccctgaatttctccgcaaatttcctgccggcaaggtcccagcatttgagggtgatgatggattctgtgtgtttgagagcaacgccattgcctactatgtgagcaatgaggagctgcggggaagtactccagaggcagcagcccaggtggtgcagtgggtgagctttgctgattccgatatagtgcccccagccagtacctgggtgttccccaccttgggcatcatgcaccacaacaaacaggccactgagaatgcaaaggaggaagtgaggcgaattctggggctgctggatgcttacttgaagacgaggacttttctggtgggcgaacgagtgacattggctgacatcacagttgtctgcaccctgttgtggctctataagcaggttctagagccttctttccgccaggcctttcccaataccaaccgctggttcctcacctgcattaaccagccccagttccgggctgtcttgggcgaagtgaaactgtgtgagaagatggcccagtttgatgctaaaaagtttgcagagacccaacctaaaaaggacacaccacggaaagagaagggttcacgggaagagaagcagaagccccaggctgagcggaaggaggagaaaaaggcggctgcccctgctcctgaggaggagatggatgaatgtgagcaggcgctggctgctgagcccaaggccaaggaccccttcgctcacctgcccaagagtacctttgtgttggatgaatttaagcgcaagtactccaatgaggacacactctctgtggcactgccatatttctgggagcactttgataaggacggctggtccctgtggtactcagagtatcgcttccctgaagaactcactcagaccttcatgagctgcaatctcatcactggaatgttccagcgactggacaagctgaggaagaatgccttcgccagtgtcatcctttttggaaccaacaatagcagctccatttctggagtctgggtcttccgaggccaggagcttgcctttccgctgagtccagattggcaggtggactacgagtcatacacatggcggaaactggatcctggcagcgaggagacccagacgctggttcgagagtacttttcctgggagggggccttccagcatgtgggcaaagccttcaatcagggcaagatcttcaagtgaacatctcttgccatcacctagctgcctgcacctgcccttcagggagatgggggtcattaaaggaaactgaacattgaaaaaaaaaaaaaaaaaaaaaaaaaaaaaaaaaaaaaaaaaaaaaaaaaaaaaaaaaaaaaaaaa

SEQ ID NO: 1068 - protein, 317 aa, Homo sapien [sequence omitted]

SEQ ID NO: 1069 - DNA, 5676 bp, Homo sapien
ggatccttgagggcactggtgcgactttcaggtgaggtcttagcagatgaaagcggctggctgtggcccgcgccagtagtgctttctgctccgcactcgccgtgagccaggtgtgcaaccggatttggggcgagggtcgcgctggctacctcgcatgcgcagagccggaagcccgctgaccggactacagctcccagaagagccttgtggaggccgcagacgcgaagccgctggcgccatcttgaaatctgatcctccatccccgaggctttgcgtctgcgcggccggccgctgctgctccgggagcccagtctgctaaaaggggaggacgttgaggacgcggcggctggcgggagagacagctggggagagacatggcagggtcggagcgcggcctgcgcctctgtcactcagcatcctcttaggcgtttccacgcccgccccctgcccgaggggcggggctgacggctctggtacccggagtcggcgcgcggggcaggggcgcgcccctgcagagtggggaccccactgggctgtgccatgctgaccggagaccaccgaggcgggagacagagcgcggcgaagagccattgagtggtcacccagtagccgccgccgccgccgcctcgggaagcttgccacccgctaggagggaagatgaaggagatttgcaggatctgtgcccgagagctgtgtggaaaccagcggcgctggatcttccacacggcgtccaagctcaatctccaggttctgctttcgcacgtcttgggcaaggatgtcccccgcgatggcaaagccgagttcgcttgcagcaagtgtgctttcatgcttgatcgaatctatcgattcgacacagttattgcccggattgaagcgctttctattgagcgcttgcaaaagctgctactggagaaggatcgcctcaagttctgcattgccagtatgtatcggaagaataacgatgactctggcgcggagatcaaggcggggaatgggacggttgacatgtccgtcttacccgatgcgagatactctgcactgctccaggaggacttcgcctattcagggtttgagtgctgggtggagaatgaggatcagatccaggagccacacagctgccatggttcagaaggccctggaaaccgacccaggagatgccgtggttgtgccgctttgcgggttgctgattctgactatgaagccatttgtaaggtacctcgaaaggtggccagaagtatctcctgcggcccttctagcaggtggtcgaccagcatttgcactgaagaaccagcgttgtctgaggttgggccacccgacttagcaagcacaaaggtacccccagatggagaaagcatggaggaagagacgcctggttcctctgtggaatctttggatgcaagcgtccaggctagccctccacaacagaaagatgaggagactgagagaagtgcaaaggaacttggaaagtgtgactgttgttcagatgatcaggctccgcagcatgggtgtaatcacaagctggaattagctcttagcatgattaaaggtcttgattataagcccatccagagcccccgagggagcaggcttccgattccagtgaaatccagcctacctggagccaagcctggccctagcatgacagatggagttagttccggtttccttaacaggtctttgaaacccctttacaagacacctgtgagttatcccttggagctttcagacctgcaggagctgtgggatgatctctgtgaagattatttgccgctccgggtccagcccatgactgaagagttgctgaaacaacaaaagctgaattcacatgagaccactataactcagcagtctgtatctgattcccacttggcagaactccaggaaaaaatccagcaaacagaggccaccaacaagattcttcaagagaaacttaatgaaatgagctatgaactaaagtgtgctcaggagtcgtctcaaaagcaagatggtacaattcagaacctcaaggaaactctgaaaagcagggaacgtgagactgaggagttgtaccaggtaattgaaggtcaaaatgacacaatggcaaagcttcgagaaatgctgcaccaaagccagcttggacaacttcacagctcagagggtacttctccagctcagcaacaggtagctctgcttgatcttcagagtgctttattctgcagccaacttgaaatacagaagctccagagggtggtacgacagaaagagcgccaactggctgatgccaaacaatgtgtgcaatttgtagaggctgcagcacacgagagtgaacagcagaaagaggcttcttggaaacataaccaggaattgcgaaaagccttgcagcagctacaagaagaattgcagaataagagccaacagcttcgtgcctgggaggctgaaaaatacaatgagattcgaacccaggaacaaaacatccagcacctaaaccatagtctgagtcacaaggagcagttgcttcaggaatttcgggagctcctacagtatcgagataactcagacaaaacccttgaagcaaatgaaatgttgcttgagaaacttcgccagcgaatacatgataaagctgttgctctggagcgggctatagatgaaaaattctctgctctagaagagaaagaaaaagaactgcgccagcttcgtcttgctgtgagagagcgagatcatgacttagagagactgcgcgatgtcctctcctccaatgaagctactatgcaaagtatggagagtctcctgagggccaaaggcctggaagtggaacagttatctactacctgtcaaaacctccagtggctgaaagaagaaatggaaaccaaatttagccgttggcagaaggaacaagagagtatcattcagcagttacagacgtctcttcatgataggaacaaagaagtggaggatcttagtgcaacactgctctgcaaacttggaccagggcagagtgagatagcagaggagctgtgccagcgtctacagcgaaaggaaaggatgctgcaggaccttctaagtgatcgaaataaacaagtgctggaacatgaaatggagattcaaggcctgcttcagtctgtgagcaccagggagcaggaaagccaagctgctgcagagaagttggtgcaagccttaatggaaagaaattcagaattacaggccctgcgccaatatttaggagggagagactccctgatgtcccaagcacccatctctaaccaacaagctgaagttacccccactggccgtcttggaaaacagactgatcaaggttcaatgcagataccttccagagatgatagcacttcattgactgccaaagaggatgtcagcatacccagatccacattaggagacttggacacagttgcagggctggaaaaagaactgagtaatgccaaagaggaacttgaactcatggctaaaaaagaaagagaaagtcagatggaactttctgctctacagtccatgatggctgtgcaggaagaagagctgcaggtgcaggctgctgatatggagtctctgaccaggaacatacagattaaagaagatctcataaaggacctgcaaatgcaactggttgatcctgaagacataccagctatggaacgcctgacccaggaagtcttacttcttcgggaaaaagttgcttcagtagaatcccagggtcaagaaatttcaggaaaccgaagacaacagttgctgctgatgctagaaggactagtagatgaacggagtcggctcaatgaggccttacaagcagagagacagctctatagcagtctggtgaagttccatgcccatccagagagctctgagagagaccgaactctgcaggtggaactggaaggggctcaggtgttacgcagtcggctagaagaagttcttggaagaagcttggagcgcttaaacaggctggagaccctggccgccattggaggtgcagctgcaggggatgacaccgaagatacaagcactgagttcactgacagtattgaggaggaggctgcacaccatagtcaccagcaactatagcttcagaagcatttttacttgcaagacgatggacacattccccttgggctttttgtaactgaaacgcaccacagaagacagggagtcatcgaagggctgctcggggaggtggcagggcggaggacctgcttgggaagaaactccaagaagattggaatgcttccaaagcaagaatctttctcagtgaaatctcattatacaaagagaaccttatgcaacctgacaaaccactgaggtcatggtgactcagtgatcagcagatggtacttcaacagcaatcccctgtcaaacctcagaacttgaggctgaaacattgcttccacccaccatcagtgaagatgtaactagcatgttacaagagtgaataatctggacttcagagattaagtcaccaatagtgatctcacaagcactcaccggaactcctataatgtctccactttgtccatgccatttagcaatctcatctcctaaatggactgtgcctatgattcttaaggagaaagtgaatcattggtagatatcctgcacaagcagctggactttccagtaatagctttcttggggctattaggaaaattaaacaagaaatgaggctttctgggtctgcctgtatgtcttctgcataagacaaagaagagacatcgaatcaaccaataagaagagcccaaataagcatcctcaaatcttttgggatttggcacttggggacatgagtagttgtctgggatacgtcatattctcaacagtttctttgtagtagtaggatcaccttcttataataggatcaccttcttgttgctatagctgtacccgaccttcccttctcccttgagtgcttgcatgagctccacttttccttttgcttgaacagcttctcctgagtcctccttaccgatggttgtgactttaattatatacatctctgtccctccagacagatccctctgtcctcactctctgatttcattgaggatcttgggtgagagagagggacctgcaggatgaacaaatgtctactctaagacagctagattgggaggttggctggtcactgatggttataatgactgtgggacaggattaacttcagaataaatgaacaggagacacagatatgaagaaagtttctgattgatatggtctgaagtactcctggtattgcaagtcatttgctctaattctcaattgtaggcaaactgatttgtaaatttgcttcttcagccttctttcctgtagcctagcatggagaatctgaccagaccccattttgagaaggtcagcctacactggaatgaactttttacattagggcatttgtatttccctcacaatacttgccacattacttggcataggagagatgcttagtgtaattataagttaacaagcctttggatcagggcttgactcatgatagacaaagtatatgcctgctggatggaagaatctcttgggcgagcaccatttttctttccatcacctttccttgaaaatatatcttcagctttgggtaggaggaatcttggtgtatgaaatcattgcaaatttacttcatcttttctggagtttgaagttgtgactctcctgctaccaattaaataaagcttactttgccat

SEQ ID NO: 1070 - protein, 1132 aa, Homo sapien
MKEICRICARELCGNQRRWIFHTASKLNLQVLLSHVLGKDVPRDGKAEFACSKCAFMLDRIYRFDTVIARIEALSIERLQKLLLEKDRLKFCIASMYRKNNDDSGAEIKAGNGTVDMSVLPDARYSALLQEDFAYSGFECWVENEDQIQEPHSCHGSEGPGNRPRRCRGCAALRVADSDYEAICKVPRKVARSISCGPSSRWSTSICTEEPALSEVGPPDLASTKVPPDGESMEEETPGSSVESLDASVQASPPQQKDEETERSAKELGKCDCCSDDQAPQHGCNHKLELALSMIKGLDYKPIQSPRGSRLPIPVKSSLPGAKPGPSMTDGVSSGFLNRSLKPLYKTPVSYPLELSDLQELWDDLCEDYLPLRVQPMTEELLKQQKLNSHETTITQQSVSDSHLAELQEKIQQTEATNKILQEKLNEMSYELKCAQESSQKQDGTIQNLKETLKSRERETEELYQVIEGQNDTMAKLREMLHQSQLGQLHSSEGTSPAQQQVALLDLQSALFCSQLEIQKLQRVVRQKERQLADAKQCVQFVEAAAHESEQQKEASWKHNQELRKALQQLQEELQNKSQQLRAWEAEKYNEIRTQEQNIQHLNHSLSHKEQLLQEFRELLQYRDNSDKTLEANEMLLEKLRQRIHDKAVALERAIDEKFSALEEKEKELRQLRLAVRERDHDLERLRDVLSSNEATMQSMESLLRAKGLEVEQLSTTCQNLQWLKEEMETKFSRWQKEQESIIQQLQTSLHDRNKEVEDLSATLLCKLGPGQSEIAEELCQRLQRKERMLQDLLSDRNKQVLEHEMEIQGLLQSVSTREQESQAAAEKLVQALMERNSELQALRQYLGGRDSLMSQAPISNQQAEVTPTGRLGKQTDQGSMQIPSRDDSTSLTAKEDVSIPRSTLGDLDTVAGLEKELSNAKEELELMAKKERESQMELSALQSMMAVQEEELQVQAADMESLTRNIQIKEDLIKDLQMQLVDPEDIPAMERLTQEVLLLREKVASVESQGQEISGNRRQQLLLMLEGLVDERSRLNEALQAERQLYSSLVKFHAHPESSERDRTLQVELEGAQVLRSRLEEVLGRSLERLNRLETLAAIGGAAAGDDTEDTSTEFTDSIEEEAAHHSHQQL

SEQ ID NO: 1071 - DNA, 2338 bp, Homo sapien
gtagtgccgccgggactcttggcgggtgaaggtgtgtgtcagcttttgcgtcactcgagccctgggcgctgcttgctaaagagccgagcacgcgggtctgtcatcatgtcgcgttacgggcggtacggaggagaaaccaaggtgtatgttggtaacctgggaactggcgctggcaaaggagagttagaaagggctttcagttattatggtcctttaagaactgtatggattgcgagaaatcctccaggatttgcctttgtggaattcgaagatcctagagatgcagaagatgcagtacgaggactggatggaaaggtgatttgtggctcccgagtgagggttgaactatcgacaggcatgcctcggagatcacgttttgatagaccacctgcccgacgtccctttgatccaaatgatagatgctatgagtgtggcgaaaagggacattatgcttatgattgtcatcgttacagccggcgaagaagaagcaggtcacggtctagatcacattctcgatccagaggaaggcgatactctcgctcacgcagcaggagcaggggacgaaggtcaaggtcagcatctcctcgacgatcaagatctatctctcttcgtagatcaagatcagcttcactcagaagatctaggtctggttctataaaaggatcgaggtatttccaatccccgtcgaggtcaagatcaagatccaggtctatttcacgaccaagaagcagccgatcaaagtccagatctccatctccaaaaagaagtcgttccccatcaggaagtcctcgcagaagtgcaagtcctgaaagaatggactgaagctctcaagttcaccctttagggaaaagttattttgtttacattattataagggatttgtgatgtctgtaaagtgtaacctaggaaagataattcaaccatctaatcaaaatggatctggattactatgtaaattcacagcagtaaggataatataaattttgttgaatgtatgaacatcatatggtctgaaaatgtgggtttttatttggcacatttaaataacatgtttctaactagatttttgatttgtgttcaatattaacacttcttaatttgatatatttgagagtcagacattataattgttaatccttattcatacatacctacattcagaattgaaaggtgttggttaagtcttgaacatcactattctatgcataaaacttggccaggatcttaagggactttgaaaattccatcttacccttgtagctctgggtaagatgacctgagtcccttatgatacagcctgaatgcatcatgacagatccttagttagctaatccgtttgaagttggtgttagtaggtattgtatgatcagtggtgaagcaagtaggaccactgatgtgtctaaatgagcatgacaggaactaaacgaaactgattaaatgtatgagaaatagaaactgatttctggatgatctttatactaattgcagctttcaggctactaggtggcatagtgttaattaggactccccaagatatggggagttctactctcaatggtcttgtttctttgctttctacattagttaaccagttttataccaaaaaatgcatgtttgaggaattgtctgaaattgggacaaaacaccttcatgtaaaccagctttgcaaaattttccagcccagatactcttcatctattcaaatggattgtcttattctgagcaaagacctgttgttaatcttcaagctaggttttgcagttcccaaccacaacattcttctattttgccaggctggtgcaaagtaattaaagatgtcaatcagaaatgtcaatgagactaaagtggttttgtaaatctcagctatatttagcaacactccatgtagctaatattttttggtagcatctggtagaccttagaatgttacatagccagtaggttctttattcaaattttaagtatcttaagaatagtagggcagtaacagttacttttgagagttttctggtcaagcttttaccaggcattctctagccttggtacaaaaaaaaaaaaaacctgctggttgcgcagatacctaggcttgtccattttatgcatttcagcaaagtcattggagactattgcaacttgggaatactggtctgcatcaagtttaattcggtagtttgaccgctagtatgttggaagttatttggattgtttttggaattttgactggctgaattatggttggtataaagttatgtgtataactggcaggcttatttatctgttgcacttggttagctttaattgttctgtattatttaaagataagtttactcaacaataa

SEQ ID NO: 1072 - protein, 238 aa, Homo sapien
MSRYGRYGGETKVYVGNLGTGAGKGELERAFSYYGPLRTVWIARNPPGFAFVEFEDPRDAEDAVRGLDGKVICGSRVRVELSTGMPRRSRFDRPPARRPFDPNDRCYECGEKGHYAYDCHRYSRRRRSRSRSRSHSRSRGRRYSRSRSRSRGRRSRSASPRRSRSISLRRSRSASLRRSRSGSIKGSRYFQSPSRSRSRSRSISRPRSSRSKSRSPSPKRSRSPSGSPRRSASPERMD

SEQ ID NO: 1073 - DNA, 5316 bp, Homo sapien
  Unsure 3623-3650: Unknown base
caagccaattatggctccctttcccaatggtagtttgtgaatggctttaattcgccaggatcttataaaacaaatgctgctgctatgaatatgggtcgaccattccaaaaaaatcgtgtgaagcctcagtttaggtcatctggtggttcagaacactcaacagagggctctgtatccttgggggatggacagttgaacagatatagttcaagaaactttccagctgaacggcataaccccacagtaactgggcatcaggagcaaacttaccttcagaaggagacttccactttgcaggtggaacagaatggggactatggtaggggcaggagaactctcttcagaggtcgaagacgacgagaagatgacaggatctcaagacctcatccttcaacagctgaatcaaaggctccaacaccaaagtttgacttattagcctcaaattttccacctttacctggaagttcatcaagaatgccaggtgaactcgtttggagaataggatgtctgatgttgttaaaggtgtctacaaagaaaaggataatgaagagttgacaattagttgcccagtgcctgcagatgagcagacagaatgcacttctgcccagcaactcaatatgagtaccagttctccatgtgctgctgagcttactgcattaagcacaactcagcaagaaaaggatctaatagaagattcctctgttcagaaggatggtctcaatcagacaactataccagtttctcctccaagtactacaaagccatcgagggcaagtactgcttcaccatgtaataataacataaatgcagctacagctgtggctctacaggaaccccgaaagttaagttatgctgaagtgtgccagaagccccctaaagagccatcttcagttcttgtgcagccactacgggaacttcgctccaatgtggtgtctcccaccaaaaatgaagacaatggagctcctgagaactccgttgagaaaccacatgagaagccagaagcaagggctagtaaggattattctggcttccgaggcaatataatccccaggggagcagcaggaaaaatcagggaacagagacgccagtttagccatagggctatacctcagggagtgactcgacgtaatggcaaagagcaatatgtgccacccagatcaccaaagtaaaaaacaacaaaactattcaaaaacttcactctcttcccattaaacttgaactgtggctatattgaactgttttggaggggagggggtagccaggaaggaaacaagagaaagtacgtccatttcattatggattttggagttgtgagtgataggatcccaaaattcatctctaatgtggtttttaaatgctggaggattccaatcaatataaatatatatatatatatacacacacatatataaaaagtataatttttctatttttgtttttggttttaatttgcagagatttgctgccaggaatcaattttgagggttcagatttagcttggaagaaaaaaaagaaacatacatccttcagtataggagatgagggaatgagagaaaatattttttgaagaagcatttctgtaaaattagaaattactttttttaatctatttaaagtttggcttgaagaatgccatctctgactatatggccttgtattgcaaagcagatcagtggctggggtgcctgttgtgggtgtgagtgtgtacaagagcgattgaagccaaatctgttgtcatgttagtaaatgatttgaaaactgaatgtaatacttgagtagatttttttttctagtttgaaatttagtctgtctttttgaccttactaatatttcatttaacaagttgtaaaactctgattgtacttagagatgtgactaccaatcagtttgatactcaaggaaagggggttattcaagaaattgaaaatttcatcttggacctcagtgcatcggtcaaatggatttcagaggtttaaacttccctgtgattccccctgaatacccccaaaatgagaaacaaaattttttttcttactccatttgttactctctgttctttgactgcccacccacagaaaagcaaaataaccaactacctactcaattgtgtgtttgtaattgctttgagcagtctagtcaaatcatataaattgttctaaatttcagaattgaacattgaagtattaactcttctgttcacacatttagaattttagctcccaagatggtagggcagactgaccgtacagtaatttatttgtcgttagtgttaaagattaagcatagtaactgactcttaagtgttaaataatgtagaagtaaaaaaattttttttaaaggcttaatttgggaggggggacttatttctgtttacagtgtattaccttccttccctcctcttctccccccacacccaacaaaatacagtttggaattcactgaaacagtaccagcaagtcatgagattttttagtaaagatgagaaagatggttgaagaaaattagtgcataatttctcagtgaataaagttgtagctctcatatactaaatagacaagtttacatgctgttatttagaaaatgactaaaatattaaaaaccgtgttgtgttaatctgttttaagtcataccatgttcagagttctatgtaaggtgggttttatttttcttttaagggatagtttgtaatagtaagaactgtcccatatgttagtaaattacatatgtacaaattgaaactgtaaattgtgaacactggaaagcaccattgtgacatagagtaaacatcttagtaatatattaaagtgaatgtaaatggtggttaaaattacattactgtgaaattcatcttccaactctaagttaagctttggagatacatgttagtggttaactgttaagagctttgaaaacactgcacatatctgtacaagccagaattactatttctttgacttattattagcttggcagttgcttttgatttgattgttttatgacatggtatactactatatttactcagtttgaaactattcatttctacacactatttttaaaaattgcctactaggtgaaacataacaataaaactacctgtgctgaaatttgggggaagtttaggtcctttaaaaaaacatattaatcattgactacatctatgataaaagtgcttattttggtttactaagataatgcagttggtggaaatgataaacgttttaagtgttaacatcctttgaatgcgttggatttcagagaataaacattttgtaaaaatcacttggtaaggattataaacttaattactgcacttaaaatgaaacattactttttttaaacaatgtgtcacaaatgtaggtctgtattacttgtatgcttgtgtgacttactgttagtccagctctaaaaatttaaaggttgtaattgaaatacaagaaaagagccttcttttagaagaaagcaagtatatttttgcttttacttcaaatgttatttaaagtagaaatttaatttgtagatataacctttaaaaattttctcattaagacaatgtttttaatttaatttgcctcattacatctaatagttcccatttgatggcatgtatagggaagagtgannnnnnnnnnnnnnnnnnnnnnnnnnnnaatatttatatatattcacagtatgtatttagcatttattttattacagcagatttaaagtttgtatctaaataatgcctatgagttgtgtgaagctcttggcttttttccaacgttactttgtaactaatgagggtggatgttcattgtagtttatttatttggttctttagatggaggaatttaaaaaatcaaatttttctcttcacctttatgacttgacatttccttgatctgttggaggctaaaagtaggtataaatgatattgaatgttgggtatagtgatactctgccatagttcttactgcatgaagagaacaagagtcacacaagttcaccactttgcacttcatagagaaggtacatagagacattgcaaaacctgtctccatttgctatcctgataattaaggttttcataatacctagggcctgtctctgagtaattttaattttgccaaatacactgacatttaaaatagtgatccatctaaatttttttcagctgggttttgaggaatataagagctttcaatgataaaggtttgttgtagttgtcttatgtgctgaatttgcagatgatcagatgctgtgcagaattctgatttatttttgtttcctaaaattaagatagcttgaatattatttcacattcctttttcttttttaaataaacaggtttgctttggaaaggcttaatgatggaatgttagcatcttcactagggtaaagaagaacaaaaagaatgttgctggaacgtaaaatagtatttaaaagttaatgaacacttctctagttttcttagttatggccttaataattagtctcttggcttaaatgtccactggttttactttgacacagttgaacaacactggggttaagtctctggtatttaggctggcaatatatatattaaccatattttaaaagtaccaattttgtttttacagaaaagataaaactcaaaagagaacagtgtattccttctgaggggcttttataaattattaactataatatatgatggattttttcctaattttttatatttccttacaattttggtggccattaatttaactttaggcttttgggcatatgctagtctgagcttccgaaaagatacatatatgtttcccttttcattagctgaatgaggatattttaagaagttgaaagagaatttattttcaagttgtgagtaaatcctcctttgaaattcacctgattattagataacttaaagtttatttttaaaagctgacaactttttatgaatcttcgagttgacagttcctaaaagcgtaactcagatattaatgggctgtgtattaaatggttttattttcagttttgcagcacagaacactgttgaaatatccatatcaacttgatttttttaacctaattcaggtgtcctttgcatctcttaaatgttgggggtgggggtcagagccagttatccggcttctgttttgtcgattgcttagatttgttcctgttgtcaaaactgttacccccaaaattggtgtgacacatgctcatgcataaaatgttaaaatgagtacatccttgtatttgtatttgttttcaacatcgccaaggtgctatgggaaattaacaaaattagaaaaaaaataaaattattaaaaagcagaaaaa

SEQ ID NO: 1074 - protein, 360 aa, Homo sapien
MNMGRPFQKNRVKPQFRSSGGSEHSTEGSVSLGDGQLNRYSSRNFPAERHNPTVTGHQEQTYLQKETSTLQVEQNGDYGRGRRTLFRGRRRREDDRISRPHPSTAESKAPTPKFDLLASNFPPLPGSSSRMPGELVWRIGCLMLLKVSTKKRIMKSTISCPVPADEQTECTSAQQLNMSTSSPCAAELTALSTTQQEKDLIEDSSVQKDGLNQTTIPVSPPSTTKPSRASTASPCNNNINAATAVALQEPRKLSYAEVCQKPPKEPSSVLVQPLRELRSNVVSPTKNEDNGAPENSVEKPHEKPEARASKDYSGFRGNIIPRGAAGKIREQRRQFSHRAIPQGVTRRNGKEQYVPPRSPK

SEQ ID NO: 1075 - DNA, 1373 bp, Homo sapien
cgaggatgtgcgtgggggctcggcggctgggccgcgggccgtgtgcggctctgctcctcctgggcctggggctgagcaccgtgacggggctccactgtgtcggggacacctaccccagcaacgaccggtgctgccacgagtgcaggccaggcaacgggatggtgagccgctgcagccgctcccagaacacggtgtgccgtccgtgcgggccgggcttctacaacgacgtggtcagctccaagccgtgcaagccctgcacgtggtgtaacctcagaagtgggagtgagcggaagcagctgtgcacggccacacaggacacagtctgccgctgccgggcgggcacccagcccctggacagctacaagcctggagttgactgtgccccctgccctccagggcacttctccccaggcgacaaccaggcctgcaagccctggaccaactgcaccttggctgggaagcacaccctgcagccggccagcaatagctcggacgcaatctgtgaggacagggaccccccagccacgcagccccaggaaacccagggccccccggccaggcccatcactgtccagcccactgaagcctggcccagaacctcacagggaccctccacccggcccgtggaggtccccgggggccgtgcggttgccgccatcctgggcctgggcctggtgctggggctgctgggccccctggccatcctgctggccctgtacctgctccggagggaccagaggctgccccccgatgcccacaagccccctgggggaggcagtttccggacccccatccaagaggagcaggccgacgcccactccaccctggccaagatctgacctgggcccaccaaggtggacgctgggccccgccaggctggagcccggagggtctgctgggcggggcccagcgtccaccttggtgggcccaggtcagatcttggccagggtggagtggggcccagcataacatacagtgccgccaccagccccctgagccctgtttccccccactactcttccaaatttgtggagacagggctcagggggctggtggcggcactgtatgttatgctgggcatgacggccatgacttcggctatcttctgttttaggtccttgatttcctgatctttctgaaggatttgtccttgggcaatctcgagctgccgctttgcatcgcccagtgcggagaacaggtccagcttgattctcgtctctgcacttaagctgttctccaggtgcgtgtgatttgtcaaaagaaagccttctggatgctgttaagatgtacccttcaggtgaacctggtatcagacccacagtacttgctgtttgagaaaaaataaaaacaaaaaggtcaaaaaaaaaaaaaaa

SEQ ID NO: 1076 - protein, 277 aa, Homo sapien
MCVGARRLGRGPCAALLLLGLGLSTVTGLHCVGDTYPSNDRCCHECRPGNGMVSRCSRSQNTVCRPCGPGFYNDVVSSKPCKPCTWCNLRSGSERKQLCTATQDTVCRCRAGTQPLDSYKPGVDCAPCPPGHFSPGDNQACKPWTNCTLAGKHTLQPASNSSDAICEDRDPPATQPQETQGPPARPITVQPTEAWPRTSQGPSTRPVEVPGGRAVAAILGLGLVLGLLGPLAILLALYLLRRDQRLPPDAHKPPGGGSFRTPIQEEQADAHSTLAKI

SEQ ID NO: 1077 - DNA, 2457 bp, Homo sapien
cacgcagcaggatggcaagggctccgcttggggtcctgctcctcttggggcttctcggcaggggtgtggggaagaacgaggaactgcgtctttatcaccatctcttcaacaactatgacccaggaagccggccagtgcgggagcctgaggatactgtcaccatcagcctcaaggtcaccctgacgaatctcatctcactgaatgaaaaagaggagactctcaccactagcgtctggattggaatcgattggcaggattaccgactcaactacagcaaggacgactttgggggtatagaaaccctgcgagtcccttcagaactcgtgtggctgccagagattgtgctggaaaacaatattgatggccagttcggagtggcctacgacgccaacgtgctcgtctacgagggcggctccgtgacgtggctgcctccggccatctaccgcagcgtctgcgcagtggaggtcacctacttccccttcgattggcagaactgttcgcttattttccgctctcagacgtacaatgccgaagaggtggagttcacttttgccgtagacaacgacggcaagaccatcaacaagatcgacatcgacacagaggcctatactgagaacggcgagtgggccatcgacttctgcccgggggtgatccgccgccaccacggtggcgccaccgacggcccaggggagactgacgtcatctactcgctcatcatccgccggaagccgctcttctacgtcattaacatcatcgtgccctgtgtgctcatctcgggcctggtgctgctcgcctacttcctgccggcgcaggccggcggccagaaatgcacggtctccatcaacgtcctgctcgcccagaccgtcttcttgttcctcattgcccagaaaatcccagagacttctctgagcgtgccgctcctgggcaggttccttattttcgtcatggtggtcgccacgctcattgtcatgaattgcgtcatcgtgctcaacgtgtcccagcggacgcccaccacccacgccatgtccccgcggctgcgccacgttctcctggagctgctgccgcgcctcctgggctccccgccgccgcccgaggccccccgggccgcctcgcccccaaggcgggcgtcgtcggtgggcttattgctccgcgcggaggagctgatactgaaaaagccacggagcgagctcgtgtttgaggggcagaggcaccggcaggggacctggacggctgccttctgccagagcctgggcgccgccgcccccgaggtccgctgctgtgtggatgccgtgaacttcgtggccgagagcacgagagatcaggaggccaccggcgaggaagtgtccgactgggtgcgcatggggaatgcccttgacaacatctgcttctgggccgctctggtgctcttcagcgtgggctccagcctcatcttcctcggggcctacttcaaccgagtgcctgatctcccctacgcgccgtgtatccagccttagctcgcaccgacttcaatttcccacccatctccagtaggaaattgattttgaaaaagtaggctgccgccaccacggcattatgatcccttccccctgctgatcaatctgcagtttgtgaacttcacaagaatggtgtgtgcccgttccctggcgtgtgtaggcctggccgcagtccaggggtcagcaggaggaaagggttcacataggctctcaggtgccagtcttccagaaagcaaggactgcccttcattcagccttgctgacctcccagcctttctaaggctcagccccacgggactctggtggctgccagcttgtgagctatctatctatattcatttcatagccaaacaggagacccctttgcaggacttgcacacagggaggctgtagccaggaaaccctcttcttccctggtctggctctgctggagcgggtgggaaccaaacaccttcagtgctggtggccctcaggcccacaggtttaaggctgaggctgccctgacccttccacagtcatttcttctaggttttcttggcccagcactgcccatcccaccccatgaggctcactcattgcagatcccagcccaccctgcccctttcttccccaccctggaggctctctctgcctagtctacagtactgacagaaagcaaggacatgcggcctgcatggtgggagctggttgaattgtctttattaacaaacaggatatccaaggccactacattgaggaggggggaggggggagggaggagaagggttacttgctgctcacactatatacagatgcaagcaaggggcgtggagagtgagggctccctgctccctccctccaccggggaagggcatgggctagaagaggagaggggggtcgggaatggggggaatgttttggctgcggggtcccccctccattccctggagtttgggggaaggggaatcattaaagtgctttcaga

SEQ ID NO: 1078 - protein, 493 aa, Homo sapien
MARAPLGVLLLLGLLGRGVGKNEELRLYHHLFNNYDPGSRPVREPEDTVTISLKVTLTNLISLNEKEETLTTSVWIGIDWQDYRLNYSKDDFGGIETLRVPSELVWLPEIVLENNIDGQFGVAYDANVLVYEGGSVTWLPPAIYRSVCAVEVTYFPFDWQNCSLIFRSQTYNAEEVEFTFAVDNDGKTINKIDIDTEAYTENGEWAIDFCPGVIRRHHGGATDGPGETDVIYSLIIRRKPLFYVINIIVPCVLISGLVLLAYFLPAQAGGQKCTVSINVLLAQTVFLFLIAQKIPETSLSVPLLGRFLIFVMVVATLIVMNCVIVLNVSQRTPTTHAMSPRLRHVLLELLPRLLGSPPPPEAPRAASPPRRASSVGLLLRAEELILKKPRSELVFEGQRHRQGTWTAAFCQSLGAAAPEVRCCVDAVNFVAESTRDQEATGEEVSDWVRMGNALDNICFWAALVLFSVGSSLIFLGAYFNRVPDLPYAPCIQP

SEQ ID NO: 1079 - DNA, 3571 bp, Homo sapien
ggcacgaggttccgagttgcgatgctgtacttctctttgttttgggcggctcggcctctgcagagatgtgggcagctggtcaggatggccattcgggctcagcacagcaacgcagcccagactcagactggggaagcaaacaggggctggacaggccaggagagcctgtcggacagtgatcctgagatgtgggagttgctgcagagggagaaggacaggcagtgtcgtggcctggagctcattgcctcagagaacttctgcagccgagctgcgctggaggccctggggtcctgtctgaacaacaagtactcggagggttatcctggcaagagatactatgggggagcagaggtggtggatgaaattgagctgctgtgccagcgccgggccttggaagcctttgacctggatcctgcacagtggggagtcaatgtccagccctactccgggtccccagccaacctggccgtctacacagcccttctgcaacctcacgaccggatcatggggctggacctgcccgatgggggccatctcacccacggctacatgtctgacgtcaagcggatatcagccacgtccatcttcttcgagtctatgccctataagctcaaccccaaaactggcctcattgactacaaccagctggcactgactgctcgacttttccggccacggctcatcatagctggcaccagcgcctatgctcgcctcattgactacgcccgcatgagagaggtgtgtgatgaagtcaaagcacacctgctggcagacatggcccacatcagtggcctggtggctgccaaggtgattccctcgcctttcaagcacgcggacatcgtcaccaccactactcacaagactcttcgaggggccaggtcagggctcatcttctaccggaaaggggtgaaggctgtggaccccaagactggccgggagatcccttacacatttgaggaccgaatcaactttgccgtgttcccatccctgcaggggggcccccacaatcatgccattgctgcagtagctgtggccctaaagcaggcctgcacccccatgttccgggagtactccctgcaggttctgaagaatgctcgggccatggcagatgccctgctagagcgaggctactcactggtatcaggtggtactgacaaccacctggtgctggtggacctgcggcccaagggcctggatggagctcgggctgagcgggtgctagagcttgtatccatcactgccaacaagaacacctgtcctggagaccgaagtgccatcacaccgggcggcctgcggcttggggccccagccttaacttctcgacagttccgtgaggatgacttccggagagttgtggactttatagatgaaggggtcaacattggcttagaggtgaagagcaagactgccaagctccaggatttcaaatccttcctgcttaaggactcagaaacaagtcagcgtctggccaacctcaggcaacgggtggagcagtttgccagggccttccccatgcctggttttgatgagcattgaaggcacctgggaaatgaggcccacagactcaaagttactctccttccccctacctgggccagtgaaatagaaagcctttctattttttggtgcgggagggaagacctctcacttagggcaagagccaggtatagtctcccttcccagaatttgtaactgagaagatcttttctttttcctttttttggtaacaagacttagaaggagggcccaggcactttctgtttgaacccctgtcatgatcacagtgtcagagacgcgtcctctttcttggggaagttgaggagtgcccttcagagccagtagcaggcaggggtgggtaggcaccctccttcctgtttttatctaataaaatgctaacctgcaaaaaaaaaaaaaaaaaaaaaaaaaatcagactaggtggactctgcctgcctacctggtctgggaagatgttctaccatatctccctagagcacgaaatcctgctgcacccgcgctacttcggccccaacttgctcaacacggtgaagcagaagctcttcaccgaggtggaggggacctgcacagggaagtgagtgtcgagctcaccgcaccgccagatcgttcgatgcgcacacggggcgctatacctgcaacccctccccaactcctactcgtcctgccacccactctggggacccctctcctctctcaggcagccagttgcttcctgctttgggttcccagggcgccctctgcaatgctggacaataagacttccttctctcagctgagatgggtcattcattgactcctcaaacattttaaaaacccttggtgtgtgccaggacccgtgttgggctcagaacaaggtagaatgggaacaagatagaatgaggacagcccctgtggagctcacagtgtaatcattgttcctgtgtctgctctccctctgtcattctgctggttttctcttatcccctgtgcccagggaccacacaccatgggcctctatatatcttctgaatgaatgaccagaaaaagcagatcgagagtttgggggaggaaggaagtagcctgggatttgaccatctctgggctttgcacagaggggcctctctgatattaatgagctgggacccagctcagggcagtggagtacttgggcctccagcatcagaaaaacctgcaggaacatgcagattcctgagcctccttattccctacagaatcaagactgtctggggcagacctgagaatctgcattttaagaagatgattctcaggcatcccgaagattgagatctgttgcctcaaggactccagccttcttggacatttattgtgaaattaccagaacagcatttggtcttacacatactgatctctgttctgtcttcttttggtcattaagctctctgggagcagaggtgctatctacttgtccttttgctctccccgaccctacccccaagagctcagcgacttttattgcagatgtctttagaggctcttggacacacagtgtcttcctgtttctcatcctccttgcaggttggactcttcacagaaattgggcccatgtcttgcttcatctctcgacattccatcccttcagagatggagtttgatcctaactccaacccaccatgttacaagacaatggatgaggatattgtgattcagcaggacgatgagatccgcttaaagattgtggggacccgtgtggacaagaatgacatttttgctattggctccctgatggacgattacttggggcttgtaagctgagcctggtggcctcctacccttggtcctactctaggaagtgtgattgtcacacttatcatgttgtccagaggtccagtctggctgctgttgtggaggcaaggaaggcaactcatcccagaaggcatctggtgcttcttgtagcttaactactgcctcctcatttttcagtatgtgttctaagtataaaaagtccttggttctcaaaaaaaaaaaaaaaaaaaaaaaaaaaaaaaaaaaaaaaaaaaaaaaaaaaaaaaaaaaaaaaaaaaaaaaaaaaaaaaa

SEQ ID NO: 1080 - protein, 504 aa, Homo sapien
MLYFSLFWAARPLQRCGQLVRMAIRAQHSNAAQTQTGEANRGWTGQESLSDSDPEMWELLQREKDRQCRGLELIASENFCSRAALEALGSCLNNKYSEGYPGKRYYGGAEVVDEIELLCQRRALEAFDLDPAQWGVNVQPYSGSPANLAVYTALLQPHDRIMGLDLPDGGHLTHGYMSDVKRISATSIFFESMPYKLNPKTGLIDYNQLALTARLFRPRLIIAGTSAYARLIDYARMREVCDEVKAHLLADMAHISGLVAAKVIPSPFKHADIVTTTTHKTLRGARSGLIFYRKGVKAVDPKTGREIPYTFEDRINFAVFPSLQGGPHNHAIAAVAVALKQACTPMFREYSLQVLKNARAMADALLERGYSLVSGGTDNHLVLVDLRPKGLDGARAERVLELVSITANKNTCPGDRSAITPGGLRLGAPALTSRQFREDDFRRVVDFIDEGVNIGLEVKSKTAKLQDFKSFLLKDSETSQRLANLRQRVEQFARAFPMPGFDEH

SEQ ID NO: 1081 - DNA, 738 bp, Homo sapien
aaagcagaattgagagtttgttcttacacacaagtttaatgccaccttcctctgtctgccatggaccaacaagcaatatatgctgagttaaacttacccacagactcaggcccagaaagttcttcaccttcatctcttcctcgggatgtctgtcagggttcaccttggcatcaatttgccctgaaacttagctgtgctgggattattctccttgtcttggttgttactgggttgagtgtttcagtgacatccttaatacagaaatcatcaatagaaaaatgcagtgtggacattcaacagagcaggaataaaacaacagagagaccgggtctcttaaactgcccaatatattggcagcaactccgagagaaatgcttgttattttctcacactgtcaacccttggaataacagtctagctgattgttccaccaaagaatccagcctgctgcttattcgagataaggatgaattgatacacacacagaacctgatacgtgacaaagcaattctgttttggattggattaaatttttcattatcagaaaagaactggaagtggataaacggctcttttttaaattctaatgacttagaaattagaggtgatgctaaagaaaacagctgtatttccatctcacagacatctgtgtattctgagtactgtagtacagaaatcagatggatctgccaaaaagaactaacacctgtgagaaataaagtgtatcctgactcttga

SEQ ID NO: 1082 - protein, 225 aa, Homo sapien
MDQQAIYAELNLPTDSGPESSSPSSLPRDVCQGSPWHQFALKLSCAGIILLVLVVTGLSVSVTSLIQKSSIEKCSVDIQQSRNKTTERPGLLNCPIYWQQLREKCLLFSHTVNPWNNSLADCSTKESSLLLIRDKDELIHTQNLIRDKAILFWIGLNFSLSEKNWKWINGSFLNSNDLEIRGDAKENSCISISQTSVYSEYCSTEIRWICQKELTPVRNKVYPDS

SEQ ID NO: 1083 - DNA, 5538 bp, Homo sapien
gccccagatcggaagtgacggagacgtgctagcgcgtcgaaggtagctctatggttttcctcgcgttcttgagtcgggaaatggccgctgtgtggttgcaacggagataaattcccggaaccgcgattcggcgtgtcaggaattcgaatttagagtttaatttctcagagcattctctccaggaagaatttttacagtatctcaaagacttcacttgacttcttgatcctgcataaaaccaaggagaaaagaaatgggtcgctccaattctagatcacattcttcaaggtcaaagtctagatcacagtctagttctcgatcaagatcaagatctcattctagaaagaagcgatacagttctaggtctcgttccagaacatattcaaggtctcgtagtagagatcgtatgtattctagagattatcgtcgcgattacagaaataatagaggaatgagacgaccttatgggtacagaggaaggggtagagggtattatcaaggaggaggaggtagatatcatcgaggtggttatagacctgtctggaatagaaggcactctaggagtcctagacgaggtcgttcacgttccaggagtccaaaaagaagatccgtttcttctcaaagatccagaagcagatctcgccggtcatatagatcttctaggtctccaagatcatcctcttctcgttcttcatccccatatagcaaatctcctgtttctaaaagacgagggtctcaggaaaaacaaaccaaaaaagctgaaggggaaccccaagaagagagtccgttgaaaagtaaatcacaggaggaaccgaaagatacatttgaacatgacccatctgagtctatcgatgaatttaataagtcatcagccacatccggtgatatttggcctggcctttcagcttatgataatagtcctagatcaccccatagtccttcacctattgctacaccacctagtcagagttcatcttgctctgatgctcccatgctcagtacagttcactctgcaaaaaatactccttctcagcattcacattccattcagcatagtcctgaaaggtctgggtctggttctgttggaaatggatctagtcgatacagtccttctcagaatagtccaattcatcacatcccttcacgaagaagtcctgcaaagacaatcgcaccacagaatgctccaagagatgagtctaggggccgttcctcgttttatcctgatggtggagatcaggaaactgcaaagactgggaagttcttaaaaaggttcacagatgaagagtctagagtattcctgcttgataggggtaataccagggataaagaggcttcaaaagagaaaggatcagagaaagggagggcagagggagaatgggaagatcaggaagctctagattacttcagtgataaagagtctggaaaacaaaagtttaatgattcagaaggggatgacacagaggagacagaggattatagacagttcaggaagtcagtcctcgcagatcagggtaaaagttttgctactgcatctcaccggaatactgaggaggaaggactcaagtacaagtccaaagtttcactgaaaggcaatagagaaagtgatggatttagagaagaaaaaaattataaacttaaagagactggatatgtagtggaaaggcctagcactacaaaagataagcacaaagaagaagacaaaaattctgaaagaataacagtaaagaaagaaactcagtcacctgagcaggtaaagtctgaaaagctcaaagacctctttgattacagtccccctctacacaagaatctggatgcacgagaaaagtctaccttcagagaggaaagcccacttaggatcaaaatgatagcgagtgattctcaccgtcctgaagtcaaactcaaaatggcacctgttcctcttgatgattctaacagacctgcttccttgactaaagacaggctgcttgctagtacacttgtccattctgtcaagaaggagcaagaattccgatccatctttgaccacattaagttgccacaggccagcaaaagcacttcagagtcatttattcaacacattgtgtccttggttcatcatgttaaagagcaatacttcaagtcagctgcaatgaccctaaacgagcggttcacttcgtatcagaaagccactgaagaacatagtactcggcaaaagagccctgaaatacacaggagaattgacatctcaccaagtaccctgaggaagcatacccgtttagcaggggaagagagagtttttaaagaagaaaatcaaaagggagataaaaaattaaggtgtgactctgctgaccttcggcatgacattgatcgccgtagaaaagaaagaagtaaagaacggggagattccaagggctccagggaatccagtggatcaagaaagcaggaaaaaactccaaaagattacaaggaatacaaatcttacaaagatgacagtaaacataaaagagagcaagatcattctcgatcttcatcctcttcagcatcaccttcttctcccagttctcgagaagaaaaggagagtaagaaggaaagagaagaagaatttaaaactcaccatgaaatgaaagaatactcaggctttgcaggagttagccgaccacgaggaaccttttttcgaattagaggcagaggaagagccagaggagtttttgctgggacaaatactggtccaaacaactcaaatactacttttcaaaagagaccgaaggaagaggaatgggatccagaatataccccaaagagcaagaagtacttcttgcatgacgacagagatgatggtgtggattattgggccaaaagaggaagaggtcgtggtacttttcaacgtggcagagggcgctttaacttcaaaaaatcaggtagcagtcctaaatggactcatgacaaataccaaggggatgggattgttgaagatgaagaagagaccatggaaaataatgaagaaaagaaggacagacgcaaggaagaaaaggaataataaatatgaagtaagattacaacagagcagaacttgcacccaccattttttttacctgatttttgttttcaaataagaatgtaagcattttacttaaattttactgtttgcaagtagtctatagaaattttgttttaagtcttcaaatatcttgagaaatagtagactgtatgttgaaaattgtactgaaataaagtagaaaattgttacgtaccatatttgtaactatcaacttttaaaacttttaacgtttttgttacatgcattgtaattctgctttgtctataagatatggtcaagtacagctctgtgaaagttctgattctcttccttccctgtttgtcaatgttttattctgaagtaaacgttagctctacatataaatcctggaacagaaattgtttatagagactacactaattattttaactgtatacatctgtttaatttgaacacactacatcgtagggtgactgatttttgaagtataccacagacaaaaagttgttactatggtaaactaagctagtttaacacttgagcaaatgcttaagaaggaattaaaaaaaaaaagctttgccaatagctaaaaagtacaagctattaaaaatcagattgaaaagttttgagaaaatgttatttttactgaaagcaagcagtggcctataaagaacattcttaggagccttttctatttgcgttcaaaactgtgtgttctctttctattcctatttgatagtttgagtcatggtcttagatattagctatttgtgagaggaaactggtttgtaacaatactgcaaatagaaaccccatttctactgaacatcctagttttaaacagaagaaaaactgtaatcctggggttggtatgtaggaggtctatcctgcagaataagttgatacattagtacctgatttcatatcttacatatttatttgagctgaacattagtttgtagtgtaactattagtaaaaatagagaaacacagcatactgttcattaatagtattttaaaaaaattgtttttcaaatgtcaccaataaaagttttggcaggaagcttgttgcggcattgatctaacctttttcccccccatttcagttgcagtttttgtagaatggctttttctttttcctcttaagagttctattcttcaggtagataatttttcaaatgtgaattatcttttgtgtctatattgatagctcttaaaggagtgaaaatctaaaatagtaaatttcaatgttaagtgtctgctttatgggcatatataaaagtagacacatttcatttgttaatttagttgtgtgtgtgtgttaaaaggagctaatgcttattctgttaatgtaaacttttgaagatcttaagtgtattgctctttcatcttaaacactttcgaggatttgcagtgcgtctagcacctagattacagccaggaacattggttaagaactgttggaaacaaaactaaaagcaaactcaacatatgtgatgtttatggccctcagatccttagtattgtgtgattttcccccgttaacatgtctttctaaaattgtctattaaagcagaggaaatacctgccaaaggaagtatgtattgcattaatcagggcataactaatattctcctgttcagaataatacttatttacgtgtgaaagcaacatggatgtgattcccaacacagaattttcatgacccttttattgtatacaaataaataccataacagttacttggttagacatcaaatctgtgtgcatgactatgtgcttatccacttaagacaataggtaaaaggggatctgagaaattatgtaatagggagtgggaataaaactacttaattcctgtgggcaggttatattttaagttcaaatgcattgctttaacctttggttacttttattctgttaaacagaattgaagaaagagtattataccagagtgtagtaggctagggtgattgtaagaactctgtaatagaatgtcattgtggatgttacctttttcagatccaagcatataaaaagcctgtatattttttaaaaacacatcttaactccacgctttacgatattataaaagttgaatggttcctcttggtaaggatatttgcttacaagtgctaggaaataactcactgatacctgcgttaacatactttgttttgcctagagaggggcaataaaaatgaaccaaaggatatttccagaaaggattaagaaagctgtttaagaaggccatgactctttaggtgtgtatgtgtacctttcagcatcctaggaatttttatactaaaagcaaaatgttttttccagttagtcttcttcaaggaattactattgttccttttgtcacaggtaaaatcagtgttgggaattataatttgagaaaaatattacccagtaacattgaatgtagatggctaaacgattcttactcagtgtgatgtataatgatgcaacagggacccttgtaaattgtcatacgccaataaaatgtcacaagtaat

SEQ ID NO: 1084 - protein, 920 aa, Homo sapien
MGRSNSRSHSSRSKSRSQSSSRSRSRSHSRKKRYSSRSRSRTYSRSRSRDRMYSRDYRRDYRNNRGMRRPYGYRGRGRGYYQGGGGRYHRGGYRPVWNRRHSRSPRRGRSRSRSPKRRSVSSQRSRSRSRRSYRSSRSPRSSSSRSSSPYSKSPVSKRRGSQEKQTKKAEGEPQEESPLKSKSQEEPKDTFEHDPSESIDEFNKSSATSGDIWPGLSAYDNSPRSPHSPSPIATPPSQSSSCSDAPMLSTVHSAKNTPSQHSHSIQHSPERSGSGSVGNGSSRYSPSQNSPIHHIPSRRSPAKTIAPQNAPRDESRGRSSFYPDGGDQETAKTGKFLKRFTDEESRVFLLDRGNTRDKEASKEKGSEKGRAEGEWEDQEALDYFSDKESGKQKFNDSEGDDTEETEDYRQFRKSVLADQGKSFATASHRNTEEEGLKYKSKVSLKGNRESDGFREEKNYKLKETGYVVERPSTTKDKHKEEDKNSERITVKKETQSPEQVKSEKLKDLFDYSPPLHKNLDAREKSTFREESPLRIKMIASDSHRPEVKLKMAPVPLDDSNRPASLTKDRLLASTLVHSVKKEQEFRSIFDHIKLPQASKSTSESFIQHIVSLVHHVKEQYFKSAAMTLNERFTSYQKATEEHSTRQKSPEIHRRIDISPSTLRKHTRLAGEERVFKEENQKGDKKLRCDSADLRHDIDRRRKERSKERGDSKGSRESSGSRKQEKTPKDYKEYKSYKDDSKHKREQDHSRSSSSSASPSSPSSREEKESKKEREEEFKTHHEMKEYSGFAGVSRPRGTFFRIRGRGRARGVFAGTNTGPNNSNTTFQKRPKEEEWDPEYTPKSKKYFLHDDRDDGVDYWAKRGRGRGTFQRGRGRFNFKKSGSSPKWTHDKYQGDGIVEDEEETMENNEEKKDRRKEEKE

SEQ ID NO: 1085 - DNA, 1431 bp, Homo sapien
atgaccatggaaacagttgaatcccagcatgatggaagtataacagcttctttgacagagagcaagtctgctcatgtgcagactcagactgggcaaatttcaatccctgctttagctcagtgcagtgagctgagatcaggcaccagaagaggctccccagctgtaactctagtgcagttaccttcgggccaaactatacatgtccagggagtaattcagacaccacagccatgggttattcagtcatcagaaatacacaccgttcaggtagcagcaattgcagagacagatgaatctgcagaatcagaaggtgtaattgattctcataaacgtagagaaatcctttcacgaagaccctcttataggaaaatactgaatgaactgtcctctgatgtgcctggtgttcccaagattgaagaagagagatcagaggaagaaggaacaccacctagtattgctaccatggcagtaccaactagcatatatcagactagcacggggcaatacattgctatagcccaaggtggaacaatccagatttctaacccaggatctgatggtgttcagggactgcaggcattaacaatgacaaattcaggagctcctccaccaggtgctacaattgtacagtacgcagcacaatcagctgatggcacacagcagttctttgtcccaggcagccaggttgttgttcaagctgccactggtgacatgccaacttaccagatccgagctcctactgctgctttgccacagggagtggtgatggctgcatcgcccggaagtttgcacagtccccagcagctggcagaagaagcaacacgcaaacgagagctgaggctaatgaaaaacagagaagctgcccgggagtgtcgcaggaagaagaaagaatatgtcaaatgtcttgaaaatcgtgtggctgtgcttgaaaaccaaaacaagactctcattgaggaactcaaggccctcaaagatctttattgccataaagtagagtaactgtctttgacttggaccttgtttactctaatcaaggcaggagatgcagcagtcctacttattgccatgtggacttgtgggaaggacacgtgtgacccttaagaatccagtttggattagtgtttgaaattgaattgggaatgttgttccaggatgtggaatgcagcgtgatcacacttaccgagcttactttgatctgtttgtcaatagcatgcaaaaaatgctttgtttgccctttgcttctgctttttttcagggaagctgccaaagaatgtcgacgtcgaaagaaagaatatgtaaaatgcctggagagccgagttgcagtgctggaagtccagaacaagaagcttatagaggaacttgaaaccttgaaagacatttgttctcccaaaactgattactagaaatatttaactatgaactgattacaga

SEQ ID NO: 1086 - protein, 332 aa, Homo sapien
MTMETVESQHDGSITASLTESKSAHVQTQTGQISIPALAQCSELRSGTRRGSPAVTLVQLPSGQTIHVQGVIQTPQPWVIQSSEIHTVQVAAIAETDESAESEGVIDSHKRREILSRRPSYRKILNELSSDVPGVPKIEEERSEEEGTPPSIATMAVPTSIYQTSTGQYIAIAQGGTIQISNPGSDGVQGLQALTMTNSGAPPPGATIVQYAAQSADGTQQFFVPGSQVVVQAATGDMPTYQIRAPTAALPQGVVMAASPGSLHSPQQLAEEATRKRELRLMKNREAARECRRKKKEYVKCLENRVAVLENQNKTLIEELKALKDLYCHKVE

SEQ ID NO: 1087 - DNA, 1336 bp, Homo sapien
gtcagtcgcgagcgaacgaccaagagggtgttcgactgctagagccgagcgaagcgatgcctaaatcaaaggaacttgtttcttcaggctcttctggcagtgattctgacagtgaggttgacaaaaagttaaagaggaaaaagcaagttgctccagaaaaacctgtaaagaaacaaaagacaggtgagacttcgagagccctgtcatcttctaaacagagcagcagcagcagagatgataacatgtttcagattgggaaaatgaggtacgttagtgttcgcgattttaaaggcaaagtgctaattgatattagagaatattggatggatcctgaaggtgaaatgaaaccaggaagaaaaggtatttctttaaatccagaacaatggagccagctgaaggaacagatttctgacattgatgatgcagtaagaaaactgtaaaattcgagccatataaataaaacctgtactgttctagttgttttaatctgtctttttacattagcttttgttttctaaatgttctccaagctattgtatgtttggattgcagaagaatttgtaagatgaatacttttttttaatgtgcattattaaaaatattgagtgaagctaattgtcaactttattaaggattactttgtctgcccaccacctagtgtaaaataaaatcaagtaatacaatcttaactgttgtggccttttttgatcataagagttggtactgtttaaggccaaaagtaacagtttttatagatcttttagtttcaactcagcttttacaataaaaaggatttgtattgcattgagtttataaacttttggtttgtgaacttcatatttgatcttttctcttccaatcaaatgtctaggcttgtttgacttccacccccaatggtttttcactctttttatttacttcattttcctttaataacttaatctcttcatgttcagtttttacttcactctttattcttttctttgattatggtatgcttatttggaaagtcagtgaaactgtcaaaatgttatctcaataagatacttatatgagaactacaatcaccgaatctactgtattcaatattagcagatctaatttgataaacaacatggcttgtgtgaaaactgagcaggtgtttgtttacccatagtgttctgtgtagttattgcttagtctgcagaaaataatgacttagatgagatgtctgacttgctttcacttattaaacatgttcaccatgggatgatgtctgtaacatcagatattgttcaactagactaggatttaataaaaattgtgaaagcttaaaaaaaaaaaaaaaaaaaaaaaa

SEQ ID NO: 1088 - protein, 127 aa, Homo sapien
MPKSKELVSSGSSGSDSDSEVDKKLKRKKQVAPEKPVKKQKTGETSRALSSSKQSSSSRDDNMFQIGKMRYVSVRDFKGKVLIDIREYWMDPEGEMKPGRKGISLNPEQWSQLKEQISDIDDAVRKL

SEQ ID NO: 1089 - DNA, 364 bp, Rattus norvegicus
catgtctgggcgcggcaaaggcgggaagggtctgggcaaaggaggcgctaagcgccaccgcaaagttctgcgcgacaacattcagggcatcaccaagcccgccatccgacgcctggcacggcgtggaggcgttaagcgcatctcaggccttatatacgaggagacacgcggagttcttaaagtgtttttggagaatgtaatccgcgatgcagttacctacacggagcacgccaaacgcaagacagtcacagccatggacgtggtttacgcgctcaagcgccagggccgcaccctgtatggctttggcggctgagtgttttacttacttacacggttcctcaaaggcccttctcagggccaccca

SEQ ID NO: 1090 - protein, 103 aa, Rattus norvegicus [sequence omitted]

SEQ ID NO: 1091 - DNA, 345 bp, Homo sapien
atgagacttctcatcctggccctccttggcatctgctctctcactgcatacattgtggaaggtgtagggagtgaagtctcacataggaggacctgtgtgagcctcactacccagcgactgccagttagcagaatcaagacctacaccatcacggaaggctccttgagagcagtaatttttattaccaaacgtggcctaaaagtctgtgctgatccacaagccacgtgggtgagagacgtggtcaggagcatggacaggaaatccaacaccagaaataacatgatccagaccaagccaacaggaacccagcaatcgaccaatacagctgtgaccctgactggctag

SEQ ID NO: 1092 - protein, 114 aa, Homo sapien
MRLLILALLGICSLTAYIVEGVGSEVSHRRTCVSLTTQRLPVSRIKTYTITEGSLRAVIFITKRGLKVCADPQATWVRDVVRSMDRKSNTRNNMIQTKPTGTQQSTNTAVTLTG

SEQ ID NO: 1093 - DNA, 5741 bp, Homo sapien
atgaggagggacgagcgagacgccaaagccatgcggtccctgcagccgccggatggggccggctcgccccccgagagtctgaggaacggctacgtgaagagctgcgtgagccccttgcggcaggaccctccgcgcggcttcttcttccacctctgccgcttctgcaacgtggagctgcggccgccgccggcctctccccagcagccgcggcgctgctcccccttctgccgggcgcgcctctcgctgggcgacctggctgcctttgtcctcgccctgctgctgggagcggaacccgagagctgggctgccggggccgcctggctgcggacgctgctgagcgtgtgttcgcacagcttgagccccctcttcagcatcgcctgtgccttcttcttcctcacctgcttcctcacccggaccaagcggggacccggcccgggccggagctgcggctcctggtggctgctggcgctgcccgcctgctgttacctgggggacttcttggtgtggcagtggtggtcttggccttggggggatggcgacgcagggtccgcggccccgcacacgcccccggaggcggcagcgggcaggttgctgctggtgctgagctgcgtagggctgctgctgacgctcgcgcacccgctgcggctccggcactgcgttctggtgctgctcctggccagcttcgtctggtgggtctccttcaccagcctcgggtcgctgccctccgccctcaggccgctgctctccggcctggtggggggcgctggctgcctgctggccctggggttggatcacttctttcaaatcagggaagcgcctcttcatcctcgactgtccagtgccgccgaagaaaaagtgcctgtgatccgaccccggaggaggtccagctgcgtgtcgttaggagaaactgcagccagttactatggcagttgcaaaatattcaggagaccgtcgttgccttgtatttccagagaacagatgattctttgggattgggacttaaaacaatggtataagcctcattatcaaaattctggaggtggaaatggagttgatctttcagtgctaaatgaggctcgcaatatggtgtcagatcttctgactgatccaagccttccaccacaagtcatttcctctctacggagtattagtagcttaatgggtgctttctcaggttcctgtaggccaaagattaatcctctcacaccatttcctggattttacccctgttctgaaatagaggacccagctgagaaaggggatagaaaacttaacaagggactaaataggaatagtttgccaactccacagctgaggagaagctcaggaacttcaggattgctacctgttgaacagtcttcaaggtgggatcgtaataatggcaaaagacctcaccaagaatttggcatttcaagtcaaggatgctatctaaatgggccttttaattcaaatctactgactatcccgaagcaaaggtcatcttctgtatcactgactcaccatgtaggtctcagaagagctggtgttttgtccagtctgagtcctgtgaattcttccaaccatggaccagtgtctactggccctctaactaatcgatcacccatagaatttcctgatactgctgattttcttaataagccaagcgttatcttgcagagatctctgggcaatgcacctaatactccagatttttatcagcaacttagaaattctgatagcaatctgtgtaacagctgtggacatcaaatgctgaaatatgtttcaacatctgaatcagatggtacagattgctgcagtggaaaatcaggtgaagaagaaaacattttctcgaaagaatcattcaaacttatggaaactcaacaagaagaggaaacagagaagaaagacagcagaaaattatttcaggaaggtgataagtggctaacagaagaggcacagagtgaacagcaaacaaatattgaacaggaagtatcactggacctgattttagtagaagagtatgactcattaatagaaaagatgagcaactggaattttccaatttttgaacttgtagaaaagatgggagagaaatcaggaaggattctcagtcaggttatgtataccttatttcaagacactggtttattggaaatatttaaaattcccactcaacaatttatgaactattttcgtgcattagaaaatggctatcgagacattccttatcacaatcgtatacatgccacagatgtgctacatgcagtttggtatctgacaacacggccagttcctggcttacagcagatccacaatggttgtggaacaggaaatgaaacagattctgatggtagaattaaccatgggcgaattgcttatatttcttcgaagagctgctctaatcctgatgagagttatggctgcctgtcttcaaacattcctgcattagaattgatggctctatacgtggcagctgccatgcatgattatgatcacccagggaggacaaatgcatttctagtggctacaaatgcccctcaggcagttttatacaatgacagatctgttctggaaaatcatcatgctgcgtcagcttggaatctatatctttctcgcccagaatacaacttccttcttcatcttgatcatgtggaattcaagcgctttcgttttttagtcattgaagcaatccttgctacggatcttaaaaagcattttgattttctcgcagaattcaatgccaaggccaaatgatgtaaatagtaatggcatagaatggagtaatgaaaatgatcgcctcttggtatgccaggtgtgcatcaaactggcagatataaatggcccagcaaaagttcgagacttgcatttgaaatggacagaaggcattgtcaatgaattttatgagcagggagatgaagaagcaaatcttggtctgcccatcagtccattcatggatcgttcttctcctcaactagcaaaactccaagaatcttttatcacccacatagtgggtcccctgtgtaactcctatgatgctgctggtttgctaccaggtcagtggttagaagcagaagaggataatgatactgaaagtggtgatgatgaagacggtgaagaattagatacagaagatgaagaaatggaaaacaatctaaatccaaaaccaccaagaaggaaaagcagacggcgaatattttgtcagctaatgcaccacctcactgaaaaccacaagatatggaaggaaatcgtagaggaagaagaaaaatgtaaagctgatgggaataaactgcaggtggagaattcctccttacctcaagcagatgagattcaggtaattgaagaggcagatgaagaggaatagcgacagtttgagtaaaagaaaagtcatattgaagaagcccagagggttgtgcccaggggcagaaatcattgcctagtgttcaccggctgactctcaactgaccattcccatgtggacaggccttaatactgtgagaggatccttgctctgctggcagtttcccactcctatgcactttcacaggaactagaaaactattcttaaaccaaaaataccatccgtgttgacccatgttgcagagcccttacttaaatccttcactggtgtatgaatactttgtcataatgctgctttgctgggtagtgagctcttatttttcactgggggtcagctataactaaaaactcaagtgacatatttcagttaccaaagtggccaggaactttttgcttttatgaaaatagattcatattgtatttcccagtgtgtcttttatgtctttgaatgttttggagaaaagtctatgcctgtctaaaaatgaatccagtgttgcctttctgagggatttctgctcaatgcaatacactgttcagtgctattctcccagctaggtttatccatgaaggactgagtgacctttgttgtatttaacaaaatccaggtgcatcaatttctgatgctttttactattgtgtattatctactatgtgtgttttatttctgctgagagtattcaggtttgccatggacatcagaagtttgaattccagtcttatcttatgttccatggctgaattttaaagctgtttaggtttaacaatgaagggatttattctttagtcaaaattgttgtttttactctagctcaggattcgtatttttaaagatttagttaatataaacacagcacagatttgtcagaagaaaaaaaatttgctgtaataccaaaactaacctcatcaaagatacagaaaaaaagaaatatagtgagccctaaaggacacatacattgaataaataattggaacatgtggttatctttagatccacatcttagctgtcatttgttcactctaaaactgatgttcatctttctgttaatttccctctgcctaaagactacatgacagaaatgacctatcactacttattatttctgaagcctaactgcaagactgatttctgagaacaagtaaagaactggaatacttatttttcatataaaaatctaaatgtgttaataaatcatttcatacaaaagtacattattaaataaccacattattaaaataattgcaagaaaatggaccatatttacaatgttttgtaaacttgctagtgtgtggatatgtaccctacttgtgaaatacatttgaagatataaagagcagccaaaatgatggcaaaatggtaggctaatattttctattattattggagaacatatcatattttggaatcatgcaattttgcacacagtgaaaccattaattttccaaggtaattcctttagaatatggtattggcatgcagtttcttacttatctagaatatttggcttatctgaaagatatcaatttaagatctctggaagtgttagaatttttgatccttcacagtgtcaatatttaatgaatcactaagctttatttattagacgtgttgagtgagtgctgagttccttgctgccacttttgttaccattgtcacacactatgtgtaaaccagtcccaccacttattactaataaaattttgactgataatttatatttgcacttacaatatatatatcctgtccttatatttctctagagtacattttccatcatgtttaagtgtatttctgctattatttcctctcctgcagaatacatacaagtgtatgtgtataaagtcatacatgtacaagcatgcatattgagattgaatcacatttccatactgtctgttattttattgggttttatattgggtttctttagtttatgttgttttctcaaaagcagcattttaaattacgaatactggacttattggatttaattataaatccaattactactggaaactcatttttacataatatagtccttaaattatttaacccttgctaagtaattgacatatgtaacaataactagcctaaagaaacccaaaaaaagtatctctcccgagctgaaacttaaaaattcgtaagtgtaagaaagaatgtgagaatatattaaatgcacactgtaccattagatgaaatcttacttgagaaattgccataagccatattacagatcttactttgattgttactgaatcagattaatttcttgttataataattttcatcataaattttctatttttaaagccgctggtactagaaatattcttttaatgctatatctatgtacctactgacacatttttctccataaaagtacttttaaaaattacttcatgatttg

SEQ ID NO: 1094 - protein, 910 aa, Homo sapien
MRRDERDAKAMRSLQPPDGAGSPPESLRNGYVKSCVSPLRQDPPRGFFFHLCRFCNVELRPPPASPQQPRRCSPFCRARLSLGDLAAFVLALLLGAEPESWAAGAAWLRTLLSVCSHSLSPLFSIACAFFFLTCFLTRTKRGPGPGRSCGSWWLLALPACCYLGDFLVWQWWSWPWGDGDAGSAAPHTPPEAAAGRLLLVLSCVGLLLTLAHPLRLRHCVLVLLLASFVWWVSFTSLGSLPSALRPLLSGLVGGAGCLLALGLDHFFQIREAPLHPRLSSAAEEKVPVIRPRRRSSCVSLGETAASYYGSCKIFRRPSLPCISREQMILWDWDLKQWYKPHYQNSGGGNGVDLSVLNEARNMVSDLLTDPSLPPQVISSLRSISSLMGAFSGSCRPKINPLTPFPGFYPCSEIEDPAEKGDRKLNKGLNRNSLPTPQLRRSSGTSGLLPVEQSSRWDRNNGKRPHQEFGISSQGCYLNGPFNSNLLTIPKQRSSSVSLTHHVGLRRAGVLSSLSPVNSSNHGPVSTGPLTNRSPIEFPDTADFLNKPSVILQRSLGNAPNTPDFYQQLRNSDSNLCNSCGHQMLKYVSTSESDGTDCCSGKSGEEENIFSKESFKLMETQQEEETEKKDSRKLFQEGDKWLTEEAQSEQQTNIEQEVSLDLILVEEYDSLIEKMSNWNFPIFELVEKMGEKSGRILSQVMYTLFQDTGLLEIFKIPTQQFMNYFRALENGYRDIPYHNRIHATDVLHAVWYLTTRPVPGLQQIHNGCGTGNETDSDGRINHGRIAYISSKSCSNPDESYGCLSSNIPALELMALYVAAAMHDYDHPGRTNAFLVATNAPQAVLYNDRSVLENHHAASAWNLYLSRPEYNFLLHLDHVEFKRFRFLVIEAILATDLKKHFDFLAEFNAKAK

SEQ ID NO: 1095 - DNA, 1835 bp, Homo sapien
gttcattactacaggaaaaactgttctcttctgtggcacagagaaccctgcttcaaagcagaagtagcagttccggagtccagctggctaaaactcatcccagaggataatggcaacccatgccttagaaatcgctgggctgtttcttggtggtgttggaatggtgggcacagtggctgtcactgtcatgcctcagtggagagtgtcggccttcattgaaaacaacatcgtggtttttgaaaacttctgggaaggactgtggatgaattgcgtgaggcaggctaacatcaggatgcagtgcaaaatctatgattccctgctggctctttctccggacctacaggcagccagaggactgatgtgtgctgcttccgtgatgtccttcttggctttcatgatggccatccttggcatgaaatgcaccaggtgcacgggggacaatgagaaggtgaaggctcacattctgctgacggctggaatcatcttcatcatcacgggcatggtggtgctcatccctgtgagctgggttgccaatgccatcatcagagatttctataactcaatagtgaatgttgcccaaaaacgtgagcttggagaagctctctacttaggatggaccacggcactggtgctgattgttggaggagctctgttctgctgcgttttttgttgcaacgaaaagagcagtagctacagatactcgataccttcccatcgcacaacccaaaaaagttatcacaccggaaagaagtcaccgagcgtctactccagaagtcagtatgtgtagttgtgtatgtttttttaactttactataaagccatttacttcaaaatgacattgctaaagactgcattattttactactgtaatttctccacgacatagcattatgtacatagatgagtgtaacatttatatctcacatagagacatgcttatatggttttatttaaaatgaaatgccagtccattacactgaataaatagaactcaactattgcttttcagggaaatcatggatagggttgaagaaggttactattaattgtttaaaaacagcttagggattaatgtcctccatttataatgaagattaaaatgaaggctttaatcagcattgtaaaggaaattgaatggctttctgatatgctgttttttagcctaggagttagaaatcctaacttctttatcctcttctcccagaggctttttttttcttgtgtattaaattaacatttttaaaaagcagatattttgtcaaggggctttgcattcaaactgcttttccagggctatactcagaagaaagataaaagtgtgatctaagaaaaagtgatggttttaggaaagtgaaaatatttttgtttttgtatttgaagaagaatgatgcattttgacaagaaatcatatatgtatggatatattttaataagtatttgagtacagactttgaggtttcatcaatataaataaaagagcagaaaaatatgtcttggttttcatttgcttaccaaaaaaacaacaacaaaaaaagttgtcctttgagaacttcacctgctcctatgtgggtacctgagtcaaaattgtcatttttgttctgtgaaaaataaatttccttcttgtaccatttctgtttagttttactaaaatctgtaaatactgtatttttctgtttattccaaatttgatgaaactgacaatccaatttgaaagtttgtgtcgacgtctgtctagcttaaatgaatgtgttctatttgctttatacatttatattaataaattgtacatttttctaattatttgcaaaaaaaaaaaaaaaaaaaaaaaaaaaaaa

SEQ ID NO: 1096 - protein, 225 aa, Homo sapien
MATHALEIAGLFLGGVGMVGTVAVTVMPQWRVSAFIENNIVVFENFWEGLWMNCVRQANIRMQCKIYDSLLALSPDLQAARGLMCAASVMSFLAFMMAILGMKCTRCTGDNEKVKAHILLTAGIIFIITGMVVLIPVSWVANAIIRDFYNSIVNVAQKRELGEALYLGWTTALVLIVGGALFCCVFCCNEKSSSYRYSIPSHRTTQKSYHTGKKSPSVYSRSQYV

SEQ ID NO: 1097 - DNA, 1488 bp, Homo sapien
ccacgcgtccggttatcagcaggatccatgccgccagagtaaagctttctaccctttactccctgcaaagaaacaagagtgcttatcccagctaagctccagggttaaaactctatgctggtcattcccttcaggatttggcactcaccaacatacccttctttcaagtgaaaaggcatctcttttaatggtcctgacctttggaataggaagcatgtaccctggacagagcacttcaaactagaggaaccataaatccatggctaaccttgacaaatacactgaaacattcaagatgggtagcaacagtaccagcactgctgagatttactgtaatgtcactaatgtgaaatttcaatactccctctatgcaaccacctatatcctcatattcattcctggtcttctggctaacagtgcagccttgtgggttctgtgccgcttcatcagcaagaaaaataaagccatcattttcatgatcaacctctctgtggctgaccttgctcatgtattatctttacccctccggatttactattacatcagccaccactggcctttccagagagccctttgcctgctctgcttctacctgaagtatctcaacatgtatgccagcatttgtttcctgacgtgcatcagtcttcaaaggtgcttttttctcctcaagcccttcagggccagagactggaagcgtaggtacgatgtgggcatcagtgctgccatctggatcgttgtggggactgcctgtttgccatttcccatcctgagaagcacagacttaaacaacaacaagtcctgctttgctgatcttggatacaagcaaatgaatgcagttgcgttggtcgggatgattacagttgctgagcttgcaggatttgtgatcccagtgatcatcatcgcatggtgtacctggaaaactactatatccttgagacagccaccaatggctttccaagggatcagtgagaggcagaaagcactgcggatggtgttcatgtgtgctgcagtcttcttcatctgcttcactccctatcatattaactttattttttacaccatggtaaaggaaaccatcattagcagttgtcccgttgtccgaatcgcactgtatttccaccctttttgcctgtgccttgcaagtctctgctgccttttggatccaattctttattactttatggcttcagagtttcgtgaccaactatcccgccatggcagttctgtgacccgctcccgcctcatgagcaaggagagtggttcatcaatgattggctaaaattaagatatctctttaattacgcctttgtttacctacgttccttgtctttttccaaaggccagaattgtcaaccaatttctttaattgaacattgtaaaaaacaggaataagtacttttgtgtaatattcacagtcaacaggggtgtgatggtgaaggcagagtgtgaaaaacgtgagagaggaagagaaaatagatttacctgatt

SEQ ID NO: 1098 - protein, 344 aa, Homo sapien
RNHKSMANLDKYTETFKMGSNSTSTAEIYCNVTNVKFQYSLYATTYILIFIPGLLANSAALWVLCRFISKKNKAIIFMINLSVADLAHVLSLPLRIYYYISHHWPFQRALCLLCFYLKYLNMYASICFLTCISLQRCFFLLKPFRARDWKRRYDVGISAAIWIVVGTACLPFPILRSTDLNNNKSCFADLGYKQMNAVALVGMITVAELAGFVIPVIIIAWCTWKTTISLRQPPMAFQGISERQKALRMVFMCAAVFFICFTPYHINFIFYTMVKETIISSCPVVRIALYFHPFCLCLASLCCLLDPILYYFMASEFRDQLSRHGSSVTRSRLMSKESGSSMIG

SEQ ID NO: 1099 - DNA, 1824 bp, Homo sapien
ggcacgagggacaagctcaacgagaagatgccctcgagctcacggagaagctagaccaagactggaaagaaattcagactctcctgtcccacaaaactcccaagtcagagaacagagacaaaaaggaaaaacccaagcccgatgcatatgacatgatggttcgcgagcttggctttgaaatgaaggcgcagccctctaacaggatgaagacggaggcagaattggcaaaggaagagcaggagcacctcaggaagctggaggctgagagacttcgaagaatgcttggaaaggatgaggatgaaaatgttaagaaaccaaaacatatgtcagcagatgatctgaatgatggcttcgtgctagataaagatgacaggcgtttgctttcctacaaagatggaaagatgaatgtcgaggaagatgtccaggaagagcaaagcaaggaagccagtgaccctgagagcaacgaggaagaaggtgacagttcaggcggggaggacacagaggagagcgacagcccagatagccactcggacctggaatccaacgtggagagtgaggaagaaaacgagaagccagcaaaagagcagaggcagactcctgggaaagggttgataagcggcaaggaaagagctggaaaagctaccagagacgagctgccctacacgttcgcagcccctgaatcctatgaggaactgagatctctgttgttaggaagatcgatggaagagcagcttttggtggtggagagaattcagaagtgcaaccacccgagtctcgcagaaggaaacaaagcaaaattagaaaaactgtttggctttcttttggaatacgttggcgatttggctacagatgacccaccagacctcacagtcattgataagttggttgtgcacttatatcatctttgccagatgtttcctgaatctgcaagtgacgctatcaaatttgttctccgagatgcgatgcatgagatggaagaaatgattgagaccaaaggccgggcggcattgccagggttggatgtgctcatttatttgaaaatcactgggctgctatttccaacttccgacttctggcacccagtggtgacccctgccctcgtgtgcctcagtcagctgctcaccaagtgccccatcctgtccctccaggacgtggtgaagggcctgttcgtgtgctgcctgttcctggagtatgtggctttgtcccagaggtttatacctgagcttattaattttcttcttgggattctttacatagcaactccaaacaaagcaagccaaggttccactctggtgcaccctttcagagcgcttgggaagaactcggaactgctcgtggtgtctgctagagaggatgtggccacgtggcagcagagcagcctctccctccgctggtctcgaattcccgacctcaggtaatccacctgccttggccccccaattataggtgtgagccacagcacccagccaaaaaagtaattttttttagagtaataatgctataatgttggtgtgattccaacctccagctccccccacccgctgcctgcggttttgtttctgttaaaacgtcacctgatgaaatagaatgaatcctgaaatgcacctctgggatcgggaatggtctgtgtgttatcagctgcgactggttcactgcgtctggacaagcctcatggggactggggattctggccagtgtaatttctgtcaaccacggacgtttgccttcatgtgtagaatttactgttgttatgcaaattatattttcaattataaatgaaaaaaaaaaaaaaaaaaaaaaaaaaaaaaaaaaaaaaaaaaaaaa

SEQ ID NO: 1100 - DNA, 2418 bp, Homo sapien
gtgcagaaagcaccgtcttttactagaagaagacaataaaatgttggtcaatgaactgaatcattcgaaagaaaaagaatgccaatatgaaaaagagaaagcagaaagagaagtagctgtgagacagcttcaacaaaaacgagatgatgtcttaaacaaaggatcagcaacaaaagctctgctggatgcttcatcgcgtcactgcacctatttagaaaatgggatgcaggattcaaggaagaaattagaccagatgagaagtcaatttcaagaaatacaggatcaacttacagctactataagatgtactaaggagatggatggcgacacacaaaagcttgaagtagaacatgtgatgatgagaaaaattattaaaaaacaggatgaccaaattgagcggcttgagaaaatcctgcagcattcaagtttgatgctgcaggtgtttgagagctagatgaagatatggacatttctggaattaagagccccctctacattgagcacaagacagtgacgaatccacattcttcagccagaaagtcacctctgagagccaaatgtctgactatagaaaggagagtcaaagaatgataacgacatctcaggaaaattgtgaaaataatcagcagccggatgtggataaccctttcaaatttctcctggggcctccaaccacccccactggtgttctcctgctgacagtgatttcaattttttctgggctggagctccctgatggaggggcaggccaccatctttgctgtttttgcaacttagccacttcagccttcagtctttggagtgtccaaggagaccagggggtgatgtggaccctcagcatagcacagctgctctataaagatgaggccagactgcttttttgagcactttcccaatgccattcctcctcactgggcaaaacctccaaactggggtctccagccacctcctacaggtgtgtttgggccagcaacaagttcattcatacctccctagggcaaagcttccaaagggagcggtaggctgccatctttgctgtttcacaggcttcactgatgataactccaggtactggaaaatctgaggctactagagactggagcgggccctgggcatactgcagcagccctatggaaaagtggccagactgttacctgggttcccattcctatatcttctcactaggcaagtcttgcaggcctgggcctctacctaaccccccctaccagaactgttgagccagtagcaactcagccactccctggagagagcctccaggggcaactgaaagcctctctgccactgcttctgcagtggaactgtccttgctaccctcagactgatgaaggagctaacacccttatctacaccttcaacaagctttaattgaccaaagcccatctctcatgggttctacacactccccactgctcatgacagggaacccctggattggcccccacagcacgaattctccatcctgattgctgattgcagtaaacagttgctgtattctccaggggtggtggaactctgaggagacaaacaaaagacccttggctacaaccactactaatgtcccttcctcttctgcctcaaagttaggaaagaaatataaacactgagattgccccagagctgcagtgggcagcctaggagtgccaagccatgacctacagccagcactcaagggggagagaagcacattttcagatcattgagagggaacatggctgcaactgtaaggaaacataggggagccacatgaccaagcaagagtctaccaactgaccagtaagcccaagtgccacctactggatcacatcccaaagcttcagcatcaaaaataccctactaatatactcccctctgaaaccagaaatgagaagtcagcttcaaataaagaccctgcacaaagcctcagcctggtgaaaacatccgaaaataagtctacggactgtactcaatctacactgcaattaaaggaaaacccataggtggaaatgagaagaaaccaatgcaagaactccagtaactcaaatggcctctgtgtcatatgtccttctaacaaccacaccagttctccaacaagagttcttaacctggatgaactgtctggaattacataaatataattcagaatatggataggaaaaaaaatcatcaagactcaggagaatggcaaaacccaatccaaggaaaataagaataacagtaaagtgttacaggagctgaaggataaagtagctggtataataaaaaagaacctaaccgatctgaaagcgccgaagaacacaatacaagaattccacaatgcaatcacaagtattaacagcagaaaaaaaaacctgaggaacgaatctcagaacttgaagattggttctctaaaataagatggacaaaaaaaaaaaaaaaaaa

SEQ ID NO: 1101 - protein, 137 aa, Homo sapien [sequence omitted]

SEQ ID NO: 1102 - DNA, 7029 bp, Homo sapien
atggcggcggcggcggggaatcgcgcctcgtcgtcgggattcccgggcgccagggctacgagccctgaggcaggcggcggcggaggagccctcaaggcgagcagcgcgcgcgcggctgccgcgggactgctgcgggaggcgggcagcgggggccgcgagcgggcggactggcggcggcggcagctgcgcaaagtgcggagtgtggagctggaccagctgcctgagcagccgctcttccttgccgcctcaccgccggcctcctcgacttccccgtcgccggagcccgcggacgcagcggggagtgggaccggcttccagcctgtggcggtgccgccgccccacggagccgccagccggcgcggcgcccaccttaccgagtcggtggcggcgccggacagcggcgcctcgagtcccgcagcggccgagcccggggagaagcgggcgcccgccgccgagccgtctcctgcagcggcccccgccggtcgtgagatggagaataaagaaactctcaaagggttgcacaagatggatgatcgtccagaggaacgaatgatcagggagaaactgaaggcaacctgtatgccagcctggaagcacgaatggttggaaaggagaaataggcgagggcctgtggtggtaaaaccaatcccagttaaaggagatggatctgaaatgaatcacttagcagctgagtctccaggagaggtccaggcaagtgcggcttcaccagcttccaaaggccgacgcagtccttctcctggcaactccccatcaggtcgcacagtgaaatcagaatctccaggagtaaggagaaaaagagtttccccagtgccttttcagagtggcagaatcacaccaccccgaagagccccttcaccagatggcttctcaccatatagccctgaggaaacaaaccgccgtgttaacaaagtgatgcgggccagactgtacttactgcagcagatagggcctaactctttcctgattggaggagacagcccagacaataaataccgggtgtttattgggcctcagaactgcagctgtgcacgtggaacattctgtattcatctgctatttgtgatgctccgggtgtttcaactagaaccttcagacccaatgttatggagaaaaactttaaagaattttgaggttgagagtttgttccagaaatatcacagtaagcgtagctcaaggatcaaagctccatctcgtaacaccatccagaagtttgtttcacgcatgtcaaattctcatacattgtcatcatctagtacttctacatctagttcagaaaacagcataaaggatgaagaggaacagatgtgtcctatttgcttgttgggcatgcttgatgaagaaagtcttacagtgtgtgaagacggctgcaggaacaagctgcaccaccactgcatgtcaatttgggcagaagagtgtagaagaaatagagaacctttaatatgtcccctttgtagatctaagtggagatctcatgatttctacagccacgagttgtcaagtcctgtggattccccttcttccctcagagctgcacagcagcaaaccgtacagcagcagcctttggctggatcacgaaggaatcaagagagcaattttaaccttactcattatggaactcagcaaatccctcctgcttacaaagatttagctgagccatggattcaggtgtttggaatggaactcgttggctgcttattttctagaaactggaatgtgagagagatggccctcaggcgtctttcccatgatgtcagtggggccctgctgttggcaaatggggagagcactggaaattctgggggcagcagtggaagcagcccgagtgggggagccaccagtgggtcttcccagaccagtatctcaggagatgtggtggaggcatgctgcagcgttctgtcaatggtctgtgctgaccctgtctacaaagtgtacgttgctgctttaaaaacattgagagccatgctggtatatactccttgccacagtttagcggaaagaatcaaacttcagagacttctccagccagttgtagacaccatcctagtcaaatgtgcagatgccaatagccgcacaagtcagctgtccatatcaacactgttggaactgtgcaaaggccaagcaggagagttggcagttggcagagaaatactaaaagctggatccattggtattggtggtgttgattatgtcttaaattgtattcttggaaaccaaactgaatcaaacaattggcaagaacttcttggccgcctttgtcttatagatagactgttgttggaatttcctgctgaattttatcctcatattgtcagtactgatgtttcacaagctgagcctgttgaaatcaggtataagaagctgctgtccctcttaacctttgctttgcagtccattaataattcccactcaatggttggcaaactttccagaaggatctacttgagttctgcaagaatggttactacagtaccccatgtgttttcaaaactgttagaaatgctgagtgtttccagttccactcacttcaccaggatgcgtcgccgtttgatggctattgcagatgaggtggaaattgccgaagccatccagttgggcgtagaagacactttggatggtcaacaggacagcttcttgcaggcatctgttcccaacaactatctggaaaccacagagaacagttcccctgagtgcacaatccatttagagaaaactggaaaaggattatgtgctacaaaattgagtgccagttcagaggacatttctgagagactggccagcatttcagtaggaccttctagttcaactactaactactactacaacaacagagcaaccaaagccaatggttcaaacaaaaggcagaccccacagtcagtgtttgaactcctctcctttatctcatcattcccaattaatgtttccagccttgtcaaccccttcttcttctaccccatctgtaccagctggcactgcaacagatgtctctaagcatagacttcagggattcattccctgcagaataccttctgcatctcctcaaacacagcgcaagttttctctacaattccacagaaactgtcctgaaaacaaagactcagataaactttccccagtctttactcagtcaagacccttgccctccagtaacatacacaggccaaagccatctcgacctaccccaggtaatacaagtaaacagggagatccctcaaaaaatagcatgacacttgatctgaacagtagttccaaatgtgatgacagctttggctgtagcagcaatagtagtaatgctgttatacccagtgacgagacagtgttcaccccagtagaggagaaatgcagattagatgtcaatacagagctcaactccagtattgaggaccttcttgaagcatctatgccttcaagtgatacaacagtaacttttaagtcagaagttgctgtcctgtctcctgaaaaggctgaaaatgatgatacctacaaagatgatgtgaatcataatcaaaagtgcaaagagaagatggaagctgaagaagaagaagctttagcaattgccatggcaatgtcagcgtctcaggatgccctccccatagttcctcagctgcaggttgaaaatggagaagatatcatcattattcaacaggatacaccagagactctaccaggacataccaaagcaaaacaaccgtatagagaagacactgaatggctgaaaggtcaacagataggccttggagcattttcttcttgttatcaggctcaagatgtgggaactggaactttaatggctgttaaacaggtgacttatgtcagaaacacatcttctgagcaagaagaagtagtagaagcactaagagaagagataagaatgatgagccatctgaatcatccaaacatcattaggatgttgggagccacgtgtgagaagagcaattacaatctcttcattgaatggatggcagggggatcggtggctcatttgctgagtaaatatggagccttcaaagaatcagtagttattaactacactgaacagttactccgtggcctttcgtatctccatgaaaaccaaatcattcacagagatgtcaaaggtgccaatttgctaattgacagcactggtcagagactaagaattgcagattttggagctgcagccaggttggcatcaaaaggaactggtgcaggagagtttcagggacaattactggggacaattgcatttatggcacctgaggtactaagaggtcaacagtatggaaggagctgtgatgtatggagtgttggctgtgctattatagaaatggcttgtgcaaaaccaccatggaatgcagaaaaacactccaatcatcttgctttgatatttaagattgctagtgcaactactgctccatcgatcccttcacatttgtctcctggtttacgagatgtggctcttcgttgtttagaacttcaacctcaggacagacctccatcaagagagctactgaagcatccagtctttcgtactacatggtagccaattatgcagatcaactacagtagaaacaggatgctcaacaagagaaaaaaaacttgtggggaaccacattgatattctactggccatgatgccactgaacagctatgaacgaggccagtggggaacccttacctaagtatgtgattgacaaatcatgatctgtacctaagctcagtatgcaaaagcccaaactagtgcagaaactgtaaactgtgcctttcaaagaactggccctaggtgaacaggaaaacaatgaagtttgcatgactaaattgcagaagcataattttatttttttggagcactttttcagcaatattagcggctgaggggctcaggatctattttaatatttcaattattcttccatttcatatagtgatcacaagcagggggttctgcaattccgttcaaattttttgtcactggctataaaatcagtatctgcctcttttaggtcagagtatgctatgagtagcaatacatacatatatttttaaaagttgatacttctttatgacccacagttgacctttattttcttaaataccagggcagttgtggctcattgtgcattttactgttggcccattcatttcgtttttggaaattatggttttgtattttcatgtttatttacattcatttttgtttattcagggaaagctgatctttttttcaaaccagaaaaaaaaaatgaactagatatgaagtagagttcattaaatatcttgctattgtcagagtttttaaaatatagacttaattttgtttttttaaattggaatacaataaagtactacctacatttgagtcagtcaccactcttattgtgcaggttaagtacaagttaactaaaaataaactgtcctctctggtgcaactcacaaccaagatcaagattaccttaaaatttatttgaattttttagatgttttggttgtcaaactgtaggaaacttcacaacatttaagtcttactctgtatgtaacaatccatcattcaccttcactactggtaataacatagagctgccattttccttttaccatgcatcatctctttacagtaggcctggcagatcattttttaaaaagattattcaactaccaatcagtaatgtttttaaacagtacatttgctttgaacttggaaaatgtgttcagaaagaaaaatggaattgaatttcatttatacactaattccttggattttgcacagttacctaacggttttagtctggagttaaattcagatgcatggaatcctgaaggaaaatggtagctttttaatctttttgtgtgtgtgtgagtcttttaaatcaagtactgattaactattaagtacaactttgagattttagttttaactcttcagaagccagtgtgaaatagaattggttattctcaaagactcaggataaactaaataagctatatatagagtacatttaaaatgtacaacacaaattggaagtaaaataagttacaagataagtttacagggatatattgcttacaatttttaaaaggcagtttgttttttatgtgaatatgtttcttagtgaaattttacattcctttgttttggaagattggcgatatttgaagagttaaaaatagtacagaaatgtgaagtttggtatctctaaatgtgttgtacttgactttcttttttatttttttttattttttttgactacttagaattttcacaattctaataagattgtttccaagtctctcatgtgcaagctttaaaggatgcactcttgccattttatgtactggaagatcattggtcagatgaatactgtgtctgacaaaaatgtaaactgtataaactgaggaacctcagctaatcagtattactttgtagatcaccatgcccaccacatttcaaactcaaactatctgtagatttcaaaatccattgtgtttgagtttgtttgcagttccctcagcttgctggtaattgtggtgttttgttttttgttttgttttcaatgcaaatgtgatgtaatattcttattttctttggatcaaagctggactggaaattgtatcgtgtaattatttttgtgttcttaatgttatttggtactcaagttgtaaataacgtctactactgtttattccagtttctactacctcaggtgtcctatagatttttcttctaccaaagttcactttcacaatgaaattatatttgctgtgtgactatgattcctaagatttccagggcttaagggctaacttctattagcaccttactgtgtaagcaaatgttacaaaaaaagacaagaaaaaaatctctgggttaagaaaatttggcttaaatgtatcctttgttattttaaatatattgagatattttaattaaaatttttaccccattgaaccgattttatagtatttgtacctattttggtgtttttgtctttatagtaaataaaagtttttgaacaaaaaaaaaagtcgacgcgg

SEQ ID NO: 1103 - protein, 1512 aa, Homo sapien
MAAAAGNRASSSGFPGARATSPEAGGGGGALKASSARAAAAGLLREAGSGGRERADWRRRQLRKVRSVELDQLPEQPLFLAASPPASSTSPSPEPADAAGSGTGFQPVAVPPPHGAASRRGAHLTESVAAPDSGASSPAAAEPGEKRAPAAEPSPAAAPAGREMENKETLKGLHKMDDRPEERMIREKLKATCMPAWKHEWLERRNRRGPVVVKPIPVKGDGSEMNHLAAESPGEVQASAASPASKGRRSPSPGNSPSGRTVKSESPGVRRKRVSPVPFQSGRITPPRRAPSPDGFSPYSPEETNRRVNKVMRARLYLLQQIGPNSFLIGGDSPDNKYRVFIGPQNCSCARGTFCIHLLFVMLRVFQLEPSDPMLWRKTLKNFEVESLFQKYHSKRSSRIKAPSRNTIQKFVSRMSNSHTLSSSSTSTSSSENSIKDEEEQMCPICLLGMLDEESLTVCEDGCRNKLHHHCMSIWAEECRRNREPLICPLCRSKWRSHDFYSHELSSPVDSPSSLRAAQQQTVQQQPLAGSRRNQESNFNLTHYGTQQIPPAYKDLAEPWIQVFGMELVGCLFSRNWNVREMALRRLSHDVSGALLLANGESTGNSGGSSGSSPSGGATSGSSQTSISGDVVEACCSVLSMVCADPVYKVYVAALKTLRAMLVYTPCHSLAERIKLQRLLQPVVDTILVKCADANSRTSQLSISTLLELCKGQAGELAVGREILKAGSIGIGGVDYVLNCILGNQTESNNWQELLGRLCLIDRLLLEFPAEFYPHIVSTDVSQAEPVEIRYKKLLSLLTFALQSINNSHSMVGKLSRRIYLSSARMVTTVPHVFSKLLEMLSVSSSTHFTRMRRRLMAIADEVEIAEAIQLGVEDTLDGQQDSFLQASVPNNYLETTENSSPECTIHLEKTGKGLCATKLSASSEDISERLASISVGPSSSTTNYYYNNRATKANGSNKRQTPQSVFELLSFISSFPINVSSLVNPFFFYPICTSWHCNRCLKHRLQGFIPCRIPSASPQTQRKFSLQFHRNCPENKDSDKLSPVFTQSRPLPSSNIHRPKPSRPTPGNTSKQGDPSKNSMTLDLNSSSKCDDSFGCSSNSSNAVIPSDETVFTPVEEKCRLDVNTELNSSIEDLLEASMPSSDTTVTFKSEVAVLSPEKAENDDTYKDDVNHNQKCKEKMEAEEEEALAIAMAMSASQDALPIVPQLQVENGEDIIIIQQDTPETLPGHTKAKQPYREDTEWLKGQQIGLGAFSSCYQAQDVGTGTLMAVKQVTYVRNTSSEQEEVVEALREEIRMMSHLNHPNIIRMLGATCEKSNYNLFIEWMAGGSVAHLLSKYGAFKESVVINYTEQLLRGLSYLHENQIIHRDVKGANLLIDSTGQRLRIADFGAAARLASKGTGAGEFQGQLLGTIAFMAPEVLRGQQYGRSCDVWSVGCAIIEMACAKPPWNAEKHSNHLALIFKIASATTAPSIPSHLSPGLRDVALRCLELQPQDRPPSRELLKHPVFRTTW

SEQ ID NO: 1104 - DNA, 5036 bp, Homo sapien
gtttagtgttaacctcagctacactgaaggaatagaccttagtcctcacaagtataagttctagcttggaagcctgggttctgcagtagctgtggaacttaagcctctgagctcagggatgcagaggcattgagttactaccaagggcctgatcttttctttagcaggcatctgtgttaattgtttcaaaaggtggtgatcagttttacagcctattataaaggagatttttgcctactataaaactaatccccctgaaagagtgagtaaacataactttttgtgtgttgacttccacaagggaaggagttggcacttacactctgacttttgattcagtcgtccttcttgagccatttttgcaggggatcagtttggagtgggcgttaacaatgttattctttttttcttctccagaacaccttccaccatgaccacctcagcaagttcccacttaaataaaggcatcaagcaggtgtacatgtccctgcctcagggtgagaaagtccaggccatgtatatctggatcgatggtactggagaaggactgcgctgcaagacccggaccctggacagtgagcccaagtgtgtggaagagttgcctgagtggaatttcgatggctctagtactttacagtctgagggttccaacagtgacatgtatctcgtgcctgctgccatgtttcgggaccccttccgtaaggaccctaacaagctggtgttatgtgaagttttcaagtacaatcgaaggcctgcaggtgtgttatagcacagctatggatacccctcctcaatctgtgaatgctgtgaaggggagggagaagacattctgaaatcagcattgggaagactaggcaatttcagcactattttaagaatctgagtgattcttttccctgaacttctgctttgaggaagagataatatggcccatctttctatggtcttctctgttggttgcataaaatagcattggatttgtccagatctgtttgccggtcttggagtccccagtaacagccttcctgcctggaatgtaggccaggacaaatgtaaaccaatggacaaatgtttctcaaaaattatagaatggctccaagtgcctgagaaatgaagaataaatctgacaaccagaagcagctgtcttgtgaatagagggttaagtgcctggcatttggtgcttgggaggtggccagaatgcagataaggtgaaagttgccctgttctaaatccactcccatgtgacttggttgtaactgagtttagttaaaactgaagtctttcagagtcttcctacagatgtacaattaacagcttctctcatttttctgactcggtgatcccaagaaggcctatactgggtcagttcataccatagtgcacacctcagttgtatagaatccaaggactattctcccatcagcatcggtattcagcatctatgtctttagatccctgatggcgtattattgactcttttttctagagaccaatttgaggcacacctgtaaacggataatggacatggtgagcaaccagcacccctggtttggcatggagcaggagtataccctcatggggacagatgggcacccctttggttggccttccaacggcttcccagggccccagggtaagtctccttgggttagaggtgaaattcccagaagtgtctaactgtgcaggaatgccccttcccagggatgggaatgactttcagaatcaagaagcaaaataatacagtaaaggcgaaacagccctcacatcaccaaagtccaaaaatggatatgaatatataaagtaaggttttagggggaacgtttggccccactgaagctgtggtgaagaggaactcccctattgcccctcccctgccccgcacctgcagatgaaggcaaggatagtgattcaagagggcaaggcttaagggccttctgatctctgactttgggattctctggatttcttgactcttagtgttttgtcctgatgcttctgtaggtccatattactgtggtgtgggagcagacagagcctatggcagggacatcgtggaggcccattaccgggcctgcttgtatgctggagtcaagattgcggggactaatgccgaggtcatgcctgcccaggtaagtatagctccaatccatcaatgaagaagggtaggtaggtgtacataggacttttgctagtaagggctgctgatacaccactcactaacccaaaacctaagaacgggttggagtacaggtgagaagagaacaggtttaggagattctgagttggagtgagcagttagctttgttttaatggccaagcttctcgtt[450 bp omitted]ataatttatataatatatattagtcatatatcattatataaatatatatcgatatatatatttgtgacatatgtcatggtgacagggaaaagttgacaaattcatgcatttgaaaatcttttagaactaaattagtaacaatacaggcatgtggataagcttaatgcttatgagggggagaaagtttcaaatgattagtcttttcaacaaacagtaactttgtactgcttgtcgggcactgttctcaccactgagacacacaggtaagaagatgcagccactgccctcatgaagtatttgttctactggtatcatattttggtgcacttcattcttggctccatacctggagacaaggttggactgccatcttttctgtttactctaggtacatcgaggaggccattgagaaactaagcaagcggcaccagtaccacatccgtgcctatgatcccaagggaggcctggacaatgcccgacgtctaactggattccatgaaacctccaacatcaacgacttttctgctggtgtagccaatcgtagcgccagcatacgcattccccggactgttggccaggagaagaagggttactttgaagatcgtcgcccctctgccaactgcgaccccttttcggtgacagaagccctcatccgcacgtgtcttctcaatgaaaccggcgatgagcccttccagtacaaaaattaagtggactagacctccagctgttgagcccctcctagttcttcatcccactccaactcttccccctctcccagttgtcccgattgtaactcaaagggtggaatatcaaggtcgtttttttcattccatgtgcccagttaatcttgctttctttgtttggctgggatagaggggtcaagttattaatttcttcacacctaccctcctttttttccctatcactgaagctttttagtgcattagtggggaggagggtggggagacataaccactgcttccatttaatggggtgcacctgtccaataggcgtagctatccggacagagcacgtttgcagaagggggtctcttcttccaggtagctgaaaggggaagacctgacgtactctggttaggttaggacttgccctcgtggtggaaacttttcttaaaaagttataaccaacttttctattaaaagtgggaattaggagagaaggtaggggttgggaatcagagagaatggctttggtctcttgcttgtgggactagcctggcttgggactaaatgccctgctctgaacacgaagcttagtataaactgatggatatccctaccttgaaagaagaaaaggttcttactgcttggtccttgatttatcacacaaagcagaatagtatttttatatttaaatgtaaagacaaaaaactatatgtatggttttgtggattatgtgtgttttgctaaaggaaaaaaccatccaggtcacggggcaccaaatttgagacaaatagtcggattagaaataaagcatctcattttgagtagagagcaagggaagtggttcttagatggtgatctgggattaggccctcaagacccttttgggtttctgccctgcccaccctctggagaaggtgggcactggattagttaacagacaacacgttactagcagtcacttgatctccgtggctttggtttaaaagacacacttgtccacataggtttagagataagagttggctggtcaacttgagcatgttactgacagagggggtattggggttattttctggtaggaatagcatgtcactaaagcaggccttttgatattaaattttttaaaaagcaaaattatagaagtttagattttaatcaaatttgtagggtttctaggtaatttttacagaattgcttgtttgcttcaactgtctcctacctctgctcttggaggagatggggacagggctggagtcaaaacacttgtaattttgtatcttgatgtctttgttaagactgctgaagaattattttttttcttttataataaggaataaaccccacctttattccttcatttcatctaccattttctggttcttgtgttggctgtggcaggccagctgtggttttcttttgccatgacaacttctaattgccatgtacagtatgttcaaagtcaaataactcctcattgtaaacaaactgtgtaactgcccaaagcagcacttataaatcagcctaacataagaaaaaaaaaaaaaaaaaaaaaaaaaaaaaaaaaaaaaaaaaa

SEQ ID NO: 1105 - protein, 112 aa, Homo sapien
MTTSASSHLNKGIKQVYMSLPQGEKVQAMYIWIDGTGEGLRCKTRTLDSEPKCVEELPEWNFDGSSTLQSEGSNSDMYLVPAAMFRDPFRKDPNKLVLCEVFKYNRRPAGVL

SEQ ID NO: 1106 - DNA, 1502 bp, Homo sapien
gccacagtgctccggatcctccaatcttcgctcctccaatctccgctcctccacccagttcaggaacccgcgaccgctcgcagcgctctcttgaccactatgagcctcctgtccagccgcgcggcccgtgtccccggtccttcgagctccttgtgcgcgctgttggtgctgctgctgctgctgacgcagccagggcccatcgccagcgctggtcctgccgctgctgtgttgagagagctgcgttgcgtttgtttacagaccacgcaaggagttcatcccaaaatgatcagtaatctgcaagtgttcgccataggcccacagtgctccaaggtggaagtggtagcctccctgaagaacgggaaggaaatttgtcttgatccagaagccccttttctaaagaaagtcatccagaaaattttggacggtggaaacaaggaaaactgattaagagaaatgagcacgcatggaaaagtttcccagtcttcagcagagaagttttctggaggtctctgaacccagggaagacaagaaggaaagattttgttgttgtttgtttatttgtttttccagtagttagctttcttcctggattcctcactttgaagagtgtgaggaaaacctatgtttgccgcttaagctttcagctcagctaatgaagtgtttagcatagtacctctgctatttgctgttattttatctgctatgctattgaagttttggcaattgactatagtgtgagccaggaatcactggctgttaatctttcaaagtgtcttgaattgtaggtgactattatatttccaagaaatattccttaagatattaactgagaaggctgtggatttaatgtggaaatgatgtttcataagaattctgttgatggaaatacactgttatcttcacttttataagaaataggaaatattttaatgtttcttggggaatatgttagagaatttccttactcttgattgtgggatactatttaattatttcactttagaaagctgagtgtttcacaccttatctatgtagaatatatttccttattcagaatttctaaaagtttaagttctatgagggctaatatcttatcttcctataattttagacattctttatctttttagtatggcaaactgccatcatttacttttaaactttgattttatatgctatttattaagtattttattaggagtaccataattctggtagctaaatatatattttagatagatgaagaagctagaaaacaggcaaattcctgactgctagtttatatagaaatgtattcttttagtttttaaagtaaaggcaaacttaacaatgacttgtactctgaaagttttggaaacgtattcaaacaatttgaatataaatttatcatttagttataaaaatatatagcgacatcctcgaggccctagcatttctccttggataggggaccagagagagcttggaatgtcaaaaaaaaaaaaaaaaaaaaaaaaaaaaaa

SEQ ID NO: 1107 - protein, 114 aa, Homo sapien
MSLLSSRAARVPGPSSSLCALLVLLLLLTQPGPIASAGPAAAVLRELRCVCLQTTQGVHPKMISNLQVFAIGPQCSKVEVVASLKNGKEICLDPEAPFLKKVIQKILDGGNKEN

SEQ ID NO: 1108 - DNA, 1578 bp, Homo sapien
gttttcatttctaaatgctaatcctttttctttcttcctgtctatgagtaggaactctctctccatccctgtagaatctcttggacatgtttatctcatgcttatggggtccccatttcttggagtgggattgacattggtggattctgcttcagtgtatccttcttgcggtcttatttgcatgcatgagtcaactgtgtgcatcccattgtgctttccccaggccagtctctcatgcccattccatttcccctgccctataggcctcctttcatgtactctgcccaacggttttgggggacaatctgggccagaaggggagcgcagcttggcaccccctgatgccagcatcctcatcagcaatgtgtgcagcatcggggaccatgtggcccaggagctttttcagggctcagatttgggcatggcagaagaggcagagaggcctggggagaaagccggccagcacagccccctgcgagaggagcatgtgacctgcgtacagagcatcttggacgaattccttcaaacgtatggcagcctcatacccctcagcactgatgaggtagtagagaagctggaggacattttccagcaggagttttccaccccttccaggtgaggcttgaaagccctccttgaaagaagggctggggccttggggatgtggagagaatactgctgccttttcttccatagggctgtagttggggaggaggaagctagagctgaaggggaggactctgcaggcaggtgccaaatccttggaagctgatgggagagtctttacctgggaccctgaaatgttctacctgagtagtcatgtttatctttctggggagtgggcctttcgcaggtcctcagaaggacccatcatgagccagaaaaaagggagtcagttagaatttgtattccagggagtagtaggtatttctgtgtgccccagctgcatcatcttttgtgtgactccacccttggcctactcaggaagggcctggtgttgcagctgatccagtcttaccagcggatgccaggcaatgccatggtgaggggcttccgagtggcttataagcggcacgtgctgaccatggatgacttggggaccttgtatggacagaactggctcagtgaccaggtgagaaagggtagagaaacaggcctgagaggggattcagggagcagggtgtctggggccctctgcatgggggagccctgtacccatgccgcaccctccatggcaagctgcctcccatcttctccccaggtgatgaacatgtatggagacctggtcatggacacagtccctgaaaaggtaggcccaaccagataggtcagtacccagaggaacttctgcagttttaagcagctttttaagctcctttcatctctttcattttacacagagagggtctctgtttcagggagagaggtggtagtggtagtgtattaatttcaaatccgtaatcttgggctctggatttatcagttgttttcctttctgccagtatttagtgtttttcgctatggccagccccaaggattgggatgggttcctattgtaactattgtaaaacaagattt

SEQ ID NO: 1109 - protein, 191 aa, Homo sapien
MSRNSLSIPVESLGHVYLMLMGSPFLGVGLTLVDSASVYPSCGLICMHESTVCIPLCFPQASLSCPFHFPCPIGLLSCTLPNGFGGQSGPEGERSLAPPDASILISNVCSIGDHVAQELFQGSDLGMAEEAERPGEKAGQHSPLREEHVTCVQSILDEFLQTYGSLIPLSTDEVVEKLEDIFQQEFSTPSR

SEQ ID NO: 1110 - DNA, 2161 bp, Homo sapien
cccacgcgtccgcggacgcgtgggcggacgcgtgggcgggaagatggcggctgggttcaaaaccgtggaacctctggagtattacaggagatttctgaaagagaactgccgtcctgatggaagagaacttggtgaattcagaaccacaactgtcaacatcggttcaattagtaccgcagatggttctgctttagtgaagttgggaaatactacagtaatctgtggagttaaagcagaatttgcagcaccatcaacagatgcccctgataaaggatacgttgttcctaatgtggatctaccacccctgtgttcatcgagattccggtctggacctcctggagaagaggcccaagtggctagccagttcattgcagatgtcattgaaaattcacagataattcagaaagaggacttatgcatttctccaggaaagcttgtctgggttctatactgtgatctcatttgcctcgactacgatggaaacattttggatgcctgcacatttgctttgctagcggctttaaaaaatgtacagttgcctgaagttactataaatgaagaaactgctttagcagaagttaatttaaagaagaaaagttatttgaatattagaactcatccagttgcaacttcctttgctgtgtttgatgacactttgcttatagttgaccctactggagaggaggaacatctggcaacaggaaccttaacaatagtaatggatgaggaaggcaaactctgttgtcttcacaaaccaggtggaagtgggctaactggagctaaacttcaggactgtatgagccgagcagttacaagacacaaagaagttaaaaaactgatggatgaagtaattaagagtatgaaacccaaataaacagccaccacattttcaaaacagatttgtaaaaattgtatttgttaacactgtgcacaaacgttttatactaaataaatatcaaactacaaaaaaaaaaaaaaaaaaaagggcggccgccctttttttttttttttaaatatatacacacaaaacttagttcagcaaggcttcatgatatacaccaattccaaaataaaacaatcaaatggtccaggtgtagaatgccagattccttttatcatctgcgaggaaaagagaagcaggatgaggaagagtgagggaaggcggggacaggctctgcccagaagagctgccgcctcctggcacagcaaacgctccaggcctgggccctgttcatatctggagtcggagggagactcccatcggccgctttgggactgaaaggcccaaggctgtcaccagctcccggaagagagggaggcagtcttgtttttgtcgtgggaaggggtttgggtggagaaaaagattacaggcacatcaccacaggggaccagaagtggagagaagacagagagttctgccgaggccttggtcttcctgtctttccaatcttgccttccccaactctccctgcttcctgggaccatcggtaggggtggggagcagcagtcaacacagcccactgggaagggaggcacaagcagcactccagcttcccagtgctgccctcacactcacctggacaggtcaggggacacaggatgaaagccatggcccaatctaagagcaagacaagtgaaaagtgagtactctcactgtgtaccccagcataggaatagtgaaacctgctacaactggaggctgcgttcccatgacttcctcctccgctctccttgtctgggacttgctggttccaggggtgcatatagggagggggcgggggccacaacccccgagacggtgaggacaggcttccgacccccctgtaagccagatccagtgggatgtgggagagctgggcggtcaccttccctcttgccccggtggcccatcacactcacactgcaccctgggcaagcagttccctgaacccccaaggggctcacaacccttaaagctggagcttaaagcctcctggcttagtacaagcaggagaacgcctcaccttccactcctgcttgtctcctttgctctaccctggctcccctgcccggagggaaaaatatttacacagagtaggagacaaattggctgaaaagctctggactgtctttaacttattttaaaacaaaaaaaaaaaaaaaaaaaaaaaaaaaaaaaaaa

SEQ ID NO: 1111 - protein, 276 aa, Homo sapien
MAAGFKTVEPLEYYRRFLKENCRPDGRELGEFRTTTVNIGSISTADGSALVKLGNTTVICGVKAEFAAPSTDAPDKGYVVPNVDLPPLCSSRFRSGPPGEEAQVASQFIADVIENSQIIQKEDLCISPGKLVWVLYCDLICLDYDGNILDACTFALLAALKNVQLPEVTINEETALAEVNLKKKSYLNIRTHPVATSFAVFDDTLLIVDPTGEEEHLATGTLTIVMDEEGKLCCLHKPGGSGLTGAKLQDCMSRAVTRHKEVKKLMDEVIKSMKPK

SEQ ID NO: 1112 - DNA, 3027 bp, Homo sapien
tctctctcggcgtttccgctgtcagggcctgcggtgtgactcgcgggctcagctggtccggccgtagcacctccgcgccgtcgccatgtcgcggtttttcaccaccggttcggacagcgagtccgagtcgtccttgtccggggaggagctcgtcaccaaacctgtcggaggcaactatggcaaacagccattgttgctgagcgaggatgaagaagataccaagagagttgtccgcagtgccaaggacaagaggtttgaggagctgaccaaccttatccggaccatccgtaatgccatgaagattcgtgatgtcaccaagtgcctggaagagtttgagctcctgggaaaagcatatgggaaggccaaaagcattgtggacaaagaaggtgtcccccggttctatatccgcatcctggctgacctagaggactatcttaatgagctttgggaagataaggaagggaagaagaagatgaacaagaacaatgccaaggctctgagcaccttgcgtcagaagatccgaaaatacaaccgtgatttcgagtcccatatcacaagctacaagcagaaccccgagcagtctgcggatgaagatgctgagaaaaatgaggaggattcagaaggctcttcagatgaggatgaggatgaggacggagtcagtgctgcaactttcttgaagaagaaatcagaagctccttctggggagagtcgcaagttcctcaaaaagatggatgatgaagatgaggactcagaagattccgaagatgatgaagactgggacacaggttccacatcttccgattccgactcagaggaggaagaagggaaacaaaccgcgctggcctcaagatttcttaaaaaggcacccaccacagatgaggacaagaaggcagccgagaagaaacgggaggacaaagctaagaagaagcacgacaggaaatccaagcgcctggatgaggaggaggaggacaatgaaggcggggagtgggaaagggtccggggcggagtgccgttggttaaggagaagccaaaaatgtttgccaagggaactgagatcacccatgctgttgttatcaagaaactgaatgagatcctacaggcacgaggcaagaagggaactgatcgtgctgcccagattgagctgctgcaactgctggttcagattgcagcggaaaacaacctgggagagggcgtcattgtcaagatcaagttcaatatcatcgcctctctctatgactacaaccccaacctggcaacctacatgaagccagagatgtgggggaagtgcctggactgcatcaatgagctgatggatatcctgtttgcaaatcccaacatttttgttggagagaatattctggaagagagtgagaacctgcacaacgctgaccagccactgcgtgtccgtggctgcatcctaactctggtggaacgaatggatgaagaatttaccaaaataatgcaaaatactgaccctcactcccaagagtacgtggagcacttgaaggatgaggcccaggtgtgtgccatcatcgagcgtgtgcagcgctacctggaggagaagggcactaccgaggaggtctgccgcatctacctgctgcgcatcctgcacacctactacaagtttgattacaaggcccatcagcgacagctgaccccgcctgagggctcctcaaagtctgagcaagaccaggcagaaaatgagggcgaggactcggctgtgttgatggagagactgtgcaagtacatctacgccaaggaccgcacagaccggatccgcacatgtgccatcctctgccacatctaccaccatgctctgcactcgcgctggtaccaggcccgcgacctcatgctcatgagccacttgcaggacaacattcagcatgcagacccgccagtgcagatcctttacaaccgcaccatggtgcagctgggcatctgtgccttccgccaaggcctgaccaaggacgcacacaacgccctgctggacatccagtcgagtggccgagccaaggagcttctgggccagggcctgctgctgcgcagcctgcaggagcgcaaccaggagcaggagaaggtggagcggcgccgtcaggtccccttccacctgcacatcaacctggagctgctggagtgtgtctacctggtgtctgccatgctcctggagatcccctacatggccgcccatgagagcgatgcccgccgacgcatgatcagcaagcagttccaccaccagctgcgcgtgggcgagcgacagcccctgctgggtccccctgagtccatgcgggaacatgtggtcgctgcctccaaggccatgaagatgggtgactggaagacctgtcacagttttatcatcaatgagaagatgaatgggaaagtgtgggaccttttccccgaggctgacaaagtccgcaccatgctggttaggaagatccaggaagagtcactgaggacctacctcttcacctacagcagtgtctatgactccatcagcatggagacgctgtcagacatgtttgagctggatctgcccactgtgcactccatcatcagcaaaatgatcattaatgaggagctgatggcctccctggaccagccaacacagacagtggtgatgcaccgcactgagcccactgcccagcagaacctggctctgcagctggccgagaagctgggcagcctggtggagaacaacgaacgggtgtttgaccacaagcagggcacctacgggggctacttccgagaccagaaggacggctaccgcaaaaacgagggctacatgcgccgcggtggctaccgccagcagcagtctcagacggcctactgagctctccactctgtttcccgcctgggccatccaaccttgaagtcctaaaccacacctcagtcactaaaggtctgtttaaagttgttctggttgattgcttgttgccacaaaggtgtgttgagcccattcatttgctgattatacttctgagctgctaccacatgacagacacaaggctcagatgaagaggtgaattgaac

SEQ ID NO: 1113 - protein, 913 aa, Homo sapien
MSRFFTTGSDSESESSLSGEELVTKPVGGNYGKQPLLLSEDEEDTKRVVRSAKDKRFEELTNLIRTIRNAMKIRDVTKCLEEFELLGKAYGKAKSIVDKEGVPRFYIRILADLEDYLNELWEDKEGKKKMNKNNAKALSTLRQKIRKYNRDFESHITSYKQNPEQSADEDAEKNEEDSEGSSDEDEDEDGVSAATFLKKKSEAPSGESRKFLKKMDDEDEDSEDSEDDEDWDTGSTSSDSDSEEEEGKQTALASRFLKKAPTTDEDKKAAEKKREDKAKKKHDRKSKRLDEEEEDNEGGEWERVRGGVPLVKEKPKMFAKGTEITHAVVIKKLNEILQARGKKGTDRAAQIELLQLLVQIAAENNLGEGVIVKIKFNIIASLYDYNPNLATYMKPEMWGKCLDCINELMDILFANPNIFVGENILEESENLHNADQPLRVRGCILTLVERMDEEFTKIMQNTDPHSQEYVEHLKDEAQVCAIIERVQRYLEEKGTTEEVCRIYLLRILHTYYKFDYKAHQRQLTPPEGSSKSEQDQAENEGEDSAVLMERLCKYIYAKDRTDRIRTCAILCHIYHHALHSRWYQARDLMLMSHLQDNIQHADPPVQILYNRTMVQLGICAFRQGLTKDAHNALLDIQSSGRAKELLGQGLLLRSLQERNQEQEKVERRRQVPFHLHINLELLECVYLVSAMLLEIPYMAAHESDARRRMISKQFHHQLRVGERQPLLGPPESMREHVVAASKAMKMGDWKTCHSFIINEKMNGKVWDLFPEADKVRTMLVRKIQEESLRTYLFTYSSVYDSISMETLSDMFELDLPTVHSIISKMIINEELMASLDQPTQTVVMHRTEPTAQQNLALQLAEKLGSLVENNERVFDHKQGTYGGYFRDQKDGYRKNEGYMRRGGYRQQQSQTAY

SEQ ID NO: 1114 - DNA, 4734 bp, Homo sapien
gagatatccttaccttactcaacagcaccaacaaggattggtggaaggtggaagtgaacgatcgtcagggttttgtgccggctgcgtacgtgaagaaattggaccccgcccagtcagcctcccgggagaatctcctggaggagcaaggcagcatagcactgcggcaggagcagattgacaatcaatatcattctctgctggaactgggtgagaagcgtaaaggcatgttggagaagagttgcaagaagtttatgttgttccgtgaagcgaatgaactacagcaatggatcaatgagaaggaagccgctctgacaagtgaggaggtgggagcagacttggagcaggttgaggtgctccagaagaagtttgatgacttccagaaggacctgaaggccaatgagtcacggttgaaggacattaacaaggtagctgaagacctggagtctgaaggtcttatggcagaggaggtgcaggctgtgcaacaacaggaagtgtatggcatgatgcccagggatgaaactgattccaagacagcctccccgtggaagtctgctcgtctgatggttcacaccgtggccacctttaattccatcaaggagctgaatgagcgctggcggtccctacagcagctggccgaggaacggagccagctcttgggcagcgcccatgaagtacagaggttccacagagatgctgatgaaaccaaagaatggattgaagagaagaatcaagctctaaacacagacaattatggacatgatctcgccagtgtccaggccctgcaacgcaagcatgagggcttcgagagggaccttgcggctctcggtgacaaggtaaactcccttggtgaaacagcagagcgcctgatccagtcccatcccgagtcagcagaagacctgcaggaaaagtgcacagagttaaaccaggcctggagcagcctggggaaacgtgcagatcagcgcaaggcaaagttgggtgactcccacgacctgcagcgcttccttagcgatttccgggacctcatgtcttggatcaatggaatacgggggttggtgtcctcagatgagctagccaaggatgtcaccggagctgaggcattgctggagcgacaccagggacaccggacagaaatcgatgccagggctggcactttccaggcatttgagcagtttggacagcagctgttggctcacggacactatgccagccctgagatcaagcagaaacttgatattcttgaccaggagcgtgcagacctggagaaggcctgggttcagcgcaggatgatgctggatcagtgccttgaactgcagctgttccatcgggactgtgagcaagctgagaactggatggctgcccgggaggccttcttgaataccgaagacaaaggagactcactggacagcgtagaggctctgatcaaaaaacatgaagactttgacaaagcgattaacgtccaggaagagaagattgctgctctgcaggcctttgccgaccagctcatcgctgccggccattatgccaagggagacatttctagccggcgcaatgaggtcttggacaggtggcgacgtctgaaagcccagatgattgagaaaaggtcaaagctaggagaatctcaaaccctccaacagttcagccgggatgtggatgagattgaggcttggatcagtgaaaaattgcaaacagcgagtgatgagtcgtacaaggatcccaccaacatccagagcaagcaccagaagcaccaggcttttgaagcagagctgcatgccaacgctgaccggatccgtggggttatcgacatgggcaactccctcattgaacgtggagcctgtgccggcagtgaggatgctgtcaaggcccgcctggctgccttagctgaccagtggcagttcttggtgcaaaagtcagcggaaaagagccagaaactgaaagaagccaacaagcagcagaacttcaacacagggatcaaggactttgacttctggctgtctgaggtggaggccctgctggcatccgaagattatggcaaagacctggcttctgtgaacaacctgctgaaaaagcatcaactgctggaagcagatatatctgcccatgaggatcgcctgaaggacctgaacagccaggcagacagcctgatgaccagcagtgccttcgacacctcccaagtaaaggacaagagggacaccatcaacgggcgcttccagaagatcaagagcatggcggcctcccggcgagccaagctgaatgaatcccatcgcctgcaccagttcttccgggacatggatgacgaggagtcctggatcaaggagaagaagctgctggtgggctcagaggactacggccgggacctaactggcgtgcagaacctgaggaagaagcacaagcggctggaagcagaactggctgcgcatgagccggctattcagggtgtcctggacactggcaagaagctgtccgatgacaacaccatcgggaaagaggagatccagcagcggctggcgcagtttgtggagcactggaaagagctgaagcagctggcagctgcccggggtcagcggctggaagagtccttggaatatcagcagtttgtagccaatgtggaagaggaagaagcctggatcaatgagaaaatgaccctggtggccagcgaagattatggcgacactcttgccgccatccagggcttactgaagaaacatgaagcttttgagacagacttcaccgtccacaaggatcgcgtgaatgatgtctgcaccaatggacaagacctcattaagaagaacaatcaccatgaggagaacatctcttcaaagatgaagggcctgaacgggaaagtgtcagacctggagaaagctgcagcccagagaaaggcgaagctggatgagaactcggccttccttcagttcaactggaaggcggacgtggtggagtcctggatcggtgaaaaggagaacagcttgaagacagatgattatggccgagacctgtcttctgtgcagacgctcctcaccaaacaggaaacttttgacgctgggctgcaggccttccagcaggaaggcattgccaacatcactgccctcaaagatcagcttctcgccgccaaacacgttcagtccaaggccatcgaggcccggcacgcctccctcatgaagaggtggagccagcttctggccaactcagccgcccgcaagaagaagcttctggaggctcagagtcacttccgcaaggtggaggacctcttcctgaccttcgccaaaaaggcttctgccttcaacagctggtttgaaaatgcagaggaggacttaacagaccccgtgcgctgcaactccttggaagaaatcaaagctttgcgcgaggcccacgacgccttccgctcctccctcagctctgcccaggctgacttcaaccagctggccgagctggaccgccagatcaagagcttccgcgtagcctccaacccctacacctggtttaccatggaggccctggaggagacctggaggaacctacagaaaatcatcaaggagagggagctggagctgcagaaggagcagcggcggcaggaggagaacgacaagctgcgccaggagtttgcccagcacgccaacgccttccaccagtggatccaagagaccaggacatacctcctcgatgggtcctgtatggtggaagagtcggggaccctcgaatcccagcttgaagctaccaaacgcaagcaccaggaaatccgagccatgagaagtcagctcaaaaagatcgaggacctgggggccgccatggaggaggccctcatcctggacaacaagtacacggagcacagcaccgtgggcctcgcccagcagtgggaccagctggaccagctgggcatgcgcatgcagcacaacctggagcagcagatccaggccaggaacacaacaggtgtgactgaggaggccctcaaagaattcagcatgatgtttaaacactttgactaggacaagtctggcaggctgaaccatcaggagttcaaatcttgcctgcgctccctgggctatgacctgcccatggtggaggaaggggaacctgaccctgagttcgaggcaatcctggacacggtggatccgaacagagatggccatgtctccttgcaagaatacatggctttcatgatcagccgcgaaactgagaacgtcaagtccagcgaggagattgagagcgccttccgggccctctgctcagagggaaagccttacgtgaccaaggaggagctctaccagaacctgacccgggaacaagccgactactgcgtctcccacatgaagccctacgtggacggcaagggccgcgagctccccaccgcgttcgactacgtggagttcacccgctcgcttttcgtgaactgagccactccctgggtcacccacccctcgctgcttgccctgcgtcgccttgctgcatgtccgctcctctgtgtgctctcactttccactgtaaccttaagcctgcttagcttggaataagacttaggagaatatggtgcttcactaacccgcttccggtccagtcacaatcatcatgtcactgtggggacccagatctgtgtcttgaagcagctgccctcattccgacttcagaaaatcgaagcagctggctcctccccttgttctctctcccaccctcccccaaatctgttttcatgtaaaagacaaataaatgatgacttcccccaaaaaaaaaaaaaaaaaaaac

SEQ ID NO: 1115 - DNA, 1095 bp, Homo sapien
gcgactgtctccgccgagcccccggggccaggtgtcccgggcgcgccacgatgcggccgcggctgtggctcctcctggccgcgcagctgacagttctccatggcaactcagtcctccagcagacccctgcatacataaaggtgcaaaccaacaagatggtgatgctgtcctgcgaggctaaaatctccctcagtaacatgcgcatctactggctgagacagcgccaggcaccgagcagtgacagtcaccacgagttcctggccctctgggattccgcaaaagggactatccacggtgaagaggtggaacaggagaagatagctgtgtttcgggatgcaagccggttcattctcaatctcacaagcgtgaagccggaagacagtggcatctacttctgcatgatcgtcgggagccccgagctgaccttcgggaagggaactcagctgagtgtggttgatttccttcccaccactgcccagcccaccaagaagtccaccctcaagaagagagtgtgccggttacccaggccagagacccagaagggcccactttgtagccccatcacccttggcctgctggtggctggcgtcctggttctgctggtttccctgggagtggccatccacctgtgctgccggcggaggagagcccggcttcgtttcatgaaacaactaagattacatccactggagaaatgttccagaatggactactgaatatacaggcctcaaggggaaggtatatcaggaacctttgtcccccaatgcctgcatggatactacagcaatactacaacctcacagaagctgcttaacccatggatcctgaaaacataggcaagaagcacaggtcctgatgagtggatctttactacttttaccagattcctccctcgctcagaggatcctcccacacacccagcagagacttctctgccaccatcaaccccccaagtcatagggggctcaagttctgccctggtgagctgtggcccccatccttgtgaaccccaaagtgtcccccttgtggaaccaaatgtatccatcttgaataaatttgcccaaaatcctaaagaccgggaaaagggaaccattg

SEQ ID NO: 1116 - protein, 221 aa, Homo sapien
MRPRLWLLLAAQLTVLHGNSVLQQTPAYIKVQTNKMVMLSCEAKISLSNMRIYWLRQRQAPSSDSHHEFLALWDSAKGTIHGEEVEQEKIAVFRDASRFILNLTSVKPEDSGIYFCMIVGSPELTFGKGTQLSVVDFLPTTAQPTKKSTLKKRVCRLPRPETQKGPLCSPITLGLLVAGVLVLLVSLGVAIHLCCRRRRARLRFMKQLRLHPLEKCSRMDY

SEQ ID NO: 1117 - DNA, 7137 bp, Homo sapien
gtactctcgcggtatttgtcccgactctcgcggggtttagcgtggcattgggaggcccggcctgggggaggagacggcgttccgttagcggcgttggggtttggctgcagtggcagtgctttctcttctgctcacggggacccgctcaggctggaggccagccagctcttgccgccacctcggtcgcgatgggggcgcaggaccggccgcagtgccacttcgacatcgagatcaaccgggagccggttggtcgcattatgtttcagctcttctcagacatatgtccaaaaacatgcaaaaacttcctttgcttgtgctcaggagagaaaggccttgggaaaacaactgggaagaagttatgttataaaggttctacgttccatcgtgtggttaaaaactttatgattcagggtggggacttcagtgaaggtaatggaaaaggtggagaatcaatttatggtggatattttaaagatgaaaactttattctcaaacatgacagagcgttccttttatcaatggcaaatcgagggaaacataccaatggttcccagtttttcattaccacaaagcctgctccacacctggatggggtgcatgtagtctttggactggttatttctggttttgaagtaatcgaacaaattgaaaatctgaagaccgatgctgcaagcagaccatatgcagatgtgcgagttattgactgtggagtacttgccacaaaatcaataaaagatgtttttgagaaaaaaaggaagaaaccaactcattcagaaggctcggattcctcttccaattcctcctcttcttcagaatcatcttcagaaagtgaacttgaacatgagagaagcagaaggaggaaacataagaggaggccaaaagttaaacgttctaaaaagaggcgaaaggaagcaagcagttcagaagagccaaggaataaacatgcaatgaacccaaaaggtcactctgagaggagtgataccaatgaaaaaaggtcagttgattccagtgctaaaagggaaaaacctgtggtccgcccagaagagattcctccagtgcctgagaaccgatttttactgagaagagatatgcctgttgttactgcagaacctgaaccgaagattcctgatgttgcacccattgtaagtgatcagaaaccatctgtatcaaagtctggacggaagattaaaggaaggggcacaattcgctatcacacacctccaagatcaagatcctgttctgagtcagatgatgatgacagcagtgaaactcctcctcactggaaagaggaaatgcagagattaagagcatatagaccacctagtggagaaaaatggagtaaaggagataagttaagtgacccctgttcaagccgatgggatgaaagaagcttgtctcagagatccagatcatggtcctataatggatattattcagaccttagtacagcaagacactctggccaccataaaaaacgcagaaaagaaaaaaaggttaagcataaaaagaaagggaaaaagcagaaacactgcagaagacacaaacaaacaaagaagagaaggattcttataccgtctgacatagaatcctcaaaatcttccactcgaagaatgaaatcctcttgtgatagagaaaggagttctcgttcttcctcattgtcatctcatcactcatcaaagagagactggtctaaatctgataaggatgtccagagctctttaacccattccagcagagactcatacagatcaaaatctcactcacagtcttattctagaggaagctcaagatcaaggactgcgtcaaagtcctcatcacattctcgaagtagatcaaagtccagatctagttccaagtctgggcaccgaaagagagcatcaaaatcaccaagaaaaacagcttctcagttaagtgaaaataaaccagttaaaacagaacctttaagagcaaccatggcacaaaatgaaaatgtagtagtacaaccagttgtagcagaaaatattcctgtaataccactgagtgacagtccccccccttcaagatggaagcctggacagaaaccttggaagccctcttatgagcgaattcaggaaatgaaagctaaaacaacccatttgctacccatccaaagcacttacagtttagcaaatattaaagagactggtagctcatcatcctaccataaaagagaaaaaaattcggaaagtgatcagagcacttattcaaaatacagtgatagaagttcagaaagctcaccaaggtcaaggagcagatcttctaggagtagatcttattccagatcatatacaagatcacgtagtctagctagttcacattcaaggtctaggtctccatcatctagatctcattcacgaaataaatacagtgatcattcacagtgtagtagatcatcttcatatacttctattagcagtgatgatggaaggcgagctaagaggagacttagatccagtgggaaaaaaaatagcgtttcacataaaaagcatagcagcagctctgaaaagacacttcacagtaaatatgtcaaaggtagagacaggtcttcatgtgtgagaaagtatagcgagagcagatcatctttagattattcttcagacagtgagcagtcaagtgttcaggccacacagtcagcccaggaaaaagagaagcagggccaaatggaaagaacacataataaacaagaaaaaaacagaggtgaagaaaaatccaagtctgaacgggaatgccctcattcaaaaaaaagaactttgaaagagaatctttctgatcaccttagaaatggcagtaagcccaaaaggaagaattatgctggtagtaaatgggactctgagtcaaattcagaacgagatgtcactaaaaacagtaaaaatgactcccatccatcctctgacaaggaagaaggtgaggccacatccgattctgaatcagaggttagtgaaattcacatcaaagtcaaacccacaaccaagtcgtccacaaatacttcactgcctgatgataatggtgcttggaaatcaagcaaacagcgcacatcaacttctgactctgaggggtcctgttccaattcggaaaacaataggggaaagccacaaaagcacaaacatgggtcaaaggaaaatcttaaaagagaacacaccaaaaaagtgaaagagaaattgaaagggaaaaaagacaaaaagcataaggctccaaaacgaaagcaagcatttcactggcagcctccactagaatttggtgaagaggaggaggaggagattgatgacaagcaagttactcaggaatcaaaagagaaaaaagtttctgaaaacaatgaaaccataaaagataatattctaaaaactgagaaatccagtgaagaggacctttcaggtaaacatgatacagtgactgtttcatcagatcttgatcagtttactaaagatgatagtaaactcagtatttctcccacagctttaaatactgaggaaaatgtggcctgtttacaaaacattcagcacgttgaagaaagtgttcccaatggagtggaagatgtgcttcaaacagatgacaacatggagatctgcactcctgataggagttccccagcaaaagtagaggagacttcccctctaggaaatgcacggcttgataccccagatataaacattgttttgaagcaggatatggcaacggaacatcctcaagcagaggtagtaaaacaggaaagcagcatgtccgaaagtaaagtgttgggtgaagtggggaaacaggacagcagctctgctagcttggctagtgctggagaaagtaccgggaagaaggaggtggctgagaagagccagatcaacctcattgataagaaatggaagcccctgcaaggtgtggggaacctggcagcacctaatgctgccacatccagtgctgtggaagttaaggtgttgaccactgtgcctgaaatgaaaccacaaggcttgagaatagaaattaaaagcaaaaataaagttcggcctgggtctctctttgatgaagtaagaaagacagcacgcttaaaccgtagaccaagaaatcaggagagttcaagtgatgagcagacgcctagtcgggatgatgatagccagtccaggagtccaagtagatctcgaagtaaatctgaaaccaaatcaagacacagaacaaggtctgtctcctatagtcactcaagaagtcgatcgagaagttccacatcatcttatcgatcaagaagctactctagaagtcggagcagaggatggtacagcagaggccgaaccagaagccggagcagttcctaccggagttacaaaagtcacaggacgtccagcaggagcagatccaggagcagctcatatgatccccacagtcgatccaggtcctacacctacgatagctactatagcaggagtcggagtcgaagtagaagccagagaagtgacagttaccaccgaggcagaagttataatcggcggtccaggagttgtagatcttatggctctgacagtgaaagtgaccgaagttactctcatcaccggagccccagtgagagcagcagatacagttgaaaacgtccggatacaaattatatcttatttgtaaatatctggcaacttagcttaagaaatgtaatgacagtctgttgttctatttcaatatcagaggtgaatttcaaaaatagacacttcttaattgttactggttcatttacatgtggggagaagaatttaaaatacagatatgtctcctaaaaatatttttatgccacattttacagtagccaactatggaaatgaatttcattttcttgaatcaagaaatcgtgaaatttatctatgtataatttgcaatattattttaagtctatttcactctatcttacgtatcccttagaatacagattctttttgcctgtttttccagttttagcatatatgctgccaagcatagaactgtgaaggagaactgttaaaggcggccaaatatttatatactgattacatagagtcttgtacatatgtgctctaaaaacaaaccacccagaattgatactgttggtaaccaggagtataaggcagtggctctggggttcttaattcattcctaacttctttgatacttcacaggattaggaaagtggtcatcatacatcccacacagtctgtattacttcaggcttgtgggcaaggttaggaagaatcaatcagccttaactataaatacctgcactgtctctgaggacttactattttatgttctttttaatcaataccgatcagaagtttaggttataaaaacaattctacttcatgctttggtgcttggtaatttttggtgcgtctttaagcattactcttatatatcatatattaaaataccataaaaatgaaattcagacaaaatcactggcaccaaaaatggtttattctgagctgtcttcactttgactatttggggggcttctctcaagtacagatgtgggttggggtcccctggagcaggcaggattggcagtaagagatattggccactcaagtctactgtgtgtgtgtgcctctggaagagtgaagaatggacttcaaaagtaacatcaaaaatctaactgccaccatcctggagacattttgcagggctttcctttcaagtctttcaagtacaggatattaccacaacagcagctgaactgttgtaaccagcatgtttttcctatttccactgtgacctgcagctgactcaaagccttgcgtgacctgacccaggtgcaagagacaggggaagagggatagagggtatagcataaattacatattttcatggctttgggtggttcctccaaaaataattggacctgtaaaaactagtgtgtgtgtgtgtgtgtgtgtgtgtgtgtgtgtggtttttttttttaatctttactttgaatttgttccccaagtgtacttaatcaccttagtgccagtttaatccagttatgcagaagaaattcatattggttgcctgatgtagagctcagcaccaccctaccacaggccttgtctggtgtatttgggaagtggaaaagagccctcagttggagggagctgacaacccttggtggagggagggtgcccttgaatgtattaaaactatcacccaaagaaggtatgaaaacagggtaaggtggtcagttgtttgccaggtcaatagacagaaagtacattagaaaacaggacttaggccaaacaaacaatactggatactgaatacaaaacagtatgatttatattaaaggtttccaaaggttgcctgcaaaggagaatattactactagtcagcaggaaaaaaatgcattcagaacccaagcagaaactgccaaatgtaattaggttaagaaaagttacccttgggcagtgtattagttttctattgctgtgtgacaaattaccccaaatttagcagtttaaaaaacaatacccatagcagttctgtagctcatgagtctggcacagtgtggctggattctctgctcagggtcttaaaggctgaaataagggttggcaggacaacattccttcatggaggctctggggaagaatctgcttctaagttcattcaggttgttggcggaattcagttctttgctggctctcagctggaggcccctctctcacctcaaggctgcctgcattccttcttatgtggtcccctccagcttcaaaccagccttcctgctctttctcatgcttcatatctctctcccgtcctcctgttttaggggcatatgattagctcaagcccacagatatattttaaggttgattgtgcgatagaacataattgcaggagtactgtctcatctcatcatattcacgggttctggagattagctcattgaaagtgggaggggcattttcaaattctgcctaccacaggcaataactgcccatctcagctgtaggtggaatttttacccagaaaagataggccctagaagcctcatttcttttctccatggaaaaggacagccctctgctgcagcgttcaacttgtgtgtttactgacagagtgaactacagaaatagcttttcttcctaaaggggattgttctacattttgaagttattttttaataaaattgaattatgttgt

SEQ ID NO: 1118 - protein, 1462 aa, Homo sapien
MGAQDRPQCHFDIEINREPVGRIMFQLFSDICPKTCKNFLCLCSGEKGLGKTTGKKLCYKGSTFHRVVKNFMIQGGDFSEGNGKGGESIYGGYFKDENFILKHDRAFLLSMANRGKHTNGSQFFITTKPAPHLDGVHVVFGLVISGFEVIEQIENLKTDAASRPYADVRVIDCGVLATKSIKDVFEKKRKKPTHSEGSDSSSNSSSSSESSSESELEHERSRRRKHKRRPKVKRSKKRRKEASSSEEPRNKHAMNPKGHSERSDTNEKRSVDSSAKREKPVVRPEEIPPVPENRFLLRRDMPVVTAEPEPKIPDVAPIVSDQKPSVSKSGRKIKGRGTIRYHTPPRSRSCSESDDDDSSETPPHWKEEMQRLRAYRPPSGEKWSKGDKLSDPCSSRWDERSLSQRSRSWSYNGYYSDLSTARHSGHHKKRRKEKKVKHKKKGKKQKHCRRHKQTKKRRILIPSDIESSKSSTRRMKSSCDRERSSRSSSLSSHHSSKRDWSKSDKDVQSSLTHSSRDSYRSKSHSQSYSRGSSRSRTASKSSSHSRSRSKSRSSSKSGHRKRASKSPRKTASQLSENKPVKTEPLRATMAQNENVVVQPVVAENIPVIPLSDSPPPSRWKPGQKPWKPSYERIQEMKAKTTHLLPIQSTYSLANIKETGSSSSYHKREKNSESDQSTYSKYSDRSSESSPRSRSRSSRSRSYSRSYTRSRSLASSHSRSRSPSSRSHSRNKYSDHSQCSRSSSYTSISSDDGRRAKRRLRSSGKKNSVSHKKHSSSSEKTLHSKYVKGRDRSSCVRKYSESRSSLDYSSDSEQSSVQATQSAQEKEKQGQMERTHNKQEKNRGEEKSKSERECPHSKKRTLKENLSDHLRNGSKPKRKNYAGSKWDSESNSERDVTKNSKNDSHPSSDKEEGEATSDSESEVSEIHIKVKPTTKSSTNTSLPDDNGAWKSSKQRTSTSDSEGSCSNSENNRGKPQKHKHGSKENLKREHTKKVKEKLKGKKDKKHKAPKRKQAFHWQPPLEFGEEEEEEIDDKQVTQESKEKKVSENNETIKDNILKTEKSSEEDLSGKHDTVTVSSDLDQFTKDDSKLSISPTALNTEENVACLQNIQHVEESVPNGVEDVLQTDDNMEICTPDRSSPAKVEETSPLGNARLDTPDINIVLKQDMATEHPQAEVVKQESSMSESKVLGEVGKQDSSSASLASAGESTGKKEVAEKSQINLIDKKWKPLQGVGNLAAPNAATSSAVEVKVLTTVPEMKPQGLRIEIKSKNKVRPGSLFDEVRKTARLNRRPRNQESSSDEQTPSRDDDSQSRSPSRSRSKSETKSRHRTRSVSYSHSRSRSRSSTSSYRSRSYSRSRSRGWYSRGRTRSRSSSYRSYKSHRTSSRSRSRSSSYDPHSRSRSYTYDSYYSRSRSRSRSQRSDSYHRGRSYNRRSRSCRSYGSDSESDRSYSHHRSPSESSRYS

SEQ ID NO: 1119 - DNA, 1303 bp, Homo sapien
ggcttctgggagcgaccgctccgctcgtctcgttggttccggaggtcgctgcggcggtgggaaatgctggcgcgcgcggcgcggggcactggggcccttttgctgaggggctctctactggcttctggccgcgctccgcgccgcgcctcctctggattgccccgaaacaccgtggtactgttcgtgccgcagcaggaggcctgggtggtggagcgaatgggccgattccaccggatcctggagcctggtttgaacatcctcatccctgtgttagaccggatccgatatgtgcagagtctcaaggaaattgtcatcaacgtgcctgagcagtcggctgtgactctcgacaatgtaactctgcaaatcgatggagtcctttacctgcgcatcatggacccttacaaggcaagctacggtgtggaggaccctgagtatgccgtcacccagctagctcaaacaaccatgagatcagagctcggcaaactctctctggacaaagtcttccgggaacgggagtccctgaatgccagcattgtggatgccatcaaccaagctgctgactgctggggtatccgctgcctccgttatgagatcaaggatatccatgtgccaccccgggtgaaagagtctatgcagatgcaggtggaggcagagcggcggaaacgggccacagttctagagtctgaggggacccgagagtcggccatcaatgtggcagaagggaagaaacaggcccagatcctggcctccgaagcagaaaaggctgaacagataaatcaggcagcaggagaggccagtgcagttctggcgaaggccaaggctaaagctgaagctattcgaatcctggctgcagctctgacacaacataatggagatgcagcagcttcactgactgtggccgagcagtatgtcagcgcgttctccaaactggccaaggactccaacactatcctactgccctccaaccctggcgatgtcaccagcatggtggctcaggccatgggtgtatatggagccctcaccaaagccccagtgccagggactccagactcactctccagtgggagcagcagagatgtccagggtacagatgcaagtcttgatgaggaacttgatcgagtcaagatgagttagtggagctgggcttggccagggagtctggggacaaggaagcagattttcctgattctggctctagcttccctgccaagattttggtttttatttttttatttgaactttagtcgtgtaataaactcaccagtggcaaacctgaaaaaaaaaaaaaaaaaaaaaaaaaaaa

SEQ ID NO: 1120 - protein, 356 aa, Homo sapien
MLARAARGTGALLLRGSLLASGRAPRRASSGLPRNTVVLFVPQQEAWVVERMGRFHRILEPGLNILIPVLDRIRYVQSLKEIVINVPEQSAVTLDNVTLQIDGVLYLRIMDPYKASYGVEDPEYAVTQLAQTTMRSELGKLSLDKVFRERESLNASIVDAINQAADCWGIRCLRYEIKDIHVPPRVKESMQMQVEAERRKRATVLESEGTRESAINVAEGKKQAQILASEAEKAEQINQAAGEASAVLAKAKAKAEAIRILAAALTQHNGDAAASLTVAEQYVSAFSKLAKDSNTILLPSNPGDVTSMVAQAMGVYGALTKAPVPGTPDSLSSGSSRDVQGTDASLDEELDRVKMS

SEQ ID NO: 1121 - DNA, 1255 bp, Homo sapien
tgtattcaatgcactggatttgatggaaaataagacattcttggaaaaactcaagtttggtataggagatggcaatttgcagtattacctgtacaattggaggtgtccaggtacagattctgaaaagggctctggtaacttcgttaacgccaatggcaagctgcttcctgacgtgtgcaggcgtccaccctgacacttgctgcttagcatctgttttcttctccttcagattctcactaatatcaacagcaatgctgcatttctctctgctttcttttttcagaaaaggtgttttgttctttttcttcttatcttcaatcttctgaagtccaatagctttaagcctgtcctcaagcgtctgtaggatgaagtgcatatcctcgctctccagagcgctccagcggatgatgtatgggttgttcaacgacgtctccacaaccagaggtctcgtcttacggagagatccccgccccggtgcttgaggagctgcagccattttgaaaatccttccaagaagcaaaatgacaacagaaaaaattcatgttagcgacaactgcatgacttaagaatatcttgactgtactctctgattcttatttatttatgtatttattttttgagacagaatttcactcttgttgcccaggctggagtgcagtggcacaatctcagctcactgcaacctccacctcctgggttcaagcgattctcctgcctcagcctcccgagtagctgggattacaggcgcccgccaccaagcccagctaatgtttctatttttttttagtagagacagggtttcaccatgttgcccaggctggtctcaaactcctgacctcaggtgatccacccacctcggcctcccaaagtgctgggattacaggcatgagccactgcgcccggcctgtactctgattctggataagctagagcaagcctgattatataagtccaattaggtgagcatacgcttgtcttccttttaaagattaagtaattttatttttccccatttttcttacccgattttgaatgctctacgaaggctctttaaaatactcaggactatgggtgagtagtgtttaattttccccatttttttatatgactttgtctttattcctatacaagcaatatgtgaaagttttaattattgcaatcatagtacaattccatttgtctatttcatttattaaaaatattctgtttctacttgttcataattaaaaaaaaaaaaaaaaaaaaaaaaaaaaaa

SEQ ID NO: 1122 - DNA, 4054 bp, Homo sapien
cgccccggcgcggggccctgcggtagcctcaggcccctcccctggacccgccgcagagccagtgcagaatacagaaactgcagccatgaccacgcacgtcaccctggaagatgccctgtccaacgtggacctgcttgaagagcttcccctccccgaccagcagccatgcatcgagcctccaccttcctccatcatgtaccaggctaactttgacacaaactttgaggacaggaatgcatttgtcacgggcattgcaaggtacattgagcaggctacagtccactccagcatgaatgagatgctggaggaaggacatgagtatgcggtcatgctgtacacctggcgcagctgttcccgggccattccccaggtgaaatgcaacgagcagcccaaccgagtagagatctatgagaagacagtagaggtgctggagccggaggtcaccaagctcatgaagttcatgtattttcagcgcaaggccatcgagcggttctgcagcgaggtgaagcggctgtgccatgccgagcgcaggaaggactttgtctctgaggcctacctcctgacccttggcaagttcatcaacatgtttgctgtcctggatgagctaaagaacatgaagtgcagcgtcaagaatgaccactctgcctacaagagggcagcacagttcctgcggaagatggcagatccccagtctatccaggagtcgcagaacctttccatgttcctggccaaccacaacaggatcacccagtgtctccaccagcaacttgaagtgatcccaggctatgaggagctgctggctgacattgtcaacatctgtgtggattactacgagaacaagatgtacctgactcccagtgagaaacatatgctcctcaaggtgatgggctttggcctctacctaatggatggaaatgtcagtaacatttacaaactggatgccaagaagagaattaatcttagcaaaattgataaattctttaagcagctgcaggtggtgccccttttcggcgacatgcagatagagctggccagatacattgagaccagtgctcactatgaagagaacaagtccaagtggacgtgcacccagagcagcatcagcccccagtacaatatctgcgagcagatggttcagatccgggatgaccacatccgcttcatctccgagctcgctcgctacagcaacagtgaggtggtgacgggctcagggctggacagccagaagtcagacgaggagtatcgcgagctcttcgacctagccctgcggggtctgcagcttctatccaagtggagcgcccacgtcatggaggtgtactcttggaagctggttcatcccacagacaagttctgcaacaaggactgtcctggcaccgcggaggaatatgagagagccacacgctacaattacaccagtgaggaaaaatttgccttcgttgaggtgatcgccatgatcaaaggcctgcaggtgctcatgggcaggatggagagcgtcttcaaccaggccatcaggaacaccatctacgcggcattgcaggacttcgcccaggtgacgctgcgtgagcccctgcggcaggcggtacggaagaagaagaatgtcctcatcagcgtcctacaggcaattcgaaagaccatctgtgactgggagggagggcgagagccccctaatgacccatgcttgagaggggagaaggaccccaaaggtggatttgatatcaaggtgccccggcgtgctgtggggccatccagcacacagctgtacatggtgcggaccatgcttgaatcactcattgcagacaaaagcggctccaagaagaccctgaggagcagcctggatggacccattgtcctcgccatagaggactttcacaaacagtccttcttcttcacacatctgctcaacatcagtgaagccctgcagcagtgttgtgacctctcccagctctggttccgagaattcttcctggagttaaccatgggccgacgaatccagttccccatcgagatgtccatgccctggattctaacggaccatatcctggaaaccaaagaaccttccatgatggagtatgtcctctaccctctggatctgtacaacgacagcgcctactatgctctgaccaagtttaaaaagcagttcctgtacgatgagatagaagctgaggtgaacctgtgttttgatcagtttgtctacaagctggcagaccagatctttgcttactacaaagccatggctggcagtgtcctgttggataaacgttttcgagctgagtgtaagaattatggcgtcatcattccgtatccaccgtccaatcgctatgaaacactgctgaagcagagacacgtccagctgttgggtagatcaattgacttgaacagactcattacccagcgcatctctgccgccatgtataaatccttggaccaagctatcagccgctttgagagtgaggacctgacctccattgtggagctggagtggctgctggagattaaccggctcacgcatcggctgctctgtaagcatatgacgctggacagcttcgatgccatgttccgagaggccaatcacaatgtgtccgccccctatggccgtatcaccctgcatgtcttctgggaactgaactttgactttctccccaactactgctacaatgggtccactaaccgttttgtgcggactgccattcctttcacccaagaaccacaacgagacaaacctgccaacgtccagccttattacctctatggatccaagcctctcaacattgcctacagccacatctacagctcctacaggaatttcgtggggccacctcatttcaagactatctgcagactcctgggttatcagggcatcgctgtggtcatggaggaactgctaaagattgtgaagagcttgctccaaggaaccattctccagtatgtgaaaacactgatagaggtgatgcccaagatatgccgcttgccccgacatgagtatggctccccagggatcctggagttcttccaccaccagctgaaggacatcattgagtacgcagagctcaaaacagacgtgttccagagcctgagggaagtgggcaatgccatcctcttctgcctcctcatagagcaagctctgtctcaggaggaggtctgcgatttgctccatgccgcacccttccaaaacatcttgcctagagtctacatcaaagagggggagcgcctggaggtccggatgaaacgtctggaagccaagtatgccccgctccacctggtccctctgatcgagcggctggggacccctcagcaaatcgccattgctcgcgagggtgacctcctgaccaaggagcggctgtgctgtggcctgtccatgttcgaggtcatcctgacccgcattcggagctacctgcaggaccccatctggcggggcccaccgcccaccaatggcgtcatgcacgtcgatgagtgtgtggagttccaccggctgtggagcgccatgcagttcgtgtactgcatccctgtgggaaccaacgagttcacagctgagcagtgtttcggcgatggcttgaactgggttggttgctccatcattgtcctgctgggccagcagcgtcgctttgacctgttcgacttctgttaccacctgctaaaagtgcagaggcaggacgggaaggatgaaatcattaagaatgtgcccctgaagaagatggccgaccggatcaggaagtatcagatcttgaacaatgaggtttttgccatcctgaacaaatacatgaagtccgtggagacagacagttccactgtggagcatgtgcgctgcttccagccacccatccaccagtccttggccaccacttgctaagcagaagatcctgcagacccttatctggaggaggaagagaagcaggagagagaaagccacagccagcctgccataggatccaactggacaacgtgtgggatggacctggaaacaagcacctccccaaacacatcaccactccctagggcggggcctgtgcatgctctcccatgacatctccatgctggtttctccatagcataaatg

SEQ ID NO: 1123 - protein, 1281 aa, Homo sapien
APARGPAVASGPSPGPAAEPVQNTETAAMTTHVTLEDALSNVDLLEELPLPDQQPCIEPPPSSIMYQANFDTNFEDRNAFVTGIARYIEQATVHSSMNEMLEEGHEYAVMLYTWRSCSRAIPQVKCNEQPNRVEIYEKTVEVLEPEVTKLMKFMYFQRKAIERFCSEVKRLCHAERRKDFVSEAYLLTLGKFINMFAVLDELKNMKCSVKNDHSAYKRAAQFLRKMADPQSIQESQNLSMFLANHNRITQCLHQQLEVIPGYEELLADIVNICVDYYENKMYLTPSEKHMLLKVMGFGLYLMDGNVSNIYKLDAKKRINLSKIDKFFKQLQVVPLFGDMQIELARYIETSAHYEENKSKWTCTQSSISPQYNICEQMVQIRDDHIRFISELARYSNSEVVTGSGLDSQKSDEEYRELFDLALRGLQLLSKWSAHVMEVYSWKLVHPTDKFCNKDCPGTAEEYERATRYNYTSEEKFAFVEVIAMIKGLQVLMGRMESVFNQAIRNTIYAALQDFAQVTLREPLRQAVRKKKNVLISVLQAIRKTICDWEGGREPPNDPCLRGEKDPKGGFDIKVPRRAVGPSSTQLYMVRTMLESLIADKSGSKKTLRSSLDGPIVLAIEDFHKQSFFFTHLLNISEALQQCCDLSQLWFREFFLELTMGRRIQFPIEMSMPWILTDHILETKEPSMMEYVLYPLDLYNDSAYYALTKFKKQFLYDEIEAEVNLCFDQFVYKLADQIFAYYKAMAGSVLLDKRFRAECKNYGVIIPYPPSNRYETLLKQRHVQLLGRSIDLNRLITQRISAAMYKSLDQAISRFESEDLTSIVELEWLLEINRLTHRLLCKHMTLDSFDAMFREANHNVSAPYGRITLHVFWELNFDFLPNYCYNGSTNRFVRTAIPFTQEPQRDKPANVQPYYLYGSKPLNIAYSHIYSSYRNFVGPPHFKTICRLLGYQGIAVVMEELLKIVKSLLQGTILQYVKTLIEVMPKICRLPRHEYGSPGILEFFHHQLKDIIEYAELKTDVFQSLREVGNAILFCLLIEQALSQEEVCDLLHAAPFQNILPRVYIKEGERLEVRMKRLEAKYAPLHLVPLIERLGTPQQIAIAREGDLLTKERLCCGLSMFEVILTRIRSYLQDPIWRGPPPTNGVMHVDECVEFHRLWSAMQFVYCIPVGTNEFTAEQCFGDGLNWVGCSIIVLLGQQRRFDLFDFCYHLLKVQRQDGKDEIIKNVPLKKMADRIRKYQILNNEVFAILNKYMKSVETDSSTVEHVRCFQPPIHQSLATTC

SEQ ID NO: 1124 - DNA, 495 bp, Homo sapien
gctgtgcaacctcggcgccatgcgcaacctctatgcgatgcaccggcggctgcagcggcacccgcgctcctgcaccagggactgtgccgagccgcgcgcggacgggagggaagcgtcccctcagcccctggaggagctggatcacctcctgctgctggcgctgatgaccgtgctcttcactatgtgttctctgcccgtaatttatcgcgcttactatggagcatttaaggatgtcaaggagaaaaacaggacctctgaagaagcagaagacctccgagccttgcgatttctatctgtgatttcaattgtggacccttggatttttatcattttcagatctccagtatttcggatattttttcacaagattttcattagacctcttaggtacaggagccggtgcagcaattccactaacatggaatccagtctgtgacagtgtttttcactctgtggtaagctgaggaatatgtcacattttcagtcaaagaacca

SEQ ID NO: 1125 - protein, 144 aa, Homo sapien
LCNLGAMRNLYAMHRRLQRHPRSCTRDCAEPRADGREASPQPLEELDHLLLLALMTVLFTMCSLPVIYRAYYGAFKDVKEKNRTSEEAEDLRALRFLSVISIVDPWIFIIFRSPVFRIFFHKIFIRPLRYRSRCSNSTNMESSL

SEQ ID NO: 1126 - DNA, 2507 bp, Homo sapien
cttattttcaactcccgagtggctagacaggaaaaagaaagaaatgatgtgaggaaagttgggaagctctgcacagtgatccctgagagccctggcaccactttaggagacgtggtaggtcactctgtacatgttcttcctcagcaaggggggttttcccaaaagggacacaagaagaaatcttactcagtggagtaaatggaaagaagagggagcatgtctgtctggttccttcctatttctcctttcctcagagtcaagtttcaccccacagggagttcacgcttccatgttgcctcatccagcccttcaggaagccagagtctgtgctccagtgtggcatttcagccaacctagaaatgaagggtgacttagcacagagaggttcaacaagtggggcatgcaggccactgatctctgcaagggcagcagtgccggggtgctctgggatacaggcagtgccttcggaaagaagggcaattgaagacagttgagaaggtgaacaaagtttacatctaacaaattttaaagttttattatttttatttttatattcttggggtctcactattttgcccaggctggagtgcagcagctatttgcaggctgaatcccactactgatcagtactggagttttattttatttaattaacttatttattttgagacagagtcttgctctattgctcaggctggagtgcagtgttgcgatctcggctcactgcagtctcgacctcccaggctcaatcgatcctgccacctcagcctctggagtagctgggactacctgtaggtgcgtgccaccacgcccaggtaatcttttattttttgtagataccagttatcctatgttgcccaggctggtctccaactcctgggctcaagcaatcctcccacctcagcctccctaagtgctgagattacaggtgtgagtcactgtgcccagccaacctggactattctaaattttaacagtgcctaagagaatcatgcttaattaaaaactagctggacgtggtggcttacgcctgtaatcccagcactttgggaggccgagatgggcggatcccttgattccaggagttcgagtccaacctgggcagcacgaagaaaccctcatctctaccaaaaatacaaaaattagccaggcattgtggtgtatacctgtagtcccagctgcttgggaggatgaggcaggaggattgctggagcctgggaggtggaggttgcaaaaaaataatgacttttagtgttactgcagatgcaacgcatgttcactgtagaccaatttaaaactatagataaaccaaaacaacaaactttttcttttttttaagagacggagtctcgctctgttgcccaggctggagtgcagtggtgcaatctcggctcgctgcaacctcagcctcccaggttctagcaactcctgcctcagcctcttgagtagctgggactacaggcgcacaccaccacacccatctaattttttgtattttagtagagacggggtttcaccttgttatccactgtggtctcaaactcctgagctcagacaatccgcccgcctcgcctcccaaagcgctgggattacaggggtgagccaccacacccggccaagaaactttaaatactacctagagacaatcccttttaaaactttagtgtatgtctttttataccattttctaggcttctaggctcatttgcaaaaatgagataccactgtaaatacttaatctgtaaattatctttttcaggagtctctctgagtcttctggctcagggagctgtcctataacataaataagtaaatttttttttacaatggttgttgaagatactaataaatattcagggctgggcacagtggtttatagctgtaatcccaccacttcgggaggtcaaggtgggaggattgctttagcccaggagtttgagaccagcctggggaacataatgagacccatctgtaaaaaaagaaaattaaattcacctttagtattatcttattaaaattccattgtgcatttacacaatcatttaccttatcagtcccttcagaagaacatttaagttgttatcacttacatccttgcagctaaatctttgagtacatcctaatacctgtctgtttttaatgacctatctaaggaatcctttgaaacctatacacttaaccactgtgttagctaagagcctccaaaaaggctgggtgtggcggctcatgcctgtaatcccagcactttgggagtccgaggcgagtgaatcacttgaggtcaggagttcgagaccagccgggccaacatggtgaaaccccgtctctacaaaaaatgcaaaaattagttgggcatggtggctcactcctgtagtcctggctactcaggaggataagtggaaggatggcttaagctcaggaggtagagattgcaatgagccgagattgtgccactgcactacaacctgggcaacagagccagaccctgtctcaaaaaaaaaaaaaaaaaa

SEQ ID NO: 1127 - DNA, 2512 bp, Homo sapien
cttgtctcccctggtttgtgaagtgcggaaaaccagaggcgcagtcatgtcgggattcgacgatcctggcattttctacagcgacagcttcgggggcgacgcccaggccgacgaggggcaggcccgcaaatcgcagctgcagaggcgcttcaaggagttcctgcggcagtaccgagtgggcaccgaccgcacgggcttcaccttcaaatacagggatgaactcaagcggcattacaacctgggggagtactggattgaggtggagatggaggatctggccagctttgatgaggacctggccgactacttgtacaagcagccagccgagcacctgcagctgctggaggaagctgccaaggaggtagctgatgaggtgacccggccccggccttctggggaggaggtgctccaggacatccaggtcatgctcaagtcggacgccagcccttccagcattcgtagcctgaagtcggacatgatgtcacacctggtgaagatccctggcatcatcatcgcggcctctgcggtccgtgccaaggccacccgcatctctatccagtgccgcagctgccgcaacaccctcaccaacattgccatgcgccctggcctcgagggctatgccctgcccaggaagtgcaacacagatcaggctgggcgccccaaatgcccattggacccgtacttcatcatgcccgacaaatgcaaatgcgtggacttccagaccctgaagctgcaggagctgcctgatgcagtcccccacggggagatgcccagacacatgcagctctactgcgacaggtacctgtgtgacaaggtcgtccctgggaacagggttaccatcatgggcatctactccatcaagaagtttggcctgaccaccagcaggggccgtgacagggtgggcgtgggcatccgaagctcctacatccgtgtcctgggcatccaggtggacacagatggctctggccgcagctttgctggggccgtgagcccccaggaggaggaggagttccgtcgcctggctgccctcccaaatgtctatgaggtcatctccaagagcatcgccccctccatctttgggggcacagacatgaagaaggccattgcctgcctgctctttgggggctcccgaaagaggctccctgatggacttactcgccgaggagacatcaacctgctgatgctaggggaccctgggacagccaagtcccagcttctgaagtttgtggagaagtgttctcccattggggtatacacgtctgggaaaggcagcagcgcagctggactgacagcctcggtgatgagggacccttcgtcccggaatttcatcatggagggcggagccatggtcctggccgatggtggggtcgtctgtattgacgagtttgacaagatgcgagaagatgaccgtgtggcaatccacgaagccatggagcagcagaccatctctatcgccaaggctgggatcaccaccaccctgaactcccgctgctccgtcctggctgctgccaactcagtgttcggccgctgggatgagacgaagggggaggacaacattgacttcatgcccaccatcttgtcgcgcttcgacatgatcttcatcgtcaaggatgagcacaatgaggagagggatgtgatgctggccaagcatgtcatcactctgcacgtgagcgcactgacacagacacaggctgtggagggcgagattgacctggccaagctgaagaagtttattgcctactgccgagtgaaatgtggcccccggctgtcagcagaggctgcagagaaactgaagaaccgctacatcatcatgcggagcggggcccgtcagcacgagagggacagtgaccgccgctccagcatccccatcactgtgcggcagctggaggccattgtgcgcatcgcggaagccctcagcaagatgaagctgcagcccttcgccacagaggcagatgtggaggaggccctgcggctcttccaagtgtccacgttggatgctgccttgtccggtaccctgtcaggggtggagggcttcaccagccaggaggaccaggagatgctgagccgcatcgagaagcagctcaagcgccgctttgccattggctcccaggtgtctgagcacagcatcatcaaggacttcaccaagcagaaatacccggagcacgccatccacaaggtgctgcagctcatgctgcggcgcggcgagatccagcatcgcatgcagcgcaaggttctctaccgcctcaagtgagtcgcgccgcctcactggactcatggactcgcccacgcctcgcccctcctgccgctgcctgccattgacaatgttgctgggacctctgcctccccactgcagccctcgaacttcccaggcaccctcctttctgccccagaggaaggagctgtagtgtcctgctgcctctgggcgcccgcctctagcgcggttctgggaagtgtgcttttggcatccgttaataataaagccacggtgtgttcaggtaaaaaaaaaaaaaaa

SEQ ID NO: 1128 - protein, 734 aa, Homo sapien
MSGFDDPGIFYSDSFGGDAQADEGQARKSQLQRRFKEFLRQYRVGTDRTGFTFKYRDELKRHYNLGEYWIEVEMEDLASFDEDLADYLYKQPAEHLQLLEEAAKEVADEVTRPRPSGEEVLQDIQVMLKSDASPSSIRSLKSDMMSHLVKIPGIIIAASAVRAKATRISIQCRSCRNTLTNIAMRPGLEGYALPRKCNTDQAGRPKCPLDPYFIMPDKCKCVDFQTLKLQELPDAVPHGEMPRHMQLYCDRYLCDKVVPGNRVTIMGIYSIKKFGLTTSRGRDRVGVGIRSSYIRVLGIQVDTDGSGRSFAGAVSPQEEEEFRRLAALPNVYEVISKSIAPSIFGGTDMKKAIACLLFGGSRKRLPDGLTRRGDINLLMLGDPGTAKSQLLKFVEKCSPIGVYTSGKGSSAAGLTASVMRDPSSRNFIMEGGAMVLADGGVVCIDEFDKMREDDRVAIHEAMEQQTISIAKAGITTTLNSRCSVLAAANSVFGRWDETKGEDNIDFMPTILSRFDMIFIVKDEHNEERDVMLAKHVITLHVSALTQTQAVEGEIDLAKLKKFIAYCRVKCGPRLSAEAAEKLKNRYIIMRSGARQHERDSDRRSSIPITVRQLEAIVRIAEALSKMKLQPFATEADVEEALRLFQVSTLDAALSGTLSGVEGFTSQEDQEMLSRIEKQLKRRFAIGSQVSEHSIIKDFTKQKYPEHAIHKVLQLMLRRGEIQHRMQRKVLYRLK

SEQ ID NO: 1129 - DNA, 1807 bp, Homo sapien
ctggaaggagtcatggcggatggtcaggtggcggaactgctgctccggcggctggaggcgtctgatggcggcctggacagcgccgagttggcggctgagctgggcatggagcaccaggcggtggtgggcgccgtgaagagccttcaggcgctgggcgaggtcatcgaggctgaacttcggtccaccaagcactgggagcttactgcggagggcgaggagattgcccgggagggcagccatgaggcccgtgtgtttcgaagcattcccccagagggcctggcccagagcgagcttatgcgactgcccagtggcaaagtgggcttcagcaaggccatgtccaacaagtggattcgggtggacaagagtgcggctgacgggccccgggtgttccgagtggtggacagcatggaggatgaggtgcagcggcggctccagctggtccgggggggacaggctgagaagctgggggagaaggagaggagcgagctgaggaagaggaagctgttggctgaagtgactctgaagacctactgggtgagcaaaggcagtgcctttagtaccagcatctccaagcaagagacagagctgagcccagagatgatctccagtggctcttggcgggaccggcccttcaagccctacaacttcttggcccacggtgtcctccccgacagcggccaccttcacccgctgctcaaggtccgctcccagttccgacagatcttcctggagatggggttcaccgagatgccgactgataacttcattgagagctccttctggaactttgacgccctcttccagccccagcagcacccagcccgtgaccagcacgacaccttcttccttcgagatccagcggaggccctgcagctcccaatggactatgtccagcgggtcaagcggacccactctcagggcggctacggctcacaggggtacaagtataactggaagctggacgaggcccggaaaaacctactgcgaacccacaccacatcagccagcgcccgtgcgctctaccgccttgcccagaagaagcccttcactccggtcaagtacttctccatcgaccgcgtattccggaatgagaccctggacgccacgcacctggctgagttccaccagatcgagggcgtggtggcggatcatggtctcaccttgggccacctcatgggcgttctgcgggagttcttcaccaagctgggtatcacgcaactccgcttcaagccagcctacaacccatacacagagcccagcatggaggtgttcagctaccaccaaggcctgaagaagtgggtggaggtcggaaactcgggggtcttccgtccagagatgctgctgcccatggggcttcccgagaacgtgtcggtcattgcctggggcctctccctggagcgcccaacgatgatcaaatatggcatcaacaatatccgggagctggtgggccacaaggtgaacctgcagatggtgtatgacagtcccctgtgccgcctggatgccgagccgaggccccctcccacacaggaggctgcgtgacatgggccactctaggacaggtcatcctccccgagtccctgctgctgcgctcctttgcatccctggccagtgaccttgtatttatgaggctctgtgaggccagcccccaccttcctctttcccacctgtcccaggaccagaatcccagggacagaggactgggtagcaggttccttctgttgtcctgtgtggtgtgtctactgtgagggtgggccctgaggagacctgtgggccacctattgtctaataaagtgggcagttgccccca

SEQ ID NO: 1130 - protein, 508 aa, Homo sapien
MADGQVAELLLRRLEASDGGLDSAELAAELGMEHQAVVGAVKSLQALGEVIEAELRSTKHWELTAEGEEIAREGSHEARVFRSIPPEGLAQSELMRLPSGKVGFSKAMSNKWIRVDKSAADGPRVFRVVDSMEDEVQRRLQLVRGGQAEKLGEKERSELRKRKLLAEVTLKTYWVSKGSAFSTSISKQETELSPEMISSGSWRDRPFKPYNFLAHGVLPDSGHLHPLLKVRSQFRQIFLEMGFTEMPTDNFIESSFWNFDALFQPQQHPARDQHDTFFLRDPAEALQLPMDYVQRVKRTHSQGGYGSQGYKYNWKLDEARKNLLRTHTTSASARALYRLAQKKPFTPVKYFSIDRVFRNETLDATHLAEFHQIEGVVADHGLTLGHLMGVLREFFTKLGITQLRFKPAYNPYTEPSMEVFSYHQGLKKWVEVGNSGVFRPEMLLPMGLPENVSVIAWGLSLERPTMIKYGINNIRELVGHKVNLQMVYDSPLCRLDAEPRPPPTQEAA

SEQ ID NO: 1131 - DNA, 1882 bp, Homo sapien
gaattcgggcgtgggcgcgggggcgcggcgtgcggcacgctgcagggctgaagcggcggcggcggtggggactgcacgtagcccggcgctcggcatggctctcctggtgctcggtctggtgagctgtaccttctttctggcagtgaatggtctgtattcctctagtgatgatgtgatcgaattaactccatcaaatttcaaccgagaagttattcagagtgatagtttgtggcttgtagaattctatgctccatggtgtggtcactgtcaaagattaacaccagaatggaagaaagcagcaactgcattaaaagatgttgtcaaagttggtgcagttgatgcagataagcatcattccctaggaggtcagtatggtgttcagggatttcctaccattaagatttttggatccaacaaaaacagaccagaagattaccaaggtggcagaactggtgaagccattgtagatgctgcgctgagtgctctgcgccagctcgtgaaggatcgcctcgggggacggagcggaggatacagttctggaaaacaaggcagaagtgatagttcaagtaagaaggatgtgattgagctgacagacgacagctttgataagaatgttctggacagtgaagatgtttggatggttgagttctatgctccttggtgtggacactgcaaaaacctagagccagagtgggctgccgcagcttcagaagtaaaagagcagacgaaaggaaaagtgaaactggcagctgtggatgctacagtcaatcaggttctggcctcccgatacgggattagaggatttcctacaatcaagatatttcagaaaggcgagtctcctgtggattatgacggtgggcggacaagatccgacatcgtgtcccgggcccttgatttgttttctgataacgccccacctcctgagctgcttgagattatcaacgaggacattgccaagaggacgtgtgaggagcaccagctctgtgttgtggctgtgctgccccatatccttgatactggagctgcaggcagaaattcttatctggaagttcttctgaagttggcagacaaatacaaaaagaaaatgtgggggtggctgtggacagaagctggagcccagtctgaacttgagaccgcgttggggattggagggtttgggtaccccgccatggccgccatcaatgcacgcaagatgaaatttgctctgctaaaaggctccttcagtgagcaaggcatcaacgagtttctcagggagctctcttttgggcgtggctccacggcacctgtaggaggcggggctttccctaccatcgttgagagagagccttgggacggcagggatggcgagcttcccgtggaggatgacattgacctcagtgatgtggagcttgatgacttagggaaagatgagttgtgagagccacaacagaggcttcagaccattttcttttcttgggagccagtggatttttccagcagtgaagggacattctctactttcttttcttgggagccagtggatttttccagcagtgaagggacattctctacactcagatgactctaccagtggccttttaaccaagaagtagtacttgattggtcatttgaaaacactgcaacagtgaacttttgcatctcaagaaaacattgaaaaattctatgaattgttgtagccggtgaattgagtcgtattctgtcacataatattttgaagaaaacttggctgtcgaaacatttttctctctgactgctgcttgaatgttcttggaggctgtttcttatgtatgggttttttttaatgtgatcccttcatttgaatattaatggctttttccattaaagaataaattggaaaaaagaaaaaaaaaaaaaggaattc

SEQ ID NO: 1132 - protein, 440 aa, Homo sapien
MALLVLGLVSCTFFLAVNGLYSSSDDVIELTPSNFNREVIQSDSLWLVEFYAPWCGHCQRLTPEWKKAATALKDVVKVGAVDADKHHSLGGQYGVQGFPTIKIFGSNKNRPEDYQGGRTGEAIVDAALSALRQLVKDRLGGRSGGYSSGKQGRSDSSSKKDVIELTDDSFDKNVLDSEDVWMVEFYAPWCGHCKNLEPEWAAAASEVKEQTKGKVKLAAVDATVNQVLASRYGIRGFPTIKIFQKGESPVDYDGGRTRSDIVSRALDLFSDNAPPPELLEIINEDIAKRTCEEHQLCVVAVLPHILDTGAAGRNSYLEVLLKLADKYKKKMWGWLWTEAGAQSELETALGIGGFGYPAMAAINARKMKFALLKGSFSEQGINEFLRELSFGRGSTAPVGGGAFPTIVEREPWDGRDGELPVEDDIDLSDVELDDLGKDEL

SEQ ID NO: 1133 - DNA, 1398 bp, Homo sapien
tagatggcaacctccctatctgcccgcaggtcatagaggcgacacgtagcgtcatctgaccctgaagcaaaggcatctccactccaaagttagacaaaatgccaggaatgttcttctctgctaacccaaaggaattgaaaggaaccactcattcacttctagacgacaaaatgcaaaaaaggaggccaaagacttttggaatggatatgaaagcatacctgagatctatgatcccacatctggaatctggaatgaaatcttccaagtccaaggatgtactttctgctgctgaagtaatgcaatggtctcaatctctggaaaaacttcttgccaaccaaactggtcaaaatgtctttggaagtttcctaaagtctgaattcagtgaggagaatattgagttctggctggcttgtgaagactataagaaaacagagtctgatcttttgccctgtaaagcagaagagatatataaagcatttgtgcattcagatgctgctaaacaaatcaatattgacttccgcactcgagaatctacagccaagaagattaaagcaccaacccccacgtgttttgatgaagcacaaaaagtcatatatactcttatggaaaaggactcttatcccaggttcctcaaatcagatatttacttaaatcttctaaatgacctgcaggctaatagcctaaagtgactggtccctggctgaagggaattaacagatagtatcaaggcacgaaggaatgtgccagtatggctccctgggtgaacagcttggccttttttgggtgtcttgacaggccaagaagaacaaatgactcagaatggattaacatgaaagttatccaggcgcagagttgaagaagcataagcaagacaaaaacagagagaccgcagaaggaggaagatactgtggtactgtcataaaaaacagtggagctctgtattagaaagcccctcagaactgggaaggccaggtaactctagttacacagaaactgtgactaaagtctatgaaactgattacaacaggctgtaagaatcaaagtcaactgacatctatgctacatattattatatagtttgtactgagctattgaagtcccattaacttaaagtatatgttttcaaattgccattgctactattgcttgtcggtgtattttattttattgtttttgactttggaagagatgaactgtgtatttaacttaagctattgctcttaaaaccagggatcagaatatatttgtaagttaaatcattggtgctaataataaatgtggattttgtattaaaatatatagaagcaatttctgtttacatgtccttgctacttttaaaaacttgcatttattcctcagattttaaaaataaataaataattcatttaaaaaaaaaaa

SEQ ID NO: 1134 - protein, 196 aa, Homo sapien; identical to SEQ ID NO: 388

SEQ ID NO: 1135 - DNA, 1874 bp, Homo sapien
gaattccggcaggcacaaactcatccatccccagttgattggaagaaacaacgatgactcctgggaagacctcattggtgtcactgctactgctgctgagcctggaggccatagtgaaggcaggaatcacaatcccacgaaatccaggatgcccaaattctgaggacaagaacttcccccggactgtgatggtcaacctgaacatccataaccggaataccaataccaatcccaaaaggtcctcagattactacaaccgatccacctcaccttggaatctccaccgcaatgaggaccctgagagatatccctctgtgatctgggaggcaaagtgccgccacttgggctgcatcaacgctgatgggaacgtggactaccacatgaactctgtccccatccagcaagagatcctggtcctgcgcagggagcctccacactgccccaactccttccggctggagaagatactggtgtccgtgggctgcacctgtgtcaccccgattgtccaccatgtggcctaagagctctggggagcccacactccccaaagcagttagactatggagagccgacccagcccctcaggaaccctcatccttcaaagacagcctcatttcggactaaactcattagagttcttaaggcagtttgtccaattaaagcttcagaggtaacacttggccaagatatgagatctgaattacctttccctctttccaagaaggaaggtttgactgagtaccaatttgcttcttgtttacttttttaagggctttaagttatttatgtatttaatatgccctgagataactttggggtataagattccattttaatgaattacctactttattttgtttgtctttttaaagaagataagattctgggcttgggaattttattatttaaaaggtaaaacctgtatttatttgagctatttaaggatctatttatgtttaagtatttagaaaaaggtgaaaaagcactattatcagttctgcctaggtaaatgtaagatagaattaaatggcagtgcaaaatttctgagtctttacaacatacggatatagtatttcctcctctttgtttttaaaagttataacatggctgaaaagaaagattaaacctactttcatatgtattaatttaaattttgcaatttgttgaggttttacaagagatacagcaagtctaactctctgttccattaaacccttataataaaatccttctgtaataataaagtttcaaaagaaaatgtttatttgttctcattaaatgtattttagcaaactcagctcttccctattgggaagagttatgcaaattctcctataagcaaaacaaagcatgtctttgagtaacaatgacctggaaatacccaaaattccaagttctcgatttcacatgccttcaagactgaacaccgactaaggttttcatactattagccaatgctgtagacagaagcattttgataggaatagagcaaataagataatggccctgaggaatggcatgtcattattaaagatcatatggggaaaatgaaaccctccccaaaatacaagaagttctgggaggagacattgtcttcagactacaatgtccagtttctcccctagactcaggcttcctttggagattaaggcccctcagagatcaacagaccaacatttttctcttcctcaagcaacactcctagggcctggcttctgtctgatcaaggcaccacacaacccagaaaggagctgatggggcagaatgaactttaagtatgagaaaagttcagcccaagtaaaataaaaactcaatcacattcaattccagagtagtttcaagtttcacatcgtaaccattttcgcccggaattc

SEQ ID NO: 1136 - protein, 155 aa, Homo sapien
MTPGKTSLVSLLLLLSLEAIVKAGITIPRNPGCPNSEDKNFPRTVMVNLNIHNRNTNTNPKRSSDYYNRSTSPWNLHRNEDPERYPSVIWEAKCRHLGCINADGNVDYHMNSVPIQQEILVLRREPPHCPNSFRLEKILVSVGCTCVTPIVHHVA

SEQ ID NO: 1137 - DNA, 4396 bp, Homo sapien
ggcacgaggcacgtgggttctgagcgtgtttctacgtccctggaagccggtcatttaagctcattcctcgccacggcttagtcaacatgggtcgctcgggaaagttgccctctggtgtctcagctaagttgaagcgctggaagaaaggccacagcagcgacagcaaccccgccatctgccgccaccgtcaggccgcccgcagccgcttcttcagccggccgtcaggaaggagtgacctgacagtcgatgctgtgaagttacataatgagctgcagtcagggtccttgcgcttgggcaaaagcgaagccccggagacgcccatggaagaagaggcggagctggttctcaccgagaagtcctcgggtaccttcctgagtggcctttccgactgcacaaacgtcaccttcagcaaagtacagcgcttctgggagtccaactcggctgcccacaaggagatctgtgctgttctggctgctgtcactgaggtgattcgctcccagggagggaaggagacggagactgagtacttcgctgctctgatgacaacaatggaagcagtggagtccccggagtccctggccgccgttgcttacctgctgaaccttgtcctgaagcgtgttcccagccctgtgcttattaagaagttctctgatacctccaaagccttcatggatatcatgtcagctcaggccagcagcggctccacctctgtcctccgatgggtcctttcctgcctggccacccttctgcggaagcaagacctggaggcctggggctaccccgtgacccttcaggtgtaccatgggctgctgagcttcacggtgcatcccaagcccaagatccggaaggctgcccagcatggagtatgctcagtcctcaagggcagtgaattcatgtttgaaaaggcccctgcccatcatcctgctgccatttccactgccaagttctgcatccaggagattgagaagtctggaggctccaaggaggccaccaccacgctgcacatgctgacgctgctgaaggacctgctgccctgcttcccggaaggcctggtgaagagctgcagtgagactctcctcagggtcatgaccttgagccatgtgctggtgacagcctgtgccatgcaggcctttcacagcctcttccacgccaggcctggcctgagcaccctgtcagcagagctcaacgcccagatcatcacggccctgtacgactatgttcccagtgagaatgatttacaacccctgctagcctggcttaaggtcatggagaaagcccacatcaacctggtgaggttgcagtgggacctggggctaggccacctccctcgcttttttggaactgcggtgacctgcctcctttccccacactcgcaagtgctgactgctgctacgcagagcctcaaggagatcctgaaggaatgcgtggctccccacatggctgacattggctccgtgacctcctcggcctcaggccctgcccaatctgttgccaagatgttcagggcagtggaggagggcctgacgtacaaattccatgcggcctggagctccgtgttgcagctgctgtgtgtcttcttcgaggcgtgtgggagacaggcccaccctgtgatgaggaagtgcctccagtccctgtgtgacctgcgcctctcccctcatttcccccacacggcggctcttgaccaggcagtgggggctgcggtgaccagtatgggacctgaggtggtgctgcaggctgtgcctttggaaattgatggctctgaggagactctggatttcccacggagctggctgctgcctgtcatccgagaccatgttcaggaaacgcgacttggttttttcaccacctacttcttgcccctggctaacaccctgaagagcaaagccatggacctggctcaggcaggcagcacagtggaatctaagatctacgacacactccagtggcagatgtggacactcctgcctgggttctgcacaaggcctacagatgtggccatctccttcaaagggctggcacggacgctgggcatggccatcagcgagcgtccagacctgagggtcaccgtgtgccaggccctgcgcaccctcatcaccaagggctgccaggcagaggctgaccgtgctgaagtgagtcgctttgccaagaactttctgccgatcctcttcaacctgtatgggcagcccgtggcagccggggacactccagcccctcgccgggctgtgctggaaaccatcagaacttacctcaccatcactgacactcagttggtgaacagtctcctggaaaaagccagtgagaaggtgctcgaccctgccagctctgactttaccagattgtctgtcctggacctggtcgtggccttggctccgtgtgctgacgaagctgccatcagtaagctatactccaccatccggccctacctagagagcaaggcccacggggtgcagaagaaggcctaccgagtgctggaggaggtgtgtgccagtcctcagggccccggggccctcttcgtgcagagccacctggaggacctgaagaagacactgctggactcgctgcggagcacctcctcacccgccaagaggccccgtttgaagtgcctcctacacatcgtgaggaagctctcagctgaacacaaggagttcatcactgccctcatcccagaggtgatcctgtgcaccaaggaggtgtcggtgggcgcacggaagaacgcttttgcactgctcgtggagatgggccatgctttcctaaggtttggctcgaaccaggaagaggccctgcagtgctacctcgtcctgatctaccctggcctggtgggcgcggtgaccatggtcagctgcagcatcctggccctgacccacctccttttcgagtttaaaggtctgatggggaccagtacagtggagcagctgctggagaatgtgtgcctgcttctggcctcccgcacccgtgacgtggtcaagtctgcactgggcttcatcaaggtggcagtgactgtcatggacgtggcgcacctggccaaacatgtgcagctggtgatggaagccattgggaagctttcagatgacatgcggcggcacttccgcatgaagcttcggaacctgttcaccaagttcatccgcaagtttggatttgagctggtgaaaaggctgttgcccgaggagtaccacagagtcctggtcaacatccggaaagctgaggcccgggccaagaggcaccgagccctgagccaggctgccgtggaggaggaagaagaggaggaggaggaggaggagcccgcccagggcaaaggtgacagcattgaggagattttagctgactcagaggacgaggaggacaatgaggaggaggaaagaagccgaggcaaggagcagcggaagctggcacgacagaggagccgggcatggctgaaagagggcggtggggacgagcccctcaacttcctggatcccaaggtggcccaacgagtcctggccacgcagccagggccaggccggggcaggaagaaggaccacagcttcaaggtgagcgccgatggccggctgatcataagggaggaggcagacggcaacaagatggaggaagaggaaggtgccaaaggcgaagatgaagagatggctgacccaatggaagatgtgatcatcaggaataaaaagcaccagaagctcaagcaccagaaagaggctgaggaggaggagctggagataccccctcagtaccaagctggaggctctggcattcatcgccctgtggccaagaaggctatgcctggggctgaatacaaggccaagaaagcaaaaggtgatgtgaagaagaaaggccggccggatccctatgcctacatccccctcaacagaagcaagctcaaccgcaggaagaagatgaagctgcagggacagttcaaaggcctggtgaaggctgcccggcgaggttcccaggtgggacacaaaaaccgcagaaaggatcgtcgaccctgaggcccagggcccctgggctgccctgtggtccagtctgaggccctttcagcccccaggctgccttgccaccagctccaggtgctcaagattctggcagagcctggactcaggatgacttggaactagggcttggctctcagaagtcctggattttggaaactccaaatggaatcacccttcagagacatccctggtgcctggagatgggaatgtggcctcagtgcctctgagtaggtgccatgaggcacctttgctttctgcccagagtggccatgagcaccagaacagatgatctccatttccgccagctgcctgtagccacgtggcatcctgcctgtggtctgggtgagatttactgtgaccagatgtagaataaatgtgtctcatcctgcaaaaaaaaaaaaaaaaaaaaaaaa

SEQ ID NO: 1138 - protein, 1297 aa, Homo sapien
MGRSGKLPSGVSAKLKRWKKGHSSDSNPAICRHRQAARSRFFSRPSGRSDLTVDAVKLHNELQSGSLRLGKSEAPETPMEEEAELVLTEKSSGTFLSGLSDCTNVTFSKVQRFWESNSAAHKEICAVLAAVTEVIRSQGGKETETEYFAALMTTMEAVESPESLAAVAYLLNLVLKRVPSPVLIKKFSDTSKAFMDIMSAQASSGSTSVLRWVLSCLATLLRKQDLEAWGYPVTLQVYHGLLSFTVHPKPKIRKAAQHGVCSVLKGSEFMFEKAPAHHPAAISTAKFCIQEIEKSGGSKEATTTLHMLTLLKDLLPCFPEGLVKSCSETLLRVMTLSHVLVTACAMQAFHSLFHARPGLSTLSAELNAQIITALYDYVPSENDLQPLLAWLKVMEKAHINLVRLQWDLGLGHLPRFFGTAVTCLLSPHSQVLTAATQSLKEILKECVAPHMADIGSVTSSASGPAQSVAKMFRAVEEGLTYKFHAAWSSVLQLLCVFFEACGRQAHPVMRKCLQSLCDLRLSPHFPHTAALDQAVGAAVTSMGPEVVLQAVPLEIDGSEETLDFPRSWLLPVIRDHVQETRLGFFTTYFLPLANTLKSKAMDLAQAGSTVESKIYDTLQWQMWTLLPGFCTRPTDVAISFKGLARTLGMAISERPDLRVTVCQALRTLITKGCQAEADRAEVSRFAKNFLPILFNLYGQPVAAGDTPAPRRAVLETIRTYLTITDTQLVNSLLEKASEKVLDPASSDFTRLSVLDLVVALAPCADEAAISKLYSTIRPYLESKAHGVQKKAYRVLEEVCASPQGPGALFVQSHLEDLKKTLLDSLRSTSSPAKRPRLKCLLHIVRKLSAEHKEFITALIPEVILCTKEVSVGARKNAFALLVEMGHAFLRFGSNQEEALQCYLVLIYPGLVGAVTMVSCSILALTHLLFEFKGLMGTSTVEQLLENVCLLLASRTRDVVKSALGFIKVAVTVMDVAHLAKHVQLVMEAIGKLSDDMRRHFRMKLRNLFTKFIRKFGFELVKRLLPEEYHRVLVNIRKAEARAKRHRALSQAAVEEEEEEEEEEEPAQGKGDSIEEILADSEDEEDNEEEERSRGKEQRKLARQRSRAWLKEGGGDEPLNFLDPKVAQRVLATQPGPGRGRKKDHSFKVSADGRLIIREEADGNKMEEEEGAKGEDEEMADPMEDVIIRNKKHQKLKHQKEAEEEELEIPPQYQAGGSGIHRPVAKKAMPGAEYKAKKAKGDVKKKGRPDPYAYIPLNRSKLNRRKKMKLQGQFKGLVKAARRGSQVGHKNRRKDRRP

SEQ ID NO: 1139 - DNA, 786 bp, Homo sapien
gataaacaacttgatgcagatgtttcccccaagcccactatttttcttccttcgattgctgaaacaaaactccagaaggctggaacatacctttgtcttcttgagaaatttttcccagatattattaagatacattggcaagaaaagaagagcaacacgattctgggatcccaaagacaattggtcaaaagatgcaaatgatacactactgctgcagctcacaaacacctctgcatattacatgtacctcctcctgctcctcaagagtgtggtctattttgccatcatcacctgctgtctgcttggaagaacggctttctgctgcaatggagagaaatcataacagacggtggcacaaggaggccatcttttcctcatcggttattgtccctagaagcgtcttctgaggatctagttgggctttctttctgggtttgggccatttcagttctcatgtgtgtactattctatctattgtataatggttttcaaaccagtgggcacacagagaacctcactctgtaataacaatgaggaatagccatggcgatctccagcaccaatctctccatgttttccacagctcctccagccaacccaaatagcgcctgctatagtgtagacagcctgcggcttctagccttgtccctctcttagtgttctttaatcagataactgcctggaagcctttcattttacacgccctgaagcagtcttctttgctagttgaattatgtggtgtgtttttccgtaataagcaaaataaatttaaaaaaatgaaaagtt

SEQ ID NO: 1140 - DNA, 1876 bp, Homo sapien
caaggctgaacgtccaggtcacctccacgcccgtgatcgtgatgcgcggggctgctggcctgcagcgggagatccaggagggtgcctactccgggagctgctaccatcgagatggcttacggctgagtatacagtttgaggtgaggcgggtggagctccagggccccacacctctgttctgctgctggctggtgaaagacctcctccacagccaacgcgactcagccgccaggacccgcctgttccttgccagcctgcccggctccacccactctaccgctgctgagctcaccggacccagcctggtggaagtgctcagagccagaccctggtttgaggagccccccaaggctgtggaactggaggggttggcggcctgtgagggcgagtactcccaaaagtacagtaccatgagcccgctgggcagtggggccttcggcttcgtgtggactgctgtggacaaggaaaaaaacaaggaggtggtggtgaagtttattaagaaggagaaggtcttggaggattgttggattgaggatcccaaacttgggaaagttactttagagatcgcaattctatccagggtggagcacgccaatatcatcaaggtattggatatatttgaaaaccaagggttcttccagcttgtgatggagaagcacggctccggcctagacctcttcgctttcatcgaccgccaccccaggctggatgagcccctggcgagctacatcttccgacaactagtgtcagcagtgggatacctgcgcttgaaggacatcatccaccgtgacttcaaggatgagaacatcgtgatcgccgaggacttcacaatcaagctgatagactttggctcggccgcctacttggaaaggggaaaattattttatactttttgtgggaccatcgagtactgtgcaccggaagttctcatggggaatccctacagagggccggagctggagatgtggtctctgggagtcactctgtacacgctggtctttgaggagaaccccttctgtgagctggaggagaccgtggaggctgccatacacccgccatacctggtgtccaaagaactcatgagccttgtgtctgggctgctgcagccagtccctgagagacgcaccaccttggagaagctggtgacagacccgtgggtaacacagcctgtgaatcttgctgactatacatgggaagaggtgtttcgagtaaacaagccagaaagtggagttctgtccgctgcgagcctggagatggggaacaggagcctgagtgatgtggcccaggctcaggagctttgtgggggccccgttccaggcgaggctcctaatggccaaggctgtttgcatcccggggatccccgtctgctgaccagctaaacaccaatttcttcctgcttttctccacttggtttggaaaatcacacagttttcaggctccatctgtttggagaaaatacattctgaagcatccccaattcaccttctaaaaactcatgtgcaggtttgataaacaccagaacagaagacagtgatgctgtattattttagatttattacatagatttggaattcacttttttcatgacctagaaaaaaacattccagtgttcaactgttttatattattaaagggcttttaatttgtgaacttctgaaggcatgagtgttttctctttctacttttgtatatgtgcatgttttgtttcctctgacttggtatatgctcatctgagtgacggatatgtgaaatttgtagaactggttagtcaaatggccagactatttcattaatttatttcctcaaatgcttttcaaattaaagcacctttgttagtaaacagttaaaaaaaaaaaaaaaaaaaaaaaaaaaaaaa

SEQ ID NO: 1141 - DNA, 1054 bp, Homo sapien
gaattccgcgggaggccacgggctttccacagcgcgggggaacgggaggctgcaggatggtcaagctgacggcggagctgatcgagcaggcggcgcagtacaccaacgcggtgcgcgaccgggagctggacctccgggggtataaaattcccgtcattgaaaatctaggtgctacgttagaccagtttgatgctattgatttttctgacaatgagatcaggaaactggatggttttcctttgttgagaagactgaaaacattgttagtgaacaacaacagaatatgccgtataggtgagggacttgatcaggctctgccctgtctgacagaactcattctcaccaataatagtctcgtggaactgggtgatctggaccctctggcatctctcaaatcgctgacttacctaagtatcctaagaaatccggtaaccaataagaagcattacagattgtatgtgatttataaagttccgcaagtcagagtactggatttccagaaagtgaaactaaaagagcgtcaggaagcagagaaaatgttcaagggcaaacggggtgcacagcttgcaaaggatattgccaggagaagcaaaacttttaatccaggtgctggtttgccaactgacaaaaagagaggtgggccatctccaggggatgtagaagcaatcaagaatgccatagcaaatgcttcaactctggctgaagtggagaggctgaaggggttgctgcagtctggtcagatccctggcagagaacgcagatcagggcccactgatgatggtgaagaagagatggaagaagacacagtcacaaacgggtcctgagcagtgaggcagatgtataataataggccctcttggaacaagtcttgcttttcgaacatggtataatagccttgtttgtgttagcaaagtggaatctatcagcattgttgaaatgcttaagactgctgctgataattttgtaatataagttttgaaatctaaatgtcaattttctacaaattataaaaataaactccactctctatgctaaaaaaaaaaaaaaggaattc

SEQ ID NO: 1142 - protein, 255 aa, Homo sapien
MVKLTAELIEQAAQYTNAVRDRELDLRGYKIPVIENLGATLDQFDAIDFSDNEIRKLDGFPLLRRLKTLLVNNNRICRIGEGLDQALPCLTELILTNNSLVELGDLDPLASLKSLTYLSILRNPVTNKKHYRLYVIYKVPQVRVLDFQKVKLKERQEAEKMFKGKRGAQLAKDIARRSKTFNPGAGLPTDKKRGGPSPGDVEAIKNAIANASTLAEVERLKGLLQSGQIPGRERRSGPTDDGEEEMEEDTVTNGS

SEQ ID NO: 1143 - DNA, 7984 bp, Homo sapien
cggcccggcggtaggcggtggcgactctgcccgctcccgtttcggcgcggtgaccgagcgcccgggaggctcgaggaccgcatcgtgtgccgttgcgccaagcccggtcctgcgccgccatggccccagtgcagctggagaaccaccagctggtcccgcccggaggcggcggcgggggcagcggcggacccccgtcagccccagcccctcctcccccgggagccgccgtggcggcggccgctgcagctgcggctagcccgggctaccggctgagcaccctcattgaatttctgctgcaccgggcctactcggagcttatggtgttgacggacctactgccaaggaaatctgatgtggaaaggaaaatagaaatagtgcagtttgctagccggacacgccaactcttcgttcgattattagctttagtgaaatgggctaataatgctggcaaagtggaaaaatgtgcgatgatttcaagctttttagatcagcaagccatcctgtttgtggacactgctgatcgcctggcctcgttagctagagatgctctggtccatgcacgcctgcctagttttgccatcccatatgccattgatgtactaactactggatcttacccacggctgccaacctgcattagggataaaattattcctccagacccaattaccaaaattgaaaaacaagccacactccatcagctgaatcagattcttagacatcggcttgtaaccacagatcttcctcctcagttagcaaatcttacagttgcaaatggccgggtgaagtttcgtgttgaaggagaatttgaagccaccttgactgtgatgggagatgaccctgatgttccatggcgtcttctcaagctagaaattctagttgaggataaggaaacaggagatgggcgagctttggttcatagcatgcaaatcagcttcatccatcaactggtgcagtctaggctctttgctgatgagaaacctcttcaggatatgtacaactgcctacattctttctgtttatcacttcagttagaagtgttacattcccaaactctaatgttaatccgagaacggtggggagaccttgtgcaggtggaaaggtatcatgctggaaagtgcctctccctttcagtttggaatcaacaggttcttgggagaaaaactggaacagcatctgttcacaaagttacaattaaaattgatgagaatgatgtctccaagcctttacagatttttcacgatcctcctttgccagcttctgattccaaattagtagaaagagccatgaagatcgaccacttatcaatagaaaaactcctgattgacagtgtccatgcaagagctcatcagaagctccaagaactgaaggccattcttagaggcttcaatgccaatgaaaactcttccatagagactgcactcccagctcttgttgttcccatcttggagccctgtggtaattcagagtgtctgcacatttttgtagatttacattctggaatgtttcaattgatgctttatggacttgaccaggccactctggatgacatggagaagtctgtgaatgatgatatgaaacgaatcataccctggattcagcaacttaagttttggcttggacaacagcgttgcaagcagtctataaaacatctgcctacgataagcagtgaaacattgcagctttccaattactcaactcatcctattggaaacctttctaagaataaactgttcattaaacttacccgccttccacaatactacattgttgtggagatgttggaggttcccaataaacccacacaactgtcgtacaagtactactttatgtctgtgaatgctgcagatcgtgaagacagccctgcaatggcattgctgctgcagcagttcaaggaaaacattcaggacttggtttttcgtacaaaaaccgggaaacagaccagaaccaatgccaagcgcaagttgtctgatgatccatgtccagtagaatccaagaaaacaaaacgagcaggagaaatgtgtgccttcaataaagttttagcccacttcgtcgctatgtgtgatacaaatatgccatttgtaggacttcggttggagttgtccaatctggagattccacatcaaggagtgcaagtggaaggtgatggcttcagccatgcaattcgcttattaaaaattcctccctgtaagggtataactgaggaaacccaaaaggctctggaccgctctcttcttgattgcactttccgattacaaggtagaaataaccgcacttgggtagcagagttagtgtttgcaaattgtccacttaatggcacttctactagggagcaaggaccatcccggcacgtttacctgacatatgaaaatctgttgtctgagcctgttggtggtagaaaggtggttgaaatgtttcttaatgactggaatagcattgcacgattatatgagtgtgtgttggaatttgcacgttctctaccagacatacctgctcatctaaatattttctcagaagttcgtgtttataattaccgaaaacttatcttgtgttatggaaccaccaagggaagctcaattagtatccaatggaattcgatccatcaaaaattccacatttctttgggaactgttggcccaaactcaggttgcagtaactgtcacaataccattctccatcagcttcaagaaatgttcaacaaaacaccaaatgtggttcagttattacaggtactgtttgatactcaggctccattaaatgccatcaacaaactccccactgtgccgatgttgggcttgacccagagaaccaatactgcctaccagtgcttctccattctgccacagtcgtccacccacatcagactggccttcaggaacatgtattgcattgatatatactgccggagtcgaggtgttgtggcaatacgggatggtgcctatagtctttttgataacagcaaactagttgaaggtttctatcctgcaccaggactaaagacgttcctgaatatgtttgttgacagcaatcaggatgctcgaagaaggtctgtaaatgaggacgataatcccccttctcctataggaggagatatgatggattctttaatatcgcagctccagccaccaccccagcaacagccatttccaaagcagccaggaacatcaggtgcttatcctcttacttcaccccctacatcttatcatagcacagtcaatcagtctccctcaatgatgcacacacagtctccaggaaatctgcatgctgccagctcccccagtggggctttgagagccccatcaccagcgtcatttgttccaactcctcccccatcctcgcatggaatctcaataggaccaggggccagttttgctagtccacatggaactcttgaccctagttccccatacactatggtgtcaccaagtggacgagcagggaactggccaggatctcctcaagtgtctggcccctcaccagcagcacgcatgcctggaatgtcaccagccaacccctcactacattctccggttccagatgcttctcattcccctcgagctggaacaagttctcaaacaatgccaacaaacatgcctccacctcgtaaactacctcagcgctcttgggcggcatccatacctaccatcctcactcacagtgccttgaacattttactgctgccctctccaactccaggccttgtgcccggcctggcaggtagttacctttgttctccacttgagagattccttggatcagtcatcatgagacgacatcttcaaagaattattcaacaagaaacgctgcagctgataaattctaatgaacccggagtgatcatgtttaagactgatgcactgaaatgcagagtagctcttagtcccaaaaccaaccaaacgcttcagctaaaattgacacctgaaaatgcaggacagtggaaacctgatgaacttcaagttttggagaaattctttgaaacaagagttgcaggaccaccatttaaagctaatacgttaatagccttcaccaagctattaggagctcctacacacatcctcagggattgtgtgcacattatgaagctggagctgttccctgaccaagcaacacagctaaaatggaatgttcagttttgcctgacgatccctcccagcgcgccgccgattgcacctcctgggacgcctgctgtggtgctgaaatccaaaatgctattttttcttcaactaactcagaaaacatcggtccctccccaagaacctgttagtattatagttccaatcatttatgacatggcttcaggtacaacccagcaggcagacattcccagacagcagaactcttctgttgctgctcccatgatggtcagcaacattctgaagaggtttgcagagatgaatccaccacgacaaggtgaatgcacaatatttgcagctgttcgtgatttaatggctaatcttacactgccccctgttgggcgtccatagacactattgtttttaaaccaggaaggctgacagatgagacaacaaaaaaaatctgaattcagccttcagtttaaaaaaggaaaaggactttttttttaaactttaagagctaaatattctaaactggcaaaaattttcagggtgcacttctttcatcaaaatgatcatccatcttttgtataatgaacttgtatagtgtgtttaaatgggacacatttcaaaggaaataaatcagtgtccgtttgccagtaataaatttaatattctgttttatactataaagttatgaaaatgccaaacttgtttatttaattgttttcttatgttttgggtgtaatagtccttttttggtttttgttttgttttttaaggcaggtctgtcatttttgaatactgtaaaactgtgataaactttatattgaagctgtattttaatatgaccgctttgaatccttacatgaaatgttctgggagttgttataaacacaccccaaggaagcaatatttaataaaactaggtcaaaaacaaaacaaaacagtgacactcacttgtgtgtatataaactctagagacatcttaggccctcccttcatctttaacctggtggatggagccagttattaatttataataatacatgtctgaaatttgaccaaaaacatcttctttatgtcaaggttaatatattttcttcagacattcctaacttgactagtggttaacatttagcaccttggttgtctttcaatatataggatttgggtgaaaaataaggaacttagtctttgagaagggacagtatgtggttcgtattgatcaaggatcccaaataatgcaatcattctcatctgttgaggatgtgggaacttttctgtcaggaaaatttagtttacagaatacttctgcatacaacattaattaggaaacaaagaactttaatgctgtacctctgcatgaagtttctgtgagctttctttatcttgcttaacttatcctcctttccttccccaccaaaattgggattgttctaaacaatttcaatttaattcattgtcaacaaaacgatagaatgttttgcttggaagaaacctggtccattcccctcattgtgaagaatcccgaatcctgggcctgtccagggtcaaatggagtttttggtattaatacatctctgcagggtttctttttggagcactgtgctgtctttcctagtcagtcagggacttttttaagcttcaaagaacatggtctgatgcaaaggtcttctaccgacttcatggtatttaggaaaaatttttaagtgataataccatgccgagttacctggtcactgtaatactggttctccattaaaatgtagatgctttgtctaattccacttcaagatgatttaattgagcttctataactatcaactatcaaattctagtttcaagtatctcactgtacctatatcatatctgttctcaactttgtttgattctccactcattttcaatcagagttgaagccttctttgcctttcttctttgtcttatttctgccttcatctcccacttctcacccaactctgccactgttcaggagcagttgactaaacttttatccttcctttaacttaatctttttatccttctgtttttagttcttacagtggtaatcacatcagtttggcaatctaagatgtctttatcaagggtcagcccttttctatttggagctgaatcttttctttcatgtagaaatctacatgtatatacaagaaatgtatttttatctgcaggataatattgtttcaaataattttattaagagttaactttttaggtattttcccttttaatgtggttttgaaatgttaattgcatttttacacatgatgcattcagtggacactcttttttcctaattataactcatctctgaatgcattgtgccaatcaagagtaagataggattcagtgcgcaaaatttgcttttgatgcttattaagagtaaacccatgaatttgaatttttatattatgcttggtacttggaattgatatataccttattaaagcttgaaaacatttagcatttgaatagtaagtttcatcacaaatcatgtcttttgcctcttttgttacccaggttcgatcaaggggactggatgcccaagtgattttctctaataatcgggttgggacttaactttaaggtgttttcaatgtgattttagtatttacagtaataaataaaatttatacaaagtttcagagaactaccaactctctagttaattttgatgaagatgttttcattaatagtctggtttagtattaatttaaccttgaaataagaaattggtcctgatttgccaccttcatttttccatctgctgaaatgccatttcagaatgtataaaagtactttcagaattagaagaaaagtgagagcttcagcagaacgtgtcaagtcgctaataacaggagtcgaaccttatgtttgaaaattaactgagtgagttaagtgcaagcataaactaaaatttatatgactttgaatttaagaaccactaataactgtgttctaattaacacagtaatctgttcagccaaaggatactaacagccattctttggactgtggttaatttgataacttcaagaagttataactttgctaccctggattctgatgcaatttcaatataaaaagttgttcctttcatagtttttccccccaaaagaagtgcctattacattttaccttaatgtttatttatcatccaagtgttcttgatataaaatcagtatacagaaaattttaagagaacttacattcaagggacatagagggaaaatgttaatgtgtatttcattgtttcttgtggaatttttttttcattcggtttgagaatggacagtgtgtctaaggatgtgatttaaatttacttaggatggatttagcattgaggttattaagacaaagttagcagaggccagccagcactgtgctgcacaactccaggaactccatggtatgctcacaattttctgcaagttgcctccacttccaagtggccagtgatttgttaaaataccttgcccaagaatataactgattgatgaaagggcatatttaggtcaatataaaataatagcaagtatttactgagagcttactgtgtgctaggcattttcttaatatttcaatgtgtatttaatcctcacaacaacccaatgtggtaggttattgatatcctcttcttaaaaatgagtaaatggaggcccagagaaatgtaatttgcctgagatcaaattaaggttgcttaagatcaaactgctaagaaggggcagtttgagtctgagctagtgctcctaaacactggacatttttgctgtgaaccacagtcgggaaggtttaatgtttagactctttcctcagaggcttttaactacacacaattttgacatgttttccaagctcagaaagctcattaaaaacaactaaaactg

SEQ ID NO: 1144 - protein, 1454 aa, Homo sapien [sequence omitted]

SEQ ID NO: 1145 - DNA, 5932 bp, Homo sapien
ggggcactgaggagcggcgcccgcggggcagcgaggagcccgatgcagggttctgcgcgtcatttccggtcccgcgggcgccccgtgaagcccacctggatccgccagcgctgtgccactccccagtgccgagctccgagctgtctccgcggcctcgcgcccggcccctccaccgcgcacctcttaggccccgcccgccagcgtccctttgttgtgaaggcgccggggcctagcgctatgcctgcggcggagactgcatcaggctctcgcgtctgcttctgcgctttgcctgggagaggccctggtggcctcgttcctggcgcccggagtccctgctgcggccccacccccgggcggtcacggtgacccatgctgcccagcctggaggtaaaatcgttcgtggctgtggcttcagcatgtcgtcctcggtgaaaaccccagcactggaagagctggttcctggctccgaagagaagccgaaaggcaggtcgcctctcagctggggctctctgtttggtcaccgaagtgagaagattgtttttgccaagagcgacggcggcacagatgagaacgtactgaccgtcaccatcacggagaccacggtcatcgagtcagacttgggtgtgtggagctcgcgggcgctgctctacctcacgctgtggttcttcttcagcttctgcacgctcttcctcaacaagtacatcctgtccctgctgggaggcgagcccagcatgctaggtgcggtgcagatgctgtccaccacggttatcgggtgtgtgaaaaccctcgttccttgctgtttgtatcagcacaaggcccggctttcctacccacccaacttccttatgacgatgctgtttgtgggtctgatgaggtttgcaactgtggttttgggtttggtcagcctgaaaaatgtggcggtttcgtttgctgagacggtgaagagctccgcccccatcttcacggtgatcatgtctcggatgattctgggggagtacacagggctgctggtcaacctctccctcatcccagtcatgggcgggctggcgctgtgcacggccactgagatcagcttcaatgtcctggggttctcggccgcactgtccaccaacatcatggactgtttgcaaaatgttttttcaaaaaagctgctcagcggggacaaatacaggttctcggccccggagctgcagttctacaccagcgccgctgcggtggccatgctcgtcccggcccgggttttctttacggacgtcccagtgatcgggaggagcgggaagagcttcagctacaaccaggacgtggtgctgctgcttctgacagacggagtcctgttccaccttcagagcgtcacggcgtacgccctcatggggaaaatctccccggtgactttcagcgtcgccagcaccgtgaaacatgccttgtccatctggctcagcgtaatcgttttcggcaacaagatcaccagcttgtcggccgttggcacagccctggtgaccgttggggtcctgctctacaacaaagccaggcaacaccagcaggaggcgctgcagagcctggctgcagccactggccgggccccagacgacacagtggagccgctgcttccacaggaccccaggcagcatccctgagagcaggaagctgccagctgctgctgtcctcgtgacactgcatcccccagaaatgggcagggacgccctcctccatggccctgctggggtgcaggacatggggagctaagttggccattgcctgcggctttctcggtttgtcggtgaagaccagcagaaactcaaactggggattccaggtatcagcttcctggagtagacaccagaccagtagctgactgtgtccgccgagcccatccccgtgtaatgtgaaaacagcctctgaggctcccatgctgggggtgcccacttcctctctgggcgacaccccagggtccaccgggagccagaggtgggtccagtgccaacgagagccgctccctgccacagccaagagagccctcggcttcccacaccagccatcgaaggccctgaggccctggaccggcggcagactggccctgggcatgaggccacagagcagggccgaagggaggggacagagggccctggaaggaagggtctcctgctgccacggtgggcactcagaacttctccccacctgacccagggctgtgggcatcctcagactatcccagaggcatcgcaagcctcaagctgcagcattgcacggcactcaagggctatgaccacggaggccgttcagtcgcttctgtttagaggaaggccccctacctcttccacaccctgccctcctatcccttccacaccctgggctgcatgagctccccgcaaccccagggcaccctgccctcctacctgtgggggtttccagccctgaggttgaggacaaacctctcgtgtttaacttgggaggagatgtgtacgttccttttcttttttggactctgagtatgaggcaggctgttctgaggtccccgtggggtgagcctgtctgtcctccctcagagcccaccgttcctatcatcatctagcacctgtccggttccccacgtgagccttgggcaggacgctgcagtgttgatggtttgggttacgtggcgtttacctgggcgccgtccttgctgaaaaaggaaacgtccacactgaatgtttctggggcgcgtggtgtgtgtcaggcgcccaccctgtcccactctccccaagggacagtagtacggcacactggggccaccagccagctcaactcatcctcctgtgtcacgcacccccgagggcgcaggaggcctgaggagtggctactggagccgtgtgttaggcagaggcttctgaccatgtctgagctctttacccccaatctcgcaaccggcggattcccatgcccggtgcagcctgttgccagccagcctttgagacccagagctccagggcttgtcagaggcagcatggggctccagtggtcccgagtctcatttccctgcctgctctttaggcctttggcacccatggtcacttcactggttttccatttggcttctcacctgggaaatacaaaaatagcccctcctgaagataaaatcgttcagaaacagagcaataattctgactcattaacttctacctactcaaaaaagtctgccatgatgatggaccgaagtgaggctttttaacccacaagtaacctttttatttttttgagacggtcttgctctgtcacccaggctggagtgcagtggcatgatcttggctcgctgcagcctcgacttcctgggctcaagtgatccacctcagcctcccatgtggctggaaccgcaggcacgtgccaccatgcctggctatttttttgttgagctgggctctcgctttgttgcccaggctggtcttgaactcctcggctcaagcaatccttcccactcagcctcctgtagtgtcgagaatataggcgtgggctactacacctgcttcagccgcttctataaaaccgctgacctgtgtgtggaggacaggccaggtgtgtgctcactgcgctgcgaagatgttttgtcacgtgactttccctgggtttccatttctttttttctgctttcctcaaaaactaatagaagaccggctgcggtagctcaggcctctagtcccagcactttgggaggctgcagatggcggatcacaaggccaggagttcgagaccagcctggccaacatgatgaaaccctgtctctaccaaaaatacaaaaattagctgggtgtgatggtgggtgcctgtggtctcagctactcaggaggctgaggcaggagaattgtttgagccccagaggcggaggttgcagtgagccaagatcgtgccattgcactccagcctgggcaacagggcaagattccgtctcaaaaacaaacactattagaaaatgctctggaggtggcggggagttgttgatttgtgaggacagattgaaagcaactcccagggtggccttgtccacctccccatcgagaatatggctgccggcctctttgaagattgtggtctggcataaggagaggtgcaggcgcctggttctgagcaccttggaatttccagccgcacagcatctggtgccctcccctccaccctcacaaggagctgccatcctgtttggattttctgtttgtggaccagaaacaaacgtttttccaaaggattagcaaataggttgatttcctgtgtaacgctgctctggggcctcttcctcatcctggcagaaggagcctggagcccatgaggcagccagcactgtgcccttgctcagtcgtgctgtcccctccctctccctcagtctcttctccatgcccaagtcagtttccagccgctggtcttcatggcattcccagcacagctggacaccaagaggcaaaacccaaggcctggcttggccgtgttaacgattgtacagacatttttttaaataactttgtgtaatacttttctagaatagtaagttcttgttgaactgtcacagatgagcttctaggaacacaccgggtgtggttacttccactgggtgtgtccatggtcgtggtctgtgcctttgtaaacaaacagaacacttgaaccaccttccgaattgggtcatcggcttctttacattgatacttagagatttgcagctctctaactttcaaggaaacttcccctactgaaaggcataaaaaggttaaaaaagaaaatccgagagtcccaattccctgtataacagcattaaaataatctgcctgcctggaaagatgagaacactgttgcacaacccaaaatgtgtttttaatttgtgaaaaattaccatggtgagtcagacagtcattttaaacagctgaacagagactatcatcagcaaatagagctcagctttgtagctgcctttaaaatccttgtcccaaatccggtgagctctgcttgctgccgccgcgctcctgggtgatcactcagacgggtcagtgggaataacgggccaacaagacagctttttacatgtgtccaaaggatggcctttcgaaggcctggaagtatttcactgttggaagaagtaaacaagaatgacattccagatggaaatagaattctctctcttgcctttgaccaacatggtactaaggggtttcttctttcccaatgtatgtacgtgccctgctgggggccttactttatagaatgagagcatccgagcttccctaatgaatctggctagttctgtgtctggctgaggatacaggagtgggacatccactctcggatccctcagagcacagaaaccttcagctttgctgtctctgaagtatttcctccagtttccctgcgggcccctatgtttgagtttgatggctgctggatcctcactcaacgaaaactcggttggaaactgttccgcctggcagtccttttttgttgttttccatctcatttcccttccatctgaaagtggcattcagctgacttgctcatttagactgttcacggagtctgaatctgccaacgtggtgttggaggctccaccttgaaaagggccacagtcagggcaactttccccatacaggaaaacttgaaaattacatcaacagtctacgtcacagccaaattatatttcctttataccaaacaaaactatggagaactaaaagtacatcacacaaaacgtttatagtgttttgcatgtgacctatttcagtatttatataactagattagtgctttctagcaaacggttctgttaattagcgagtcactgttgattctgctgtggtggtaagttgataccgtgtaactaatcccgtggatgcctcctcgttatttttgtccaaacgaagcagccgtggtagtagctgtctatgattcttgctcagcaaagtaaaataaatgttaaatatgg

SEQ ID NO: 1146 - protein, 466 aa, Homo sapien
RYACGGDCIRLSRLLLRFAWERPWWPRSWRPESLLRPHPRAVTVTHAAQPGGKIVRGCGFSMSSSVKTPALEELVPGSEEKPKGRSPLSWGSLFGHRSEKIVFAKSDGGTDENVLTVTITETTVIESDLGVWSSRALLYLTLWFFFSFCTLFLNKYILSLLGGEPSMLGAVQMLSTTVIGCVKTLVPCCLYQHKARLSYPPNFLMTMLFVGLMRFATVVLGLVSLKNVAVSFAETVKSSAPIFTVIMSRMILGEYTGLLVNLSLIPVMGGLALCTATEISFNVLGFSAALSTNIMDCLQNVFSKKLLSGDKYRFSAPELQFYTSAAAVAMLVPARVFFTDVPVIGRSGKSFSYNQDVVLLLLTDGVLFHLQSVTAYALMGKISPVTFSVASTVKHALSIWLSVIVFGNKITSLSAVGTALVTVGVLLYNKARQHQQEALQSLAAATGRAPDDTVEPLLPQDPRQHP

SEQ ID NO: 1147 - DNA, 1831 bp, Homo sapien
cccacgcgtccgctttagtgcgctcgccgtcggctctacctgcgtgctttagctccttctcgcctgatccttctgtctctcccaaccccggacacccggcttcgactggttatatcttcggtgttcttttcctctcttcttctttcgcggttcagcatgcaggaaaaagacgcctcctcacaaggtttcctgccacacttccaacatttcgccacgcaggcgatccatgtgggccaggatccagagcaatggacctccagggctgtagtgccccccatctcactgtccaccacgttcaagcaaggggcgcctggccagcactcgggttttgaatatagccgttctggaaatcccactaggaattgccttgaaaaagcagtggcagcactggatggggctaagtactgtttggcctttgcttcaggtttagcagccactgtaactattacccatcttttaaaagcaggagaccaaattatttgtatggatgatgtgtatggaggtacaaacaggtacttcaggcaagtggcatctgaatttggattaaagatttcttttgttgattgttccaaaatcaaattactagaggcagcaattacaccagaaaccaagcttgtttggatcgaaacccccacaaaccccacccagaaggtgattgacattgaaggctgtgcacatattgtccataagcatggagacattattttggtcgtggataacacttttatgtcaccatatttccagcgccctttggctctgggagctgatatttctatgtattctgcaacaaaatacatgaatggccacagtgatgttgtaatgggcctggtgtctgttaattgtgaaagccttcataatagacttcgtttcttgcaaaactctcttggagcagttccatctcctattgattgttacctctgcaatcgaggtctgaagactctacatgtccgaatggaaaagcatttcaaaaacggaatggcagttgcccagttcctggaatctaatccttgggtagaaaaggttatttatcctgggctgccctctcatccacagcatgagttggtgaagcgtcagtgtacaggttgtacagggatggtcaccttttatattaagggcactcttcagcatgctgagattttcctcaagaacctaaagctatttactctggccgagagcttgggaggattcgaaagccttgctgagcttccggcaatcatgactcatgcatcagttcttaagaatgacagagatgtccttggaattagtgacacactgattcgactttctgtgggcttagaggatgaggaagacctactggaagatctagatcaagctttgaaggcagcacaccctccaagtggaagtcacagctagtattccagagctgctattagaagctgcttcctgtgaagatcaaatcttcctgagtaattaaatggaccaacaatgagcctttgcaaaattttcaagcggaaattttaaggcacctcattatctttcataactgtaattttcttagggatcatctctgttaaaaagttttctgtatgtcatgttataattacaggtcaattctgttaatatctttttgttaattttgctctatgtttgcctctgaaggaggtgagatttgtgctactttgggagattatgttcttttttcatgtctaagatttattttgatcatgtttataatataatggtaattcatttttgatgttttgtgaagaatttaaatttaaacgaatgttcttaaatcaagtgtgatttttttgcatatcattgaaaagaacattaaaagcaatggtttacacttaaaaaaaaaaaaaaa

SEQ ID NO: 1148 - protein, 405 aa, Homo sapien
MQEKDASSQGFLPHFQHFATQAIHVGQDPEQWTSRAVVPPISLSTTFKQGAPGQHSGFEYSRSGNPTRNCLEKAVAALDGAKYCLAFASGLAATVTITHLLKAGDQIICMDDVYGGTNRYFRQVASEFGLKISFVDCSKIKLLEAAITPETKLVWIETPTNPTQKVIDIEGCAHIVHKHGDIILVVDNTFMSPYFQRPLALGADISMYSATKYMNGHSDVVMGLVSVNCESLHNRLRFLQNSLGAVPSPIDCYLCNRGLKTLHVRMEKHFKNGMAVAQFLESNPWVEKVIYPGLPSHPQHELVKRQCTGCTGMVTFYIKGTLQHAEIFLKNLKLFTLAESLGGFESLAELPAIMTHASVLKNDRDVLGISDTLIRLSVGLEDEEDLLEDLDQALKAAHPPSGSHS

SEQ ID NO: 1149 - DNA, 2274 bp, Homo sapien
cggctgctgctgccactgctgtgctgggggcccggtcgccaggcaaaaagccctccacgtttgaggggagtcatgagccgtttcctgaatgtgttaagaagttggctggttatggtgtccatcatagccatggggaacacgctgcagagcttccgagaccacacttttctctatgaaaagctctacactggcaagccaaaccttgtgaatggcctccaagctcggacctttgggatctggacgctgctctcatcagtgattcgctgcctctgtgccattgacattcacaacaagacgctctatcacatcacactctggaccttcctccttgccctggggcatttcctctctgagttgtttgtctatggaactgcagctcccacgattggcgtcctggcacccctgatggtggcaagtttctccatcctgggtatgctggtcgggctccggtatctagaagtagaaccagtatccagacagaagaagagaaactgaggccagcattatcacctccaggactttctcgttttccaccttggccatcttcttccttcgtcgtctctcctctttaatttcttttctattccatcatctgcccttttattcacttttagcctctttttttaatttttaaaatttaaagatatgcatactgaaaagtatataacatgtacgtacaatttaaagaataattttaaagtgaatactacgtaactccatccaagtcaagaaattgccagcttctcggaagcccactgtgtctccttcccctacctgcaacctcttccaggctcccttttccagccttcccctttttcccttttattttcatgccttgatttgacttgtgtggtgggaacatgtgaactatgaaacttaaacctgctgcccacccagagcagctgtgaccaagggctgcctcaaggggttgtccacgcaggttgggctcctctctgctgctggacccaagactctgaaccttccaagggacaggcagttcttctaagaagggctcccctgtgtgtgagcaagaccacagctctccttctatctacagatgcatgagggttggaagagtctgggctgtttttagaccttctggtcagctgtatttgtgtaacaacttttgtaataaatagaaaaaccctctgctctgatcagttcttgtactttgacctctgctaagacaagagcatggctgcctcctctgagccctaggagaatcacagctttatgcctgattgaatacaccatagtgagtaggacagctcatgacacaggtcagcctggctgcctccggctccttactgtcatttgctcattcctcttgtattcttgaagtcaaatcttcttttttctcaccttcaagagtctgcgttcacaactaaacactaagtgccctttcttatttcctcctaaagaagaaacagattcttgagagagcagagacaaaaaaatagaactaggcagcatagatgaaacaactgcatgacatgggaagaagacaactaaaccccgaggagaatgcactggaatggacagttgctcttaaaccctacccagagggcctcccccagctggaccctcatacacagtgtgtgtatccaaaaggccattgctatttcagcaaatatttgttgagtacttctccatgccggacacttgggaaagagaaatgaacgacacaggcaatgcccctgccctgtgggccttatattatagtcaaggtaacagaatcaacaagccaacacaaaaataaagaacttcaaatagggataagaactctaacaaacacaaggtattttggtcaagaaggaatgtggggtgggcagtggggaacgtaacttaaattagatcatcagaaagtcctccctgaggagatggatttttttttgtttttttagagacggggtttcactctgtcacccaggctgggaattgcagtggcacaatccctcactgctgcctcaacttcctgggctcaagtgaccctcctgcatcagcttcccaagtagctgggactgcaagtgtgtaccaccacatccagctaacatttttgggggtgggaagagatggggtcttactatgttgtccaggctaagaggtgggatttgagctgagacttgaatgcccaggagttaaatgtcttaagatatggagcaggccgttagaaaggagggagcagcaactggaaggtagaatagtcttattcaaggaataagaactatgtaatcacagcatggtgaagagttaggaagtgaaaaaaaaaaaaaa

SEQ ID NO: 1150 - protein, 140 aa, Homo sapien
MSRFLNVLRSWLVMVSIIAMGNTLQSFRDHTFLYEKLYTGKPNLVNGLQARTFGIWTLLSSVIRCLCAIDIHNKTLYHITLWTFLLALGHFLSELFVYGTAAPTIGVLAPLMVASFSILGMLVGLRYLEVEPVSRQKKRN

SEQ ID NO: 1151 - DNA, 1559 bp, Homo sapien
gcacaggtgcggctccggcttacggcggcgacgcggcggaggcggcgggaggccagaggcgctcaccctcctaggagtccgacggcggcgacaggggcggtggggaattcacaaagctcgtcgagcttacccgggcaccgaggcccgagtaggggatttggatgcgcgggtcccgggtggggtcggggccagagggggtcgctagtgcgggtgttccacggctgatcacgcttcgttggccccaggcggtgggctgccggcagggcagggcgctgtagttgacgggagctgcggggaccccggagacccggacgcccgtcaccgcccccctcccccagtccagcagcgctccgcggggatgcccgtggtctcgacccggtccgtcagcccccggcggcgcagggatccgcgcccggcgcctaaactgccctggtgtcctcttcgttctggcccggggctggcggggggaggtgcagcattaggggcgctgaggtgacacccgagaacttcccagggagagggtgcgcgggggggtggatttccacagtccttcccgcggcccccgcgggggggcggtgttgggagggcacttggggttatcccaggctcgccggtgggggtggggggactcctccctttacttccctccacccccttgcacacccacccccaggcttcccgtgtcccttgttctccctctctccgggttagagataggtgggtggctttgagtgggcggaggacttcagggttttaggggctcccccattctaggtcatgcctcttgctctcttccttggcctgtgttgagtaaggtgtgttcctgtggtggacgaaagtctgtacgatggttggtggcattggtccttaatcctttgggtctgttttaaggtaaagtgctgagagtttgggaagcaaaaatttctatttattggatttcttttggcttttctctcaagaaggaagtggaaaaagagtcttttctttttccctcttcctccatttgcattctttgtgaggtttgtctgccttgtgctttttgtcccggattagtcttgttgaaggatggagattcccaggcgtggagtctatagcttttggcttccattaagtaaaatcgctaacctttttttaagagaaagttaatttttgcctgcagtcattccagaaaaatagtgtacacggactagctgaattaatccacttaaaattgtaacttagttacatatggtagatatgttaactcctatctgatttttttggatgaaactgttgttttgtttttaaataggagatgaagtaatggatttttttccctcccttaaaatggcatagctgagaaagccccggtactactaattgagatgatctgcttaagagtcttcatattctgaactcgaaaggccttttatgttatattattgctcgctttacgcaactccaaattgctttcctatttaaatgaatgttcttctagtaaactggtgttagatttaaagaaatcactcaagcttcaccttggtaaactgaactcagtttaagattaagaaactgatttc

SEQ ID NO: 1152 - protein, 74 aa, Homo sapien [sequence omitted]

SEQ ID NO: 1153 - DNA, 1843 bp, Homo sapien
gcgagatccctaccgcagtagccgcctctgccgccgcggagcttcccgaacctctcagccgcccggagccgctcccggagcccggccgtagaggctgcaatcgcagccgggagcccgcagcccgcgccccgagcccgccgccgcccttcgagggcgccccaggccgcgccatggtgaaggtgacgttcaactccgctctggcccagaaggaggccaagaaggacgagcccaagagcggcgaggaggcgctcatcatcccccccgacgccgtcgcggtggactgcaaggacccagatgatgtggtaccagttggccaaagaagagcctggtgttggtgcatgtgctttggactagcatttatgcttgcaggtgttattctaggaggagcatacttgtacaaatattttgcacttcaaccagatgacgtgtactactgtggaataaagtacatcaaagatgatgtcatcttaaatgagccctctgcagatgccccagctgctctctaccagacaattgaagaaaatattaaaatctttgaagaagaagaagttgaatttatcagtgtgcctgtcccagagtttgcagatagtgatcctgccaacattgttcatgactttaacaagaaacttacagcctatttagatcttaacctggataagtgctatgtgatccctctgaacacttccattgttatgccacccagaaacctactggagttacttattaacatcaaggctggaacctatttgcctcagtcctatctgattcatgagcacatggttattactgatcgcattgaaaacattgatcacctgggtttctttatttatcgactgtgtcatgacaaggaaacttacaaactgcaacgcagagaaactattaaaggtattcagaaacgtgaagccagcaattgtttcgcaattcggcattttgaaaacaaatttgccgtggaaactttaatttgttcttgaacagtcaagaaaaacattattgaggaaaattaatatcacagcataaccccaccctttacattttgtgcagtgattattttttaaagtcttctttcatgtaagtagcaaacagggctttactatcttttcatctcattaattcaattaaaaccattaccttaaaatttttttctttcgaagtgtggtgtcttttatatttgaattagtaactgtatgaagtcatagataatagtacatgtcaccttaggtagtaggaagaattacaatttctttaaatcatttatctggatttttatgttttattagcattttcaagaagacggattatctagagaataatcatatatatgcatacgtaaaaatggaccacagtgacttatttgtagttgttagttgccctgctacctagtttgttagtgcatttgagcacacattttaattttcctctaattaaaatgtgcagtattttcagtgtcaaatatatttaactatttagagaatgatttccacctttatgttttaatatcctaggcatctgctgtaataatattttagaaaatgtttggaatttaagaaataacttgtgttactaatttgtataacccatatctgtgcaatggaatataaatatcacaaagttgtttaactagactgcgtgttgtttttcccgtataataaaaccaaagaatagtttggttcttcaaatcttaagagaatccacataaaagaagaaactattttttaaaaattcacttctatatatacaatgagtaaaatcacagattttttctttaaataaaaataagtcattttaataactaaaccagattctttgtggatactattaaagtaacatttaagcctcaaccttg

SEQ ID NO: 1154 - protein, 266 aa, Homo sapien
MVKVTFNSALAQKEAKKDEPKSGEEALIIPPDAVAVDCKDPDDVVPVGQRRAWCWCMCFGLAFMLAGVILGGAYLYKYFALQPDDVYYCGIKYIKDDVILNEPSADAPAALYQTIEENIKIFEEEEVEFISVPVPEFADSDPANIVHDFNKKLTAYLDLNLDKCYVIPLNTSIVMPPRNLLELLINIKAGTYLPQSYLIHEHMVITDRIENIDHLGFFIYRLCHDKETYKLQRRETIKGIQKREASNCFAIRHFENKFAVETLICS

SEQ ID NO: 1155 - DNA, 4575 bp, Homo sapien
gcgccccgccctttctcggcccccggaggtgacggggtgaaggcgggggaaccgaggtggggagtccgccagagctcccagactgcgagcacgcgagccgccgcagccgtcacccgcgccgcgtcacggctcccgggcccgccctcctctgacccctcccctctctccgtttgcccctctccccctcctccgccgaccgagcagtgacttaagcaacggagcgcggtgaagctcatttttctccttcctcgcagccgcgccagggagctcgcggcgcgcggcccctgtcctccggcccgagatgaatcctgcggcagaagccgagttcaacatcctcctggccaccgactcctacaaggttactcactataaacaatatccacccaacacaagcaaagtttattcctactttgaatgccgtgaaaagaagacagaaaactccaaattaaggaaggtgaaatatgaggaaacagtattttatgggttgcagtacattcttaataagtacttaaaaggtaaagtagtaaccaaagagaaaatccaggaagccaaagatgtctacaaagaacatttccaagatgatgtctttaatgaaaagggatggaactacattcttgagaagtatgatgggcatcttccaatagaaataaaagctgttcctgagggctttgtcattcccagaggaaatgttctcttcacggtggaaaacacagatccagagtgttactggcttacaaattggattgagactattcttgttcagtcctggtatccaatcacagtggccacaaattctagagagcagaagaaaatattggccaaatatttgttagaaacttctggtaacttagatggtctggaatacaagttacatgattttggctacagaggagtctcttcccaagagactgctggcataggagcatctgctcacttggttaacttcaaaggaacagatacagtagcaggacttgctctaattaaaaaatattatggaacgaaagatcctgttccaggctattctgttccagcagcagaacacagtaccataacagcttgggggaaagaccatgaaaaagatgcttttgaacatattgtaacacagttttcatcagtgcctgtatctgtggtcagcgatagctatgacatttataatgcgtgtgagaaaatatggggtgaagatctaagacatttaatagtatcgagaagtacacaggcaccactaataatcagacctgattctggaaaccctcttgacactgtgttaaaggttttggagattttaggtaagaagtttcctgttactgagaactcaaagggttacaagttgctgccaccttatcttagagttattcaaggggatggagtagatattaataccttacaagagattgtagaaggcatgaaacaaaaaatgtggagtattgaaaatattgccttcggttctggtggaggtttgctacagaagttgacaagagatctcttgaattgttccttcaagtgtagctatgttgtaactaatggccttgggattaacgtcttcaaggacccagttgctgatcccaacaaaaggtccaaaaagggccgattatctttacataggacgccagcagggaattttgttacactggaggaaggaaaaggagaccttgaggaatatggtcaggatcttctccatactgtcttcaagaatggcaaggtgacaaaaagctattcatttgatgaaataagaaaaaatgcacagctgaatattgaactggaagcagcacatcattaggctttatgactgggtgtgtgttgtgtgtatgtaatacataatgtttattgtacagatgtgtggggtttgtgttttatgatacattacagccaaattatttgttggtttatggacatactgccctttcattttttttcttttccagtgtttaggtgatctcaaattaggaaatgcatttaaccatgtaaaagatgagtgctaaagtaagctttttagggccctttgccaataggtagtcattcaatctggtattgatcttttcacaaataacagaactgagaaacttttatatataactgatgatcacataaaacagatttgcataaaattaccatgattgctttatgtttatatttaacttgtatttttgtacaaacaagattgtgtaagatatatttgaagtttcagtgatttaacagtctttccaacttttcatgatttttatgagcacagactttcaagaaaatacttgaaaataaattacattgccttttgtccattaatcagcaaataaaacatggccttaacaaagttgtttgtgttattgtacaatttgaaaattatgtcgggacataccctatagaattactaaccttactgccccttgtagaatatgtattaatcattctacattaaagaaaataatggttcttactggaatgtctaggcactgtacagttattatatatcttggttgttgtattgtaccagtgaaatgccaaatttgaaaggcctgtactgcaattttatatgtcagagattgcctgtggctctaatatgcacctcaagattttaaggagataatgtttttagagagaatttctgcttccactatagaatatatacataaatgtaaaatacttacaaaagtggaagtagtgtattttaaagtaattacacttctgaatttatttttcatattctatagttggtatgacttaaatgaattactggagtgggtagtgagtgtacttaaatgtttcaattctgttatattttttattaagtttttaaaaaattaaattggatattaaattgtatggacatcatttattaattttaaactgaatgccctcaataagtaatactgaagcacattcttaaatgaagataaattatctccaatgaaaagcatgacatgtgtttcaatagaagaatcttaagttggctaaattcaaagtgcttgacatcaaaatgttctagagtgattagctactagattctgaatcatacatcacatctgactagagaccagtttctttcgaatgattcttttatgtatgtagatctgttcttctgaggcagcggttggccaactatagcccaaaggccaaatttggacttctttttataaatgcagattgtctatggctgctttcccactactccagcctaaggtaaacagctgcaatagaagccaaatgagaatcgcaaagcccaaaatgtttattaacctgccctttacacaaaatcacacaaaaagtttcctgatctctgttctaagaaaaggagtgtgccttgcatttaaaaggaaatgttggtttctagggaagggaggaggctaaataattgatacggaattttcctcttttgtcttcttttttctcacttaagaatccgatactggaagactgatttagaaaagtttttaacatgacattaaatgtgaaattttaaaaattgaaaagccataaatcatctgttttaaatagttacatgagaaaatgatcactagaataacctaattagaagtgttatcttcattaaatgttttttgtaagtggtattagaaagaatatgtttttcagatggttctttaaacatgtagtgagaacaataagcattattcacttttagtaagtcttctgtaatccatgatataaaataattttaaaatgattttttaatgtatttgagtaaagatgagtagtattaagaaaaacacacatttcttcacaaaatgtgctaaggggcgtgtaaagaatcaaaagaaactattaccaataatagttttgataatcacccataattttgtgtttaaacattgaaattatagtacagacagtattctctgtgttctgtgaatttcagcagcttcagaatagagtttaatttagaaatttgcagtgaaaaaagctatctctttgttcacaaccataaatcaggagatggagattaattctattggctcttagtcacttggaactgattaattctgactttctgtcactaagcacttggtatttggccatctccattctgagcaccaaacggttaacacgaatgtccactagaactctgctgtgtgtcacccttaaatcagtctaaatcttccagacaaaagcaaatggcatttatggatttaagtcattagattttcaactgacattaattaatccctcttgattgattatatcatcaagtatttatatcttaaataggaggtaggatttctgtgttaagactcttatttgtaccctataattaaagtaaaatgttttttatgagtatcccttgttttcccttcttaaattgttatcaaacaatttttataatgaaatctatcttggaaaattagaaagaaaaatggcaaggtatttattgttctgtttgccataatttagaactcacacttaagtattttgtagttttacattcctttttaacccattcagtggagaatgtcagcttttctcccaagttgtatgttaagtctattctaatatgtactcaacatcaagttataaacatgtaataaacatggaaataaagtttagctctattagtgaagtgttaaa

SEQ ID NO: 1156 - protein, 491 aa, Homo sapien [sequence omitted]

SEQ ID NO: 1157 - DNA, 2376 bp, Homo sapien
cgcgcggcccctgtcctccggcccgagatgaatcctgcggcagaagccgagttcaacatcctcctggccaccgactcctacaaggttactcactataaacaatatccacccaacacaagcaaagtttattcctactttgaatgccgtgaaaagaagacagaaaactccaaattaaggaaggtgaaatatgaggaaacagtattttatgggttgcagtacattcttaataagtacttaaaaggtaaagtagtaaccaaagagaaaatccaggaagccaaagatgtctacaaagaacatttccaagatgatgtctttaatgaaaagggatggaactacattcttgagaagtatgatgggcatcttccaatagaaataaaagctgttcctgagggctttgtcattcccagaggaaatgttctcttcacggtggaaaacacagatccagagtgttactggcttacaaattggattgagactattcttgttcagtcctggtatccaatcacagtggccacaaattctagagagcagaagaaaatattggccaaatatttgttagaaacttctggtaacttagatggtctggaatacaagttacatgattttggctacagaggagtctcttcccaagagactgctggcataggagcatctgctcacttggttaacttcaaaggaacagatacagtagcaggacttgctctaattaaaaaatattatggaacgaaagatcctgttccaggctattctgttccagcagcagaacacagtaccataacagcttgggggaaagaccatgaaaaagatgcttttgaacatattgtaacacagttttcatcagtgcctgtatctgtggtcagcgatagctatgacatttataatgcgtgtgagaaaatatggggtgaagatctaagacatttaatagtatcgagaagtacacaggcaccactaataatcagacctgattctggaaaccctcttgacactgtgttaaaggttttggagattttaggtaagaagtttcctgttactgagaactcaaagggttacaagttgctgccaccttatcttagagttattcaaggggatggagtagatattaataccttacaagagattgtagaaggcatgaaacaaaaaatgtggagtattgaaaatattgccttcggttctggtggaggtttgctacagaagttgacaagagatctcttgaattgttccttcaagtgtagctatgttgtaactaatggccttgggattaacgtcttcaaggacccagttgctgatcccaacaaaaggtccaaaaagggccgattatctttacataggacgccagcagggaattttgttacactggaggaaggaaaaggagaccttgaggaatatggtcaggatcttctccatactgtcttcaagaatggcaaggtgacaaaaagctattcatttgatgaaataagaaaaaatgcacagctgaatattgaactggaagcagcacatcattaggctttatgactgggtgtgtgttgtgtgtatgtaatacataatgtttattgtacagatgtgtggggtttgtgttttatgatacattacagccaaattatttgttggtttatggacatactgccctttcattttttttcttttccagtgtttaggtgatctcaaattaggaaatgcatttaaccatgtaaaagatgagtgctaaagtaagctttttagggccctttgccaataggtagtcattcaatctggtattgatcttttcacaaataacagaactgagaaacttttatatataactgatgatcacataaaacagatttgcataaaattaccatgattgctttatgtttatatttaacttgtatttttgtacaaacaagattgtgtaagatatatttgaagtttcagtgatttaacagtctttccaacttttcatgatttttatgagcacagactttcaagaaaatacttgaaaataaattacattgccttttgtccattaatcagcaaataaaacatggccttaacaaagttgtttgtgttattgtacaatttgaaaattatgtcgggacataccctatagaattactaaccttactgccccttgtagaatatgtattaatcattctacattaaagaaaataatggttcttactggaatgtctaggcactgtacagttattatatatcttggttgttgtattgtaccagtgaaatgccaaatttgaaaggcctgtactgcaattttatatgtcagagattgcctgtggctctaatatgcacctcaagattttaaggagataatgtttttagagagaatttctgcttccactatagaatatatacataaatgtaaaatacttacaaaagtgg

SEQ ID NO: 1158 - protein, 491 aa, Homo sapien [sequence omitted]

SEQ ID NO: 1159 - DNA, 704 bp, Homo sapien
tgcagcggtggtcggctgttgggtgtggagtttcccagcgcccctcgggtccgaccctttgagcgttctgctccggcgccagcctacctcgctcctcggcgccatgaccacaaccaccaccttcaagggagtcgaccccaacagcaggaatagctcccgagttttgcggcctccaggtggtggatccaatttttcattaggttttgatgaaccaacagaacaacctgtgaggaagaacaaaatggcctctaatatctttgggacacctgaagaaaatcaagcttcttgggccaagtcagcaggtgccaagtctagtggtggcagggaagacttggagtcatctggactgcagagaaggaactcctctgaagcaagctccggagacttcttagatctgaagggagaaggtgatattcatgaaaatgtggacacagacttgccaggcagcctggggcagagtgaagagaagcccgtgcctgctgcgcctgtgcccagcccggtggccccggccccagtgccatccagaagaaatccccctggcggcaagtccagcctcgtcttgggttagctctgactgtcctgaacgctgtcgttctgtctgtttcctccatgcttgagaactgcacaacttgagcctgactgtacatcttcttggatttgtttcattaaaaagaagcactttatgtaaaaaaaaaaaaaaaaaa

SEQ ID NO: 1160 - protein, 154 aa, Homo sapien
MTTTTTFKGVDPNSRNSSRVLRPPGGGSNFSLGFDEPTEQPVRKNKMASNIFGTPEENQASWAKSAGAKSSGGREDLESSGLQRRNSSEASSGDFLDLKGEGDIHENVDTDLPGSLGQSEEKPVPAAPVPSPVAPAPVPSRRNPPGGKSSLVLG

SEQ ID NO: 1161 - DNA, 1352 bp, Homo sapien
ggggggaaacggaagtgagcggcggggtcgactgacggtaacggggcagagaggctgttcgcagagctgcggaagatgaatgccagaggacttggatctgagctaaaggacagtattccagttactgaactttcagcaagtggaccttttgaaagtcatgatcttcttcggaaaggtttttcttgtgtgaaaaatgaacttttgcctagtcatccccttgaattatcagaaaaaaatttccagctcaaccaagataaaatgaatttttccacactgagaaacattcagggtctatttgctccgctaaaattacagatggaattcaaggcagtgcagcaggttcagcgtcttccatttctttcaagctcaaatctttcactggatgttttgaggggtaatgatgagactattggatttgaggatattcttaatgatccatcacaaagcgaagtcatgggagagccacacttgatggtggaatataaacttggtttactgtaatagtgtgctgttcatggaaaccgagggctgcatcttgtttatagtcatctttgtactgtaatttgatgtacacaacattaaaagtactgacacctgagaatttctgctcaagtagtatcagtgatcatttaaaatttggaggggtctttggtttacagccatgtgacaattaaaagcactaaagggagatcatgttaaagctcttaatttatattaaaacagtagcctttgtctttaaaaaagttgttgctcatgaatattataaaatgatctacaggtttcaattcaacctgtttctaggtttttttgtaaatttagttttgattaagcattataagcatttgagtctataaactttatagtagcatctttcagaataaacatttttaattgatttcagtggcaactctcaaattgattacaatatgagatatatcagtgtcgtccattaacactcataagaataatatttactgtgtcagtgctattttaggattatagttattgtttgattatttcaggttgaaaagtagaagttccaaggttttgattttggtctggtctttaagtgaaaaattaaagcaaccagtagatgtaggttaaacttttacttcatagacttaatatgtgattaatatattgccaagcaacactgttaaagaaaagtaaaactcattttttcttgttcttaatttatatattacaagatactgtaaggtattctttatgaagttgatatataaaaatttacatttttagaacattagtgaatggatcatcttttacaattaaaagtatattttgattatcagtttcttagcaaaaaaaaaaaaaaaaaaaaaaaaaaaaaa

SEQ ID NO: 1162 - protein, 141 aa, Homo sapien
MNARGLGSELKDSIPVTELSASGPFESHDLLRKGFSCVKNELLPSHPLELSEKNFQLNQDKMNFSTLRNIQGLFAPLKLQMEFKAVQQVQRLPFLSSSNLSLDVLRGNDETIGFEDILNDPSQSEVMGEPHLMVEYKLGLL

SEQ ID NO: 1163 - DNA, 2183 bp, Homo sapien
ccagggcctgactaaacctggagactcgggtggccgaggggcttcataccagctgaagagcgacaagccgctggcagccgcggatctcaccgccgctcagggtttttagaacttcagccataaaaatgggcagaattttccttgatcatatcggtggtacccgtctgttttcttgtgcaaactgtgatacgatcctgaccaaccgctcagaactcatctccactcgtttcacaggcgccactggcagagcatttctttttaacaaggtagttaacctgcagtacagcgaagttcaagatcgggtcatgctcactggccgccacatggttcgagatgtgagctgcaaaaactgcaatagcaaactgggatggatctatgagtttgccactgaagacagccagcgatataaggaaggccgcgtgatcctggaacgtgctctagttcgagagagtgagggctttgaggagcatgtaccatctgataactcttgaagatacagagagaaatccatcttttcccaggtctccttcactgaaaacaaaaatctacttacatacactgtcaccttagcatcagagtcggattaatgaactgcggaacaagaggttgtgagaatctaagatggaacctttctttctttctttctttttttttaaattttgtattttccatccaacagcagtgtgtagagagaatattatgcagatgccgttaattttttaccctatgtttacatcttgaggcagcagagtctgtctgcagctatgtggtgagctatgtaaggaaaaaaatctgggctgttagagtgaaaaagtgtgttttatgtcaattgtgaaaggaaaatgttaggagtatggtttttaaacttgggcttcattttaaacttttttttttaaacccagttatttcacttgatttgctagcttcagagaagagatccgaatctgtgcccagcgctaaaggctcagtgttagcatggcttgtgctggccggtgtgccatattcttgttggagatgaaccgtagcaccagagcccattcttccttgtcagtcttggcccaaagatgtcaccattcctagttatttgtcaccacataattggtgttgattggaaactttttctgagatgggacagaactgctgggttgtctttttccatgtaacttaagcatagtaatataaataaagtaatagttggatgcttttggtcctgtgttgcttttaaaaacaccttataaaagaggagagtatttgataagcaattttcatagtagtaaagttttttttcatctcttaaactaaattgaccatgcatataatattctttgtttaaatgaaagcatactgttgaaacccgcagtgttgcatttagaaaacagttgaacagaatgtcaatgtgcattcatgcaaaaaaacatttaatctgcatctgttttagaaaagggggaaatgaagcaacttgtctaaaaatactgctttacaaagcatttcagcctttccccctcagttttgcattgattttttgacaagtctgtagagcctaatagtttccatcaaaggcctagatctcttatttagcatttttttcagctcttctctcagaagttcagctgttgaaacgaaaactgtactttgtaccctcacatacaaagggatcaaatttgacctggtgttattttagccccaaatttatgacattacacaatattaaaatgtaaatgtttctttacccaaactacttctagatattctagtatttgcttctggtggaattaaatgacggtaaaattggctaattatttgaatgaatgaatggatggatgttttgcatgctcaatttctaggtcctttgtctagaaaggaaatttgcctcagttgaattagtgaaatatttctgtcgttgatattaaaagtgacttctgagtacagttaagttcctcctatttgccactgggctgttggttagaagcataggtaactgattaagtaggtatgatactgcatttgaaataagtggacacaaactatcctttctccaccatggactcaatctgagaacaacagcattcatttccattcatttccatactggcttttgattatatgcagattcctagtagcatgccttacctacagcactatgtgcatttgctgtcacaataaagtatattttgtcttgcaaa

SEQ ID NO: 1164 - protein, 121 aa, Homo sapien
MGRIFLDHIGGTRLFSCANCDTILTNRSELISTRFTGATGRAFLFNKVVNLQYSEVQDRVMLTGRHMVRDVSCKNCNSKLGWIYEFATEDSQRYKEGRVILERALVRESEGFEEHVPSDNS

SEQ ID NO: 1165 - DNA, 2413 bp, Homo sapien
gcgactcgtcccgccttctggggcactagtttgactttgtgattggctactagtatcaaggaatcccggcgtggacagcgcgaggagaaagatggcggcgatggcggtcgggggtgctggtgggagccgcgtgtccagcgggagggacctgaattgcgtccccgaaatagctgacacactaggggctgtggccaagcaggggtttgatttcctctgcatgcctgtcttccatccgcgtttcaagagggagttcattcaggaacctgctaagaatcggcccggtccccagacacgatcagacctactgctgtcaggaagggactggaatacgctaattgtgggaaagctttctccatggattcgtccagactcaaaagtggagaagattcgcaggaactccgaggcggccatgttacaggagctgaattttggtgcatatttgggtcttccagctttcctgctgccccttaatcaggaagataacaccaacctggccagagttttgaccaaccacatccacactggccatcactcttccatgttctggatgcgggtacccttggtggcaccagaggacctgagagatgatataattgagaatgcaccaactacacacacagaggagtacagtggggaggagaaaacgtggatgtggtggcacaacttccggactttgtgtgactatagtaagaggattgcagtggctcttgaaattggggctgacctcccatctaatcatgtcattgatcgctggcttggggagcccatcaaagcagccattctccccactagcattttcctgaccaataagaagggatttcctgttctttctaagatgcaccagaggctcatcttccggctcctcaagttggaggtgcagttcatcatcacaggcaccaaccaccactcagagaaggagttctgctcctacctccaatacctggaatacttaagccagaaccgtcctccacctaatgcctatgaactctttgccaagggctatgaagactatctgcagtccccgcttcagccactgatggacaatctggaatctcagacatatgaagtgtttgaaaaggaccccatcaaatactctcagtaccagcaggccatctataaatgtctgctagaccgagtaccagaagaggagaaggataccaatgtccaggtactgatggtgctgggagcaggacggggacccctggtgaacgcttccctgcgggcagccaagcaggccgaccggcggataaagctgtatgctgtggagaaaaacccaaatgccgtggtgacgctagagaactggcagtttgaagaatggggaagccaagtgaccgtagtctcatcagacatgagggaatgggtggctccagagaaagcagacatcattgtcagtgagcttctgggctcatttgctgacaatgaattgtcgcctgagtgcctggatggagcccagcacttcctaaaagatgatggtgtgagcatccccggggagtacacttcctttctggctcccatctcttcctccaagctgtacaatgaggtccgagcctgtagggagaaggaccgtgaccctgaggcccagtttgagatgccttatgtggtacggctgcacaacttccaccagctctctgcaccccagccctgtttcaccttcagccatcccaacagagatcctatgattgacaacaaccgctattgcaccttggaatttcctgtggaggtgaacacagtactacatggctttgccggctactttgagactgtgctttatcaggacatcactctgagtatccgtccagagactcactctcctgggatgttctcatggtttcccatcctcttccctattaagcagcccataacggtacgtgaaggccaaaccatctgtgtgcgtttctggcgatgcagcaattccaagaaggtgtggtatgagtgggctgtgacagcaccagtctgttctgctattcataaccccacaggccgctcatataccattggcctctagccctgcgtgccaagtgtccagagccttggaagcagcttcaggttcctgctcctgtagtacagaaggtgcagtacatctatgggctgtgattcccccttgcccatcagagaggagcatttcaatctgctttcctgccttacatcaaggtgggcaagggattataattaattgcagggctcaagccaccaatctatgaagacctcaggccagggggtgaggaattagtgctggatttgaagctacgcactcagcctcaagaactccctggaatatccctgagaacatggggtttgaacggattttcagcctttttctgttcttgttttgatggttttgtgtaagaggaaataccaataaagttatagccctttactgccaaaaaaaaaaaaaaaaaaaaaaaaaaaaaaa

SEQ ID NO: 1166 - protein, 637 aa, Homo sapien
MAAMAVGGAGGSRVSSGRDLNCVPEIADTLGAVAKQGFDFLCMPVFHPRFKREFIQEPAKNRPGPQTRSDLLLSGRDWNTLIVGKLSPWIRPDSKVEKIRRNSEAAMLQELNFGAYLGLPAFLLPLNQEDNTNLARVLTNHIHTGHHSSMFWMRVPLVAPEDLRDDIIENAPTTHTEEYSGEEKTWMWWHNFRTLCDYSKRIAVALEIGADLPSNHVIDRWLGEPIKAAILPTSIFLTNKKGFPVLSKMHQRLIFRLLKLEVQFIITGTNHHSEKEFCSYLQYLEYLSQNRPPPNAYELFAKGYEDYLQSPLQPLMDNLESQTYEVFEKDPIKYSQYQQAIYKCLLDRVPEEEKDTNVQVLMVLGAGRGPLVNASLRAAKQADRRIKLYAVEKNPNAVVTLENWQFEEWGSQVTVVSSDMREWVAPEKADIIVSELLGSFADNELSPECLDGAQHFLKDDGVSIPGEYTSFLAPISSSKLYNEVRACREKDRDPEAQFEMPYVVRLHNFHQLSAPQPCFTFSHPNRDPMIDNNRYCTLEFPVEVNTVLHGFAGYFETVLYQDITLSIRPETHSPGMFSWFPILFPIKQPITVREGQTICVRFWRCSNSKKVWYEWAVTAPVCSAIHNPTGRSYTIGL

SEQ ID NO: 1167 - DNA, 1833 bp, Homo sapien
ggcacgagtgggagtacaggactcgcctcctcagggttccctgtgctgccacttttcagccatggccacaagtgaacagagtatctgccaagcccgggcttccgtgatggtctacgatgacaccagtaagaaatgggtaccaatcaaacctggccagcagggattcagccggatcaacatctaccacaacactgccagcaacaccttcagagtcgttggagtcaagttgcaggatcagcaggttgtgatcaattattcaatcgtgaaagggctgaagtacaatcaggccacgccaaccttccaccagtggcgagatgcccgccaggtctacggcttaaactttgcaagtaaagaagaggcaaccacgttctccaatgcaatgctgtttgccctgaacatcatgaattcccaagaaggaggcccctccagccagcgtcaggtgcagaatggcccctctcctgatgagatggacatccagagaagacaagtgatggagcagcaccagcagcagcgtcaggaatctctagaaagaagaacctcggccacagggcccatcctcccaccaggacatccttcatctgcagccagcgcccccgtctcatgtagtgggcctccaccgccccccccacccccagtcccacctccacccactggggctaccccacctcccccacccccactgccagccggaggagcccaggggtccagccacgacgagagctccatgtcaggactggccgctgccatagctggggccaagctgagaagagtccaacggccagaagacgcatctggaggctccagtcccagtgggacctcaaagtccgatgccaaccgggcaagcagcgggggtggcggaggaggcctcatggaggaaatgaacaaactgctggccaagaggagaaaagcagcctcccagtcagacaagccagccgagaagaaggaagatgaaagccaaatggaagatcctagtacctccccctctccggggacccgagcagccagccagccacctaactcctcagaggctggccggaagccctgggagcggagcaactcggtggagaagcctgtgtcctcgattctgtccagaaccccgtctgtggcaaagagccccgaagctaagagcccccttcagtcgcagcctcactctaggatgaagcctgctgggagcgtgaatgacatggccctggatgccttcgacttggaccggatgaagcaggagatcctagaggaggtggtgagagagctccacaaggtgaaggaggagatcatcgacgccatcaggcaggagctgagtgggatcagcaccacgtaaggggccggcctcgctgcgctgattcgtcgagcccatccggcgacagaggacagccagaagcccagccagccccagactccagtgcaccagagcacgcacaggagcctgggcgcgctgctgtgaaacgtcctgacctgtgatcacacatgacagtgaggaaaccaagtgcaactcctgggtttttttagattctgcctgacacggaacaccaggtctgctcgtcttttttgtgttttatatttgcttatttaaggtacatttctttgggtttctagagacgcccctaagtcacctgcttcattagacggtttccaggttttctcccaggtgacgctgttagcgcctcagctggcggtgacagccggcccagcgtggcgccaccacacaccgcagagctgtccaggcacagctccgtccccagcgctcatggtgttgaaactgtctgtcatgcaccacggtgtctgtgtccacacagtaataaacggtttactgtccgcaaaaaaaaaaaaaaaaaa

SEQ ID NO: 1168 - protein, 418 aa, Homo sapien
MATSEQSICQARASVMVYDDTSKKWVPIKPGQQGFSRINIYHNTASNTFRVVGVKLQDQQVVINYSIVKGLKYNQATPTFHQWRDARQVYGLNFASKEEATTFSNAMLFALNIMNSQEGGPSSQRQVQNGPSPDEMDIQRRQVMEQHQQQRQESLERRTSATGPILPPGHPSSAASAPVSCSGPPPPPPPPVPPPPTGATPPPPPPLPAGGAQGSSHDESSMSGLAAAIAGAKLRRVQRPEDASGGSSPSGTSKSDANRASSGGGGGGLMEEMNKLLAKRRKAASQSDKPAEKKEDESQMEDPSTSPSPGTRAASQPPNSSEAGRKPWERSNSVEKPVSSILSRTPSVAKSPEAKSPLQSQPHSRMKPAGSVNDMALDAFDLDRMKQEILEEVVRELHKVKEEIIDAIRQELSGISTT

SEQ ID NO: 1169 - DNA, 1282 bp, Homo sapien
gggctctctccttgtcagtcggcgccgcgtgcgggctggtggctctgtggcagcggcggcggcaggactccggcactatgagcggcttcagcaccgaggagcgcgccgcgcccttctccctggagtaccgagtcttcctcaaaaatgagaaaggacaatatatatctccatttcatgatattccaatttatgcagataaggatgtgtttcacatggtagttgaagtaccacgctggtctaatgcaaaaatggagattgctacaaaggaccctttaaaccctattaaacaagatgtgaaaaaaggaaaacttcgctatgttgcgaatttgttcccgtataaaggatatatctggaactatggtgccatccctcagacttgggaagacccagggcacaatgataaacatactggctgttgtggtgacaatgacccaattgatgtgtgtgaaattggaagcaaggtatgtgcaagaggtgaaataattggcgtgaaagttctaggcatattggctatgattgacgaaggggaaaccgactggaaagtcattgccattaatgtggatgatcctgatgcagccaattataatgatatcaatgatgtcaaacggctgaaacctggctacttagaagctactgtggactggtttagaaggtataaggttcctgatggaaaaccagaaaatgagtttgcgtttaatgcagaatttaaagataaggactttgccattgatattattaaaagcactcatgaccattggaaagcattagtgactaagaaaacgaatggaaaaggaatcagttgcatgaatacaactttgtctgagagccccttcaagtgtgatcctgatgctgccagagccattgtggatgctttaccaccaccctgtgaatctgcctgcacagtaccaacagacgtggataagtggttccatcaccagaaaaactaatgagatttctctggaatacaagctgatattgctacatcgtgttcatctggatgtattagaagtaaaagtagtagcttttcaaagctttaaatttgtagaactcatctaactaaagtaaattctgctgtgactaatccaatatactcagaatgttatccatctaaagcatttttcatatctcaactaagataacttttagcacatgcttaaatatcaaagcagttgtcatttggaagtcacttgtgaatagatgtgcaaggggagcacatattggatgtatatgttaccatatgttaggaaataaaattattttgctgaaaaaaaaaaaaaaaaaa

SEQ ID NO: 1170 - protein, 289 aa, Homo sapien
MSGFSTEERAAPFSLEYRVFLKNEKGQYISPFHDIPIYADKDVFHMVVEVPRWSNAKMEIATKDPLNPIKQDVKKGKLRYVANLFPYKGYIWNYGAIPQTWEDPGHNDKHTGCCGDNDPIDVCEIGSKVCARGEIIGVKVLGILAMIDEGETDWKVIAINVDDPDAANYNDINDVKRLKPGYLEATVDWFRRYKVPDGKPENEFAFNAEFKDKDFAIDIIKSTHDHWKALVTKKTNGKGISCMNTTLSESPFKCDPDAARAIVDALPPPCESACTVPTDVDKWFHHQKN

SEQ ID NO: 1171 - DNA, 2059 bp, Homo sapien
gcggccgccaagcgatccctgctccgcgcgacactgcgtgcccgcgcacgcagagaggcggtgacgcactttacggcggcacgtaagtgcgtgacgctcgtcagtggcttcagttcacasgtggcgccmgsasgmrggttgctgtgtttgtgcttccttctacagccaatatgaaaaggcctaagttaaagaaagcaagtaaacgcatgacctgccataagcggtataaaatccaaaaaaaggttcgagaacatcatcgaaaattaagaaaggaggctaaaaagcagggtcacaagaagcctaggaaagacccaggagttccaaacagtgctccctttaaggaggctcttcttagggaagctgagctaaggaaacagaggcttgaagaactaaaacagcagcagaaacttgacaggcagaaggaactagaaaagaaaagaaaacttgaaactaatcctgatattaagccatcaaatgtggaacctatggaaaaggagtttgggctttgcaaaactgagaacaaagccaagtcgggcaaacagaattcaaagaagctgtactgccaagaacttaaaaaggtgattgaagcctccgatgttgtcctagaggtgttggatgccagagatcctcttggttgcagatgtcctcaggtagaagaggccattgtccagagtggacagaaaaagctggtacttatattaaataaatcagatctggtaccaaaggagaatttggagagctggctaaattatttgaagaaagaattgccaacagtggtgttcagagcctcaacaaaaccaaaggataaagggaagataaccaagcgtgtgaaggcaaagaagaatgctgctccattcagaagtgaagtctgctttgggaaagagggcctttggaaacttcttggaggttttcaggaaacttgcagcaaagccattcgggttggagtaattggtttcccaaatgtggggaaaagcagcattatcaatagcttaaaacaagaacagatgtgtaatgttggtgtatccatggggcttacaaggagcatgcaagttgtccccttggacaaacagatcacaatcatagatagtccgagcttcatcgtatctccacttaattcctcctctgcgcttgctctgcgaagtccagcaagtattgaagtagtaaaaccgatggaggctgccagtgccatcctttcccaggctgatgctcgacaggtagtactgaaatatactgtcccaggctacaggaattctctggaattttttactatgcttgctcagagaagaggtatgcaccaaaaaggtggaatcccaaatgttgaaggtgctgccaaactgctgtggtctgagtggacaggtgcctcattagcttactattgccatccccctacatcttggactcctcctccatattttaatgagagtattgtggtagacatgaaaagcggcttcaatctggaagaactggaaaagaacaatgcacagagcataagagccatcaagggccctcatttggccaatagcatccttttccagtcttccggtctgacaaatggaataatagaagaaaaggacatacatgaagaattgccaaaacggaaagaaaggaagcaggaggagagggaggatgacaaagacagtgaccaggaaactgttgatgaagaagttgatgaaaacagctcaggcatgtttgctgcagaagagacaggggaggcacttctgaggagactacagcaggtgaacagtctacaaggtcttttatcttggataaaatcattgaagaggatgatgcttatgacttcagtacagattatgtgtaacagaacaatggctttttatgatttttttttttaacattttaagcagactgctaaactgttctctgtataagttatggtatgcatgagctgtgtaaattttgtgaatatgtattatattaaaaccaggcaacttggaatccctaaattctgtaaaaagacaattcatctcattgtgagtggaagtagttatctggaataaaaaaagaagatacctattgaaaaaaaaaaaaaaaaaaaaaa

SEQ ID NO: 1172 - protein, 560 aa, Homo sapien
MKRPKLKKASKRMTCHKRYKIQKKVREHHRKLRKEAKKQGHKKPRKDPGVPNSAPFKEALLREAELRKQRLEELKQQQKLDRQKELEKKRKLETNPDIKPSNVEPMEKEFGLCKTENKAKSGKQNSKKLYCQELKKVIEASDVVLEVLDARDPLGCRCPQVEEAIVQSGQKKLVLILNKSDLVPKENLESWLNYLKKELPTVVFRASTKPKDKGKITKRVKAKKNAAPFRSEVCFGKEGLWKLLGGFQETCSKAIRVGVIGFPNVGKSSIINSLKQEQMCNVGVSMGLTRSMQVVPLDKQITIIDSPSFIVSPLNSSSALALRSPASIEVVKPMEAASAILSQADARQVVLKYTVPGYRNSLEFFTMLAQRRGMHQKGGIPNVEGAAKLLWSEWTGASLAYYCHPPTSWTPPPYFNESIVVDMKSGFNLEELEKNNAQSIRAIKGPHLANSILFQSSGLTNGIIEEKDIHEELPKRKERKQEEREDDKDSDQETVDEEVDENSSGMFAAEETGEALLRRLQQVNSLQGLLSWIKSLKRMMLMTSVQIMCNRTMAFYDFFF

SEQ ID NO: 1173 - DNA, 1167 bp, Homo sapien
agccggattgaaacaagatggcgggttcgtggtgagaagccgtcaaggagtagaaattggtatgcttagaagcagattctaaaagcagtttctcttcagaacatcttttttcataccacttgataagcatcttgaaacaccatggctgtagctgcagtaaaatgggtgatgtcaaagagaactatcttgaaacatttatttccagtccaaaatggagctttatattgtgtttgtcataaatctacgtattctcctctaccagatgactataattgcaacgtagagcttgctctgacttctgatggcaggacaatagtatgctaccacccttctgtggacattccatatgaacacacaaaacctatccctcggccagatcctgtgcataataatgaagaaacacatgatcaagtgctgaaaaccagattggaagaaaaagttgaacaccttgaggaaggacctatgatagaacaacttagcaaaatgttctttactactaagcaccgttggtatcctcatggacggtatcacagatgtcgtaagaatctgaatcctccaaaagacagatgatgcggaggttcctgggggaatcaaagagaaatgtgcctcatttgccatttgagaaaatgcagtctggtgtattcagtaatatatagtaaagtaataatgataaaatatcttttcatatattagaatgtgtacttttatataaagtaattctggatttgacattctcatttagagaaacctattttcttttttctttttctattttagtgtttcatttatgtgcggtctccaatttaggacttttccatagtgccaaagccatacatattcagtagaacatcaataaattcatcagaaattcaaacactttattataaaacgggcttcgtgttagataattttgctaaacagtaggctactgtaagtgttctgagcatatttaagcaggctagcattttcaatttacaatattttcaactgatagtaggtttattgggatgtaaccctatgataagttgagaaacatctctttttgtgtgtctactgtgatttaagtatttttaatcatcagccaagcattgttagtagtataaatatgattaataaaaatgtgcatggctttcctacaaaaaaaaaaaaaaaaaaaaaaaaaaaaaa

SEQ ID NO: 1174 - protein, 142 aa, Homo sapien
MAVAAVKWVMSKRTILKHLFPVQNGALYCVCHKSTYSPLPDDYNCNVELALTSDGRTIVCYHPSVDIPYEHTKPIPRPDPVHNNEETHDQVLKTRLEEKVEHLEEGPMIEQLSKMFFTTKHRWYPHGRYHRCRKNLNPPKDR

SEQ ID NO: 1175 - DNA, 1278 bp, Homo sapien
acaggggaaataccgcggcgccggtagttgctgtggtttccgttctgagctcgcagcttaggagctgaagatcgcggacttagcgttgccgcgtccgagtccggccatcagtggctgcagatccggagccaggagctcaaccacccttcttcggaacagggccggcctgctgctgtgccctcgacgctcggtgcctgtatctactccggggcctaggtcggctccgggggcggcttaggagaaggccgccggcgagatgttcaaaaacacgttccagagcggcttcctctccatcctctacagcatcggcagcaagcctctgcaaatctgggacaaaaaggtacggaatggccacatcaaaagaatcactgataatgacatccagtccctggtgctagagattgaagggacaaatgtaagcaccacatatatcacatgccctgcagaccccaagaagacgctgggaattaaacttcctttccttgtcatgattatcaaaaacctgaagaagtattttaccttcgaagtgcaggtactagatgacaagaatgtgcgtcgtcgctttcgggcaagtaactaccagagcaccacccgggtcaaacccttcatctgcaccatgcccatgcggctggatgacggctggaaccagattcagttcaacttgctagacttcacacggcgagcatacggcaccaattacatcgagaccctcagagtgcagatccatgcaaattgtcgcatccgacgggtttacttctcagacagactctactcagaagatgagctgccggcagagttcaaactgtatctcccagttcagaacaaggcaaagcaataactggaattgtgactcgagggatagacccctggatgtgactcttctttttaaaaggaaactatgtggaggacgatgcaaaaacatatttatcttagtttgctctgctgtagttctgttatttatacttggtgttgcttgtcatggacaccggtgaacatgccgtaactctgtgactgcattgtaagtgcagtgggggtaagcagtcctgtgagtggcgcatgaacgctggagcttattccgccgcctgccccagtgtggggggagatacctttaccatgaacttacagaattaaagatggcccataaggaattccagaccaatatttcttcctgcggtttattctatgttttatatattatctaaatatatgtatatgctgtgtcatactcataatctggaaatgaataaagtgatatattcctggtttgtaaaaaaaaaa

SEQ ID NO: 1176 - protein, 193 aa, Homo sapien
MFKNTFQSGFLSILYSIGSKPLQIWDKKVRNGHIKRITDNDIQSLVLEIEGTNVSTTYITCPADPKKTLGIKLPFLVMIIKNLKKYFTFEVQVLDDKNVRRRFRASNYQSTTRVKPFICTMPMRLDDGWNQIQFNLLDFTRRAYGTNYIETLRVQIHANCRIRRVYFSDRLYSEDELPAEFKLYLPVQNKAKQ

SEQ ID NO: 1177 - DNA, 891 bp, Homo sapien
accccatcccccactcctataccggtcctccattttggtgcctgcaaagctctgggaaagaatcccgggaaacgaaaaatggtgggtttgggggaagggaggtaaggggagaaagctggagggaggggctttaattggaggccccgtagaggacgcgcggaacttctaaggtgggaaaaaacgaaattaaaaaatcctttgatatcagggctctgaatcctgctggtcagagcaccaagcattcagtctctctccttgcctttgtcttacttgtgttcaaagaaaaacaaccagaaaaaaaaaatctcatcatggcaaatattcaccaggaaaacgaagagatggagcagcctatgcagaatggagaggaagaccgccctttgggaggaggtgaaggccaccagcctgcaggaaatcgacggggacaggctcgccgacttgcccctaattttcgatgggccatacccaataggcagatcaatgatgggatgggtggagatggagatgatatggaaatattcatggaggagatgagagaaatcagaagaaaacttagggagctgcagttgaggaattgtctgcgtatccttatgggggagctctctaatcaccatgaccatcatgatgaattttgccttatgccttgactcctgccatttatcatgagattaatactgtgattcccgctgttttctttttccttgcattttcctaatatgcctttactgatccgtttgctgtgaaccctatgttatttccatgtgtcaagtgggtcttgtgttgccagcttctatttgaagattgcctttgcactcagtgtaagtttctgtcagcagtagtttcacccatttgcatggaaaaatttaaagctaataaagcaatttaaaaagc

SEQ ID NO: 1178 - protein, 111 aa, Homo sapien
MANIHQENEEMEQPMQNGEEDRPLGGGEGHQPAGNRRGQARRLAPNFRWAIPNRQINDGMGGDGDDMEIFMEEMREIRRKLRELQLRNCLRILMGELSNHHDHHDEFCLMP

SEQ ID NO: 1179 - DNA, 848 bp, Homo sapien
gacatggagctgttcctcgcgggccgccgggtgctggtcaccggggcaggcaaaggtatagggcgcggcacggtccaggcgctgcacgcgacgggcgcgcgggtggtggctgtgagccggactcaggcggatcttgacagccttgtccgcgagtgcccggggatagaacccgtgtgcgtggacctgggtgactgggaggccaccgagcgggcgctgggcagcgtgggccccgtggacctgctggtgaacaacgccgctgtcgccctgctgcagcccttcctggaggtcaccaaggaggcctttgacagatcctttgaggtgaacctgcgtgcggtcatccaggtgtcgcagattgtggccaggggcttaatagcccggggagtcccaggggccatcgtgaatgtctccagccagtgctcccagcgggcagtaactaaccatagcgtctactgctccaccaagggtgccctggacatgctgaccaaggtgatggccctagagctcgggccccacaagatccgagtgaatgcagtaaaccccacagtggtgatgacgtccatgggccaggccacctggagtgacccccacaaggccaagactatgctgaaccgaatcccacttggcaagtttgctgaggtagagcacgtggtgaacgccatcctctttctgctgagtgaccgaagtggcatgaccacgggttccactttgccggtggaagggggcttctgggcctgctgagctccctccacacacctcaagccccatgccgtgctcatcctacccccaatccctccaataaacctgattctgctgcccaaaaaaaaaaaaaaaaaaaaaaaaaaaaaaaa

SEQ ID NO: 1180 - protein, 244 aa, Homo sapien
MELFLAGRRVLVTGAGKGIGRGTVQALHATGARVVAVSRTQADLDSLVRECPGIEPVCVDLGDWEATERALGSVGPVDLLVNNAAVALLQPFLEVTKEAFDRSFEVNLRAVIQVSQIVARGLIARGVPGAIVNVSSQCSQRAVTNHSVYCSTKGALDMLTKVMALELGPHKIRVNAVNPTVVMTSMGQATWSDPHKAKTMLNRIPLGKFAEVEHVVNAILFLLSDRSGMTTGSTLPVEGGFWAC

SEQ ID NO: 1181 - DNA, 1192 bp, Homo sapien
cggcgactgaccgtggtcgtgggcggacggcggcttgcagcgtggaggagctggggtcgctgtgggtcgcgaagcagagcccgggacgtgcgcgcttggtgcacgatcctgaaggggagctccgaggggcccgggtcgccagggctgctgcggccattcccggagcccggcgcggggcccgcgagatactggtttaggccgtcccagggctccgggcgcacccggtggccgctgctgcagcggagggagcgcggcggcgcgggggctcggagacagcgtttctcccggaagtcttcctcgggcagcaggtgggaagtgggagccggagcggcagctggcagcgttctctccgcaggtcggcaccatgcgccctgcagccctgcgcggggccctgctgggctgcctctgcctggcgttgctttgcctgggcggtgcggacaagcgcctgcgtgacaaccatgagtggaaaaaactaattatggttcagcactggcctgagacagtatgcgagaaaattcaaaacgactgtagagaccctccggattactggacaatacatggactatggcccgataaaagtgaaggatgtaatagatcgtggcccttcaatttagaagagattaaggatcttttgccagaaatgagggcatactggcctgacgtaattcactcgtttcccaatcgcagccgcttctggaagcatgagtgggaaaagcatgggacctgcgccgcccaggtggatgcgctcaactcccagaagaagtactttggcagaagcctggaactctacagggagctggacctcaacagtgtgcttctaaaattggggataaaaccatccatcaattactaccaagttgcagattttaaagatgcccttgccagagtatatggagtgatacccaaaatccagtgccttccaccaagccaggatgaggaagtacagacaattggtcagatagaactgtgcctcactaagcaagaccagcagctgcaaaactgcaccgagccgggggagcagccgtcccccaagcaggaagtctggctggcaaatggggccgccgagagccggggtctgagagtctgtgaagatggcccagtcttctatcccccacctaaaaagaccaagcattgatgcccaagttttggaaatattctgttttaaaaagcaagagaaattcacaaactgcag

SEQ ID NO: 1182 - protein, 256 aa, Homo sapien
MRPAALRGALLGCLCLALLCLGGADKRLRDNHEWKKLIMVQHWPETVCEKIQNDCRDPPDYWTIHGLWPDKSEGCNRSWPFNLEEIKDLLPEMRAYWPDVIHSFPNRSRFWKHEWEKHGTCAAQVDALNSQKKYFGRSLELYRELDLNSVLLKLGIKPSINYYQVADFKDALARVYGVIPKIQCLPPSQDEEVQTIGQIELCLTKQDQQLQNCTEPGEQPSPKQEVWLANGAAESRGLRVCEDGPVFYPPPKKTKH

SEQ ID NO: 1183 - DNA, 1760 bp, Homo sapien
gaattccgagctttttattcctaagaggagaaaatcagtaacgggagaagcaggaggatgtccagaagaaatttcatcccttgctctcgcccctactctttctggtgttagatcgagctaccctctaaaagcagtttagagtggtaaaaaaaaaaaaaacacaccaaacgctcgcagccacaaaagggatgaaatttcttctggacatcctcctgcttctcccgttactgatcgtctgctccctagagtccttcgtgaagctttttattcctaagaggagaaaatcagtcaccggcgaaatcgtgctgattacaggagctgggcatggaattgggagactgactgcctatgaatttgctaaacttaaaagcaagctggttctctgggatataaataagcatggactggaggaaacagctgccaaatgcaagggactgggtgccaaggttcatacctttgtggtagactgcagcaaccgagaagatatttacagctctgcaaagaaggtgaaggcagaaattggagatgttagtattttagtaaataatgctggtgtagtctatacatcagatttgtttgctacacaagatcctcagattgaaaagacttttgaagttaatgtacttgcacatttctggactacaaaggcatttcttcctgcaatgacgaagaataaccatggccatattgtcactgtggcttcggcagctggacatgtctcggtccccttcttactggcttactgttcaagcaagtttgctgctgttggatttcataaaactttgacagatgaactggctgccttacaaataactggagtcaaaacaacatgtctgtgtcctaatttcgtaaacactggcttcatcaaaaatccaagtacaagtttgggacccactctggaacccgaggaagtggtaaacaggctgatgcatgggattctgactgagcagaagatgatttttattccatcttctatagcttttttaacaacattggaaaggatccttcctgagcgtttcctggcagttttaaaacgaaaaatcagtgttaagtttgatgcagttattggatataaaatgaaagcgcaataagcacctagttttctgaaaactgatttaccaggtttaggttgatgtcatctaatagtgccagaattttaatgtttgaacttctgttttttctaattatccccatttcttcaatatcatttttgaggctttggcagtcttcatttactaccacttgttctttagccaaaagctgattacatatgatataaacagagaaatacctttagaggtgactttaaggaaaatgaagaaaaagaaccaaaatgactttattaaaataatttccaagattatttgtggctcacctgaaggctttgcaaaatttgtaccataaccgtttatttaacatatatttttatttttgattgcacttaaattttgtataatttgtgtttctttttctgttctacataaaatcagaaacttcaagctctctaaataaaatgaaggactatatctagtggtatttcacaatgaatatcatgaactctcaatgggtaggtttcatcctacccattgccactctgtttcctgagagatacctcacattccaatgccaaacatttctgcacagggaagctagaggtggatacacgtgttgcaagtataaaagcatcactgggggatttaaggagaattgagagaatgtacccacaaatggcagcaataataaatggatcacacttaacg

SEQ ID NO: 1184 - protein, 300 aa, Homo sapien
MKFLLDILLLLPLLIVCSLESFVKLFIPKRRKSVTGEIVLITGAGHGIGRLTAYEFAKLKSKLVLWDINKHGLEETAAKCKGLGAKVHTFVVDCSNREDIYSSAKKVKAEIGDVSILVNNAGVVYTSDLFATQDPQIEKTFEVNVLAHFWTTKAFLPAMTKNNHGHIVTVASAAGHVSVPFLLAYCSSKFAAVGFHKTLTDELAALQITGVKTTCLCPNFVNTGFIKNPSTSLGPTLEPEEVVNRLMHGILTEQKMIFIPSSIAFLTTLERILPERFLAVLKRKISVKFDAVIGYKMKAQ

SEQ ID NO: 1185 - DNA, 1668 bp, Homo sapien
ggcacgagggtgagcgctcgcaagaggacggcagaggcccggcagctcggagctccgggaccttgtggcgcatcaggacgcggctgtccctctgccgggacccagagccgccgccgccgctctgcctcctgcgtgttagcctcctctgcgcgctccgggcaggcggccgtgggagccgctggggcgaggacggcgcgaggctgctgctgctgcccccggcccgcgcggctggaaacggagaggccgagccaagcggcggcccctcttatgctgggaggatgctggagagtagcggctgcaaagcgctgaaggagggcgtgctggagaagcgcagcgacgggttgttgcagctctggaagaaaaagtgttgcatcctcaccgaggaagggctgctgcttatcccgcccaagcagctgcaacaccagcagcagcagcaacagcagcagcagcagcagcaacaacagcccgggcaggggccggccgagccgtcccaacccagtggccccgctgtcgccagcctcgagccgccggtcaagctcaaggaactgcacttctccaacatgaagaccgtggactgtgtggagcgcaagggcaagtacatgtacttcactgtggtgatggcagagggcaaggagatcgactttcggtgcccgcaagaccagggctggaacgccgagatcacgctgcagatggtgcagtacaagaatcgtcaggccatcctggcggtcaaatccacgcggcagaagcagcagcacctggtccagcagcagcccccctcgcagccgcagccgcagccgcagctccagccccaaccccagcctcagcctcagccgcaaccccagccccaatcacaaccccagcctcagccccaacccaagcctcagccccagcagctccacccgtatccgcatccacatccacatccacactctcatcctcactcgcacccacaccctcacccgcacccgcatccgcaccaaataccgcacccacacccacagccgcactcgcagccgcacgggcaccggcttctccgcagcacctccaactctgcctgaaaggggcagctcccgggcaagacaaggttttgaggacttgaggaagtgggacgagcacatttctattgtcttcacttggatcaaaagcaaaacagtctctccgccccgcaccagatcaagtagtttggacatcaccctactgaaaacttgcgattcttcttagttttctgcatacttttcatcacgatgcaggaaacgatttcgagtcaagaagacttttatttatgaacctttgaaaggatcgtcttgtatggtgaattttctaggagcgatgatgtactgtaattttattttaatgtattttgatttatgattatttattagttttttttaaatgcttgttctaagacatttctgaatgtagaccattttccaaaaaggaaactttattttcaaaaacctaatccgtagtaattcctaatcttggagaataaaaaagggcggtggaggggaaaacattaagaatttattcattatttctcgagtactttcagaaagtctgacactttcattgttgtgccagctggttgaaattaaaactctgatattaaaaaaaaaaaaaaaaaaaaaaaaaaaaaaaaaaaaaaaaaaaaaaaaaaaaaaaaaaaaa

SEQ ID NO: 1186 - protein, 259 aa, Homo sapien
MLESSGCKALKEGVLEKRSDGLLQLWKKKCCILTEEGLLLIPPKQLQHQQQQQQQQQQQQQQPGQGPAEPSQPSGPAVASLEPPVKLKELHFSNMKTVDCVERKGKYMYFTVVMAEGKEIDFRCPQDQGWNAEITLQMVQYKNRQAILAVKSTRQKQQHLVQQQPPSQPQPQPQLQPQPQPQPQPQPQPQSQPQPQPQPKPQPQQLHPYPHPHPHPHSHPHSHPHPHPHPHPHQIPHPHPQPHSQPHGHRLLRSTSNSA

SEQ ID NO: 1187 - DNA, 1155 bp, Homo sapien
cccgagaccacgtggcctccgagcagctcagggcgcccttgaaagttcttggatctgcgggttatggccggtcccttgcagggcggtggggcccgggccctggacctactccggggcctgccgcgtgtgagcctggccaacttaaagccgaatcccggctccaagaaaccggagagaagaccaagaggtcggagaagaggtagaaaatgtggcagaggccataaaggagaaaggcaaagaggaacccggccccgcttgggctttgagggaggccagactccattttacatccgaatcccaaaatacgggtttaacgaaggacatagtttcagacgccagtataagcctttgagtctcaatagactgcagtatcttattgatttgggtcgtgttgatcctagtcaacctattgacttaacccagcttgtcaatgggagaggtgtgaccatccagccacttaaaagggattatggtgtccagctggttgaggagggtgctgacacctttacggcaaaagttaatattgaagtacagttggcttcagaactagctattgctgccattgaaaaaaatggtggtgttgttactacagccttctatgatccaagaagtctggacattgtatgcaaacctgttccattctttcttcgtggacaacccattccaaaaagaatgcttccaccagaagaactggtaccatattacactgatgcaaagaaccgtgggtacctggcggatcctgccaaatttcctgaagcacgacttgaactcgccaggaagtatggttatatcttacctgatatcactaaagatgaactcttcaaaatgctctgtactaggaaggatccaaggcagattttctttggtcttgctccaggatgggtggtgaatatggccgataagaaaatcctaaaacctacagatgaaaatctccttaagtattatacctcatgaattcccgtccaaggaagcagagttgttaaagagtactggaataggggctgaaggatctatattcccttattgcattttccttatgtataattttccagatggtgatgttacttttcagtgtactcatatgtctcattttcatctaaaattaaatggcaggaaacaaggactgcatagagaaaaaaaaaaaaaaaaaaaaaa

SEQ ID NO: 1188 - protein, 296 aa, Homo sapien [sequence omitted]

SEQ ID NO: 1189 - DNA, 3295 bp, Homo sapien
ggtatcgataagcttgatatcgaattcggcacgaggccgggcccgcggggctgctgcggggcgatcgggccgggccgctgccgcgccatggactcccgtgtccagcctgagttccagcctcactgagtggccacccccaaagtgctgccagccgaggaagcccccagcactgaccatgtctattatggaccacagccccaccacgggcgtggtcacagtcattgtcatcctcattgccatcgcggccctgggggccttgatcctgggctgctggtgctacctgcggctgcagcgcatcagccagtcagaggacgaggagagcatcgtgggggatggggagaccaaggaacccttcctgctggtgcagtattcggccaagggaccgtgcgtggagagaaaggccaagctgatgactcccaacggcccggaagtccacggctgagccaggatgcaaggctcctggtcctgtttgcagccggccaagaggcgctgggaggggcaaaaccatacggatgcgctgctgtctgagaggaagggctgacacttgctggcatggcctctgcgggcttcgtcatcgcatgcactgatgcccggggacctggctgtcctgggcttcccctcggcctccaggtgaggctgcccattgcaggcactgggcaggcctgaccttgctggggctcatggccctgtagcgcttttgttacttgaatgtctagctgagcctgtttttgatggagctactactgtaatgcgtgaactaacaaacctgtgaactgtaaataggcccctggaagcacgtgcttaagcccttttgctgatttttaaaaatatcatctagcgcacacgggactggtattctggctgtactaatgacaagctgagtcaagaccctggagggtcataggcttgtaaaggcccacgccacactcggcaggggtctctcatgtgtgtccatctgcgtgtatgtcaaggaagtgagatgccaatttggggtcttgaggctgaccagttggggtgcttgggtgatctctgcttcgttagtcatgggtggaagaaaaaccacaccycymrmrcccctccgttctttctgcatagactcacttgttaaatagcagttctgttgagagtggagttactgcagggaagctaccggacctgcctgggagccagtgaagggcgagtcagggcacgcgtcctggaggctgccagcgtccttgtagcagagcagtttcttgccgcttgggtcttcagcacgccaagccccccaccaaccctccacccccgagtgaaggcttcgctgaaattgctttggtcctcatagagcctgtggtggctacttttggtctgaaacccacttggcccaggaaagagaaaaggttgtatgttttgtgttggtgtttcctattttctgcactggaggggaggggactgttgaggttctgtcttttttcttcttttcctcttccctcttcacatcacttggcttcctttcctctctgatgaccgtccgcctatggggttctgacttcactttcctcagcgggtctccagtcccctgacccagctctaaaggcacttaggacccagggaacatttctcacgtgcacattcccctaagagccaccagactgcttcctgccagcctgtgcttgcggcagggagccggggcagggcagaggtgacttgaaagttcaggacttgactctcccacaggtggtgagctggtggctctctggtgagctagtgtctccacagmcwvtctccaaaggctcccctatgtacatttgagtgagctcactttgatttttaatcccaccacaagcacatactaattttatttatgattcaaatgtgactcgtgcctgcccatccctgtaatagatggaaggtcagccccggcttaaccacagagcactggcccttcatggctgagctcagagctctggcctcctgctcagactaaaggcacctcctctggcctcacccaagcctcttctaaaaaccatgttgaatgaatccacgttctggaaccccgaggcgggagaagtagggagctgttcgtttaagcagcatacacctaaattgggggtttaaacattaagtaggagcttggggtggaagagggacagccggctgggccacctgagcagaaggtggtaatgaaacacctcagctgggctcttgggagaccttaggaagcaggagaggcaacacctctggctactgatggtgtggcaagttcagaagaggtggtggtggggtaggcgtgatgtcagcagaagccctgcaggctgggtgggcaggacacgtggtgggggccactgaaaccaggcctaggagggagaacaagttccaaaggtgccgactggaagaagggggtaaaagtttgctttggtgagtgagaaaaggctggggcgtgtgatccatcccctcacgtttcagaacttccaggctttctacctcgactctcaccacagccagcacatacacctaggctgtttttccttcctccacacctgagggacgcagcaacagctaggatctgcattttcaggttccgagcctgacccctggaactgaccagcgctcgattgtcagccttggcctggggttttgaccttgccagtgaagtttcggttttgaagtgattaaatgtcacttcctcatcagtttcacttctggaggttttcttatcctactccctggtgccagggacgtacctgggagtttgaatcaggcccatttgagcgtggcagccgtgttgggtgaaggtccggggctcggtgaggcactgggggggttttcgggaggaaaatgaaaatgcttctagaatgagtgaaccacatcatagctctcactgttttttcaatagctactttttttagcagacaccagagccacactcaaatggctaagtaggttatgacctctctggattatttttgaatgcccaactgttgcaattcaagttttctgaactaataagaaattaagcattcatccttcgtatcactgcagaagcaacagtgggggcacagggagggaactcttgacactgagccactaaaatatggactaattttttggacaaatcttcaaacggactgtgctactgtatttgtctcaaagctaccaagtttgtgcaataagtggaagggatgtcatccttcttcaataaatgctgaatgacattcaagctgattttctagaccactgagaaaatctttatttacaataaatttcaataaaatttgcataaatataaaaaaaaaaaaaaaaaaaaaaaaaaaaaaaa

SEQ ID NO: 1190 - protein, 88 aa, Homo sapien
MSIMDHSPTTGVVTVIVILIAIAALGALILGCWCYLRLQRISQSEDEESIVGDGETKEPFLLVQYSAKGPCVERKAKLMTPNGPEVHG

SEQ ID NO: 1191 - DNA, 1143 bp, Homo sapien
ggagctctggaggcggggcttcgagcgtggctcgtgggttttccgtgaagtcgcggtgcagcggtgggcggcatgtctgtggccggtggggagattcgtggggacacggggggagaggacactgctgctcccggccggttcagcttcagcccggagcccacgctcgaggacatccgccgcctccatgctgagtttgctgcggaacgagactgggaacagttccatcagcctcggaatctcctcctggccttggttggggaagtgggggagctggcagaactctttcagtggaaaaccgatggggaacctggcccccaaggctggtcccccagggaacgggcagcccttcaagaggagcttagtgacgtcctcatctacctggtggcattagcagcccgctgccgtgtggatctgccgctagcagtgctctccaaaatggacatcaaccggcgacgctacccagcccatctggcccgcagctcttcccgcaagtatacagaattgccccatggggccatctctgaagaccaggctgtggggcctgcggacattccctgtgactccacaggccagacctcaacctagaaagatggccacaggacttgcaactcagggtggtgtctgaagagcagagagtggcctggccctggagcctttttctagtcttttcagaatagatcatgggcctgaggcctccacttcttgaggtctgaggcccagcagcctctagaaggtagcctcctggtgtttgttctcccagtaaaatggttttgggcgataacttctagattattcctggatggccagggaggctctctgtctcagcaggtgatgacgggggtaccaggggtgcctctgagacccattctcgtgtttccctgttgtaccttttgcctgcagggcagagagatctggtttctagcaaattcccagtaggatgtcatgtaagttccttccccctcttagagattgaaggctgtaagagtccagatggtggagccaggctgtctgggttcaaatgccatctttgacacttgcaagctaaatgacattactcaaattaatcgttctgcacttcagcttccttgtctatcaaataaaaagaatagtacctgcccaaaaaaaaaaaaaaaaaaaaaaaaa

SEQ ID NO: 1192 - protein, 170 aa, Homo sapien
MSVAGGEIRGDTGGEDTAAPGRFSFSPEPTLEDIRRLHAEFAAERDWEQFHQPRNLLLALVGEVGELAELFQWKTDGEPGPQGWSPRERAALQEELSDVLIYLVALAARCRVDLPLAVLSKMDINRRRYPAHLARSSSRKYTELPHGAISEDQAVGPADIPCDSTGQTST

SEQ ID NO: 1193 - DNA, 2550 bp, Homo sapien
ggcacgaggcagagggcggttcctggagttacagccgcgtttgcgggacgtgtctgcgcggcagtcctggcctgttgagcttgtccagacgaagcctcgcagggatgggttggagcctgggccgggcttcgctcaggcagcgtttgaggcagacccagcagggtcctcctggggccttcctgcctttgaactgcggtggcgggcgggcgcacggtctcctgtacgccctagactaggggccgccatctccatggccacggccgtgagccggccctgcgccggcaggtcgcgggacatactgtggcgcgttttgggctggaggatagttgcaagtattgtttggtcagtgctatttctacccatctgcaccacagtatttataattttcagcaggattgatttgtttcatcctatacagtggctgtctgattctttcagtgacctgtatagttcctatgtaatcttttacttcctgctgctgtcagtggtaataataataataagtattttcaatgtggagttctatgcagttgtgccttctattccttgctccagactagctctgatagggaagatcattcatcctcagcaactcatgcactcatttattcatgctgcaatgggaatggtgatggcctggtgtgctgcagtgataacccagggccagtacagctttcttgtggttccctgcactggtactaacagctttgatagccctgctgcgcaaacctgcttaaatgaatatcatctttttttcctactgactggagcatttatgggctatagctatagcctcctgtattttgttaacaacatgaactatcttccatttcccatcatacagcaatacaagttcttgcgttttaggagatctctgctcttattagttaaacacagttgtgtggaatcactgttcctggttagaaatttctgcattttatattattttcttggctatattcccaaagcttggattagcactgctatgaaccttcacatagatgagcaggttcataggccacttgacacagtgagtggcctcttaaatctctcgttactctaccatgtctggctgtgtggtgtctttctcctgacgacttggtatgtctcatggatactcttcaaaatctatgccacagaggctcatgtgtttcctgttcaaccaccatttgcagaagggtcagatgagtgccttccaaaagtgttaaatagcaatcctccccccatcataaagtatttagccttgcaggacctgatgttgctttctcaatattctccttcacgaagacaagaagttttcagcctcagccaaccaggtggacatccccacaattggacagccatttcaagggagtgtttgaatcttttaaatggtatgactcagaaactgattctctatcaagaagctgctgctacgaatgggagagtgtcttcatcttacccagtggaacctaagaaattaaattctccagaagaaactgcttttcagacaccaaaatctagccagatgcctcggccttcagtgccaccattagttaaaacatcactgttttcttcaaaattatctacacctgatgttgtgagcccatttgggaccccatttggctctagtgtaatgaatcggatggctggaatttttgatgtaaacacctgctatgggtcaccgcaaagtcctcagctaataagaagggggccaagattgtggacatcagcttctgatcagcaaatgactgaattttctaatccttctccatctacctctattagtgctgagggtaagacaatgagacaacccagtgtgatttattcatggattcagaataaacgtgaacagattaagaatttcttgtcaaaacgggtgctgataatgtattttttcagtaagcacccagaggcctccattcaggctgttttttcagatgcccaaatgcatatttgggcattagaaggtctgtcgcacttagtagcagcatcatttacagaggatagatttggagttgtccagacgacactaccagctatccttaatactttgttgacactgcaagaggcagtcgacaagtactttaagcttcctcatgcttccagtaaaccaccccggatttcaggaagccttgtggacacttcatataaaacattaagatttgcattcagagcatcactgaaaactgccatctatcgaataactactacatttggtgaacatctgaatgctgtgcaagcatctgcagaacatcagaaaagacttcaacagttcttggagttcaaagaatagttaagtaatataaactgtgttcattacactgctgatacaactacagatgggacagtaaatgttcagcattcttggatcagaagaaaacggactaattagatgcttcctttgtcgtggtggttgctttgaaaactatactttaatgggagaaatcatggaaagaaattctcaacagaataactgaaaactgccttttctgtaccgattgctttttgtgtgtgtggtataataaaatctttattcaattttacagaaaaaaaaaaaaaaaaaaaaaa

SEQ ID NO: 1194 - protein, 674 aa, Homo sapien
MATAVSRPCAGRSRDILWRVLGWRIVASIVWSVLFLPICTTVFIIFSRIDLFHPIQWLSDSFSDLYSSYVIFYFLLLSVVIIIISIFNVEFYAVVPSIPCSRLALIGKIIHPQQLMHSFIHAAMGMVMAWCAAVITQGQYSFLVVPCTGTNSFDSPAAQTCLNEYHLFFLLTGAFMGYSYSLLYFVNNMNYLPFPIIQQYKFLRFRRSLLLLVKHSCVESLFLVRNFCILYYFLGYIPKAWISTAMNLHIDEQVHRPLDTVSGLLNLSLLYHVWLCGVFLLTTWYVSWILFKIYATEAHVFPVQPPFAEGSDECLPKVLNSNPPPIIKYLALQDLMLLSQYSPSRRQEVFSLSQPGGHPHNWTAISRECLNLLNGMTQKLILYQEAAATNGRVSSSYPVEPKKLNSPEETAFQTPKSSQMPRPSVPPLVKTSLFSSKLSTPDVVSPFGTPFGSSVMNRMAGIFDVNTCYGSPQSPQLIRRGPRLWTSASDQQMTEFSNPSPSTSISAEGKTMRQPSVIYSWIQNKREQIKNFLSKRVLIMYFFSKHPEASIQAVFSDAQMHIWALEGLSHLVAASFTEDRFGVVQTTLPAILNTLLTLQEAVDKYFKLPHASSKPPRISGSLVDTSYKTLRFAFRASLKTAIYRITTTFGEHLNAVQASAEHQKRLQQFLEFKE

SEQ ID NO: 1195 - DNA, 946 bp, Homo sapien
ggaaacccaagaggaaatgactgagcccgtctgggtccccgcccgctcgcgctcccctggccacaccctccgcctggacgcagcagccaccgccgcgtccctctctccacgaggctgccggcttaggacccccagctccgacatgtcgccctctggtcgcctgtgtcttctcaccatcgttggcctgattctccccaccagaggacagacgttgaaagataccacgtccagttcttcagcagactcaactatcatggacattcaggtcccgacacgagccccagatgcagtctacacagaactccagcccacctctccaaccccaacctggcctgctgatgaaacaccacaaccccagacccagacccagcaactggaaggaacggatgggcctctagtgacagatccagagacacacaagagcaccaaagcagctcatcccactgatgacaccacgacgctctctgagagaccatccccaagcacagacgtccagacagacccccagaccctcaagccatctggttttcatgaggatgaccccttcttctatgatgaacacaccctccggaaacgggggctgttggtcgcagctgtgctgttcatcacaggcatcatcatcctcaccagtggcaagtgcaggcagctgtcccggttatgccggaatcgttgcaggtgagtccatcagaaacaggagctgacaacctgctgggcacccgaagaccaagccccctgccagctcaccgtgcccagcctcctgcatcccctcgaagagcctggccagagagggaagacacagatgatgaagctggagccagggctgccggtccgagtctcctacctcccccaaccctgcccgcccctgaaggctacctggcgccttgggggctgtccctcaagttatctcctctgctaagacaaaaagtaaagcactgtggtctttgcc

SEQ ID NO: 1196 - protein, 178 aa, Homo sapien
MSPSGRLCLLTIVGLILPTRGQTLKDTTSSSSADSTIMDIQVPTRAPDAVYTELQPTSPTPTWPADETPQPQTQTQQLEGTDGPLVTDPETHKSTKAAHPTDDTTTLSERPSPSTDVQTDPQTLKPSGFHEDDPFFYDEHTLRKRGLLVAAVLFITGIIILTSGKCRQLSRLCRNRCR

SEQ ID NO: 1197 - DNA, 2584 bp, Homo sapien
tggcggcggcggcggcggttgtcccggctgtgccggttggtgtggcccgtcagcccgcgtaccacagcgcccgggccgcgtcgagcccagtacagccaagccgctgcggccgggtccggcgcgggcggcgcgcgcagacggagggcggcggccgcggccagggcggcccgtgggaccgcgggcccccggcgcagcgctgcccggctcccggccctgccggcctcctcccttggcgccgcggccatggcggccagcgcgaagcggaagcaggaggagaagcacctgaagatgctgcgggacatgaccggcctcccgcgcaaccgaaagtgcttcgactgcgaccagcgcggccccacctacgttaacatgacggtcggctccttcgtgtgtacctcctgctccggcagcctgcgaggattaaatccaccacacagggtgaaatctatctccatgacaacattcacacaacaggaaattgaattcttacaaaaacatggaaatgaagtctgtaaacagatttggctaggattatttgatgatagatcttcagcaattccagacttcagggatccacaaaaagtgaaagagtttctacaagaaaagtatgaaaagaaaagatggtatgtcccgccagaacaagccaaagtcgtggcatcagttcatgcatctatttcagggtcctctgccagtagcacaagcagcacacctgaggtcaaaccactgaaatctcttttaggggattctgcaccaacactgcacttaaataagggcacacctagtcagtccccagttgtaggtcgttctcaagggcagcagcaggagaagaagcaatttgaccttttaagtgatctcggctcagacatctttgctgctccagctcctcagtcaacagctacagccaattttgctaactttgcacatttcaacagtcatgcagctcagaattctgcaaatgcagattttgcaaactttgatgcatttggacagtctagtggttcgagtaattttggaggtttccccacagcaagtcactctccttttcagccccaaactacaggtggaagtgctgcatcagtaaatgctaattttgctcattttgataacttccccaaatcctccagtgctgattttggaaccttcaatacttcccagagtcatcaaacagcatcagctgttagtaaagtttcaacgaacaaagctggtttacagactgcagacaaatatgcagcacttgctaatttagacaatatcttcagtgccgggcaaggtggtgatcagggaagtggctttgggaccacaggtaaagctcctgttggttctgtggtttcagttcccagtcagtcaagtgcatcttcagacaagtatgcagctctggcagaactagacagcgttttcagttctgcagccacctccagtaatgcgtatacttccacaagtaatgctagcagcaatgtttttggaacagtgccagtggttgcttctgcacagacacagcctgcttcatcaagtgtgcctgctccatttggacgtacgccttccacaaatccatttgttgctgctgctggtccttctgtggcatcttctacaaacccatttcagaccaatgccagaggagcaacagcggcaacctttggcactgcatccatgagcatgcccacgggattcggcactcctgctccctacagtcttcccaccagctttagtggcagctttcagcagcctgcctttccagcccaagcagctttccctcaacagacagctttttctcaacagcccaatggtgcaggttttgcagcatttggacaaacaaagccagtagtaaccccttttggtcaagttgcagctgctggagtatctagtaatccttttatgactggtgcaccaacaggacaatttccaacaggaagctcatcaaccaatcctttcttatagccttatatagacaatttactggaacgaacttttatgtggtcacattacatctctccacctcttgcactgttgtcttgtttcactgatcttagctttaaacacaagagaagtctttaaaaagcctgcattgtgtattaaacaccaggtaatatgtgcaaaaccgagggctccagtaacaccttctaacctgtgaattggcagaaaagggtagcggtatcatgtatattaaaattggctaatattaagttattgcagataccacattcattatgctgcagtactgtacatatttttcttagaaattagctatttgtgcatatcagtatttgtaactttaacacattgttatgtgagaaatgttactggggaaatagatcagccacttttaaggtgctgtcatatatcttggaatgaatgacctaaaatcattttaaccattgctactggaaagtaacagagtcaaaattggaaggttttattcattcttgaatttttcctttctaaagagctcttctatttatacatgcctaaattcttttaaaatgtagagggatacctgtctgcataataaagctgatcatgttttgctacagtttgcaggtgaaaaaaaataaatattataaaataaaaaaaaaaaaaaagaaaaaaaaaa

SEQ ID NO: 1198 - protein, 562 aa, Homo sapien
MAASAKRKQEEKHLKMLRDMTGLPRNRKCFDCDQRGPTYVNMTVGSFVCTSCSGSLRGLNPPHRVKSISMTTFTQQEIEFLQKHGNEVCKQIWLGLFDDRSSAIPDFRDPQKVKEFLQEKYEKKRWYVPPEQAKVVASVHASISGSSASSTSSTPEVKPLKSLLGDSAPTLHLNKGTPSQSPVVGRSQGQQQEKKQFDLLSDLGSDIFAAPAPQSTATANFANFAHFNSHAAQNSANADFANFDAFGQSSGSSNFGGFPTASHSPFQPQTTGGSAASVNANFAHFDNFPKSSSADFGTFNTSQSHQTASAVSKVSTNKAGLQTADKYAALANLDNIFSAGQGGDQGSGFGTTGKAPVGSVVSVPSQSSASSDKYAALAELDSVFSSAATSSNAYTSTSNASSNVFGTVPVVASAQTQPASSSVPAPFGRTPSTNPFVAAAGPSVASSTNPFQTNARGATAATFGTASMSMPTGFGTPAPYSLPTSFSGSFQQPAFPAQAAFPQQTAFSQQPNGAGFAAFGQTKPVVTPFGQVAAAGVSSNPFMTGAPTGQFPTGSSSTNPFL

SEQ ID NO: 1199 - DNA, 1417 bp, Homo sapien
tgtgaggtcgcgttccccagtgttacggagggtccttgaggcaggagtgaaaattgggtctgggggttagtcctggggtggaggtctgggcacgccgggtcggaccccctccatcttcggttttgcacaccccgctttccagcgcggagtcgggcgggggtagggcggcgtcgcgtgcgtgacgtcatccagcggcgccatcggaggctccagtggccttgacctcccgcgtcgtgtaggcctgcgcggcgatgctgcagttcgtccgggccggggcgcgggcctggcttcggcctaccggcagccagggcctgagttccctggcggaagaggcagcgcgtgcgaccgagaacccggagcaggtggcgagcgagggtctcccggagcccgtgctgcgcaaagtcgagctcccggtacccactcatcgacgcccagtgcaggcctgggtcgagtccttgcggggcttcgagcaggagcgcgtgggcctggccgacctgcaccccgatgttttcgccaccgcgcccaggctggacatactgcaccaggttgctatgtggcagaagaacttcaagagaattagctatgccaagaccaagacgagagccgaggtgcggggcggtggcggaaagcctttggccgcagaaaggcactgggcgggcccggcatggcagcatccgctctccgctctggcgaggaggaggtgttgcccatggcccccggggcccacaagttactactacatgctgcccatgaaggtgcgggcgctgggtctcaaagtggcactgaccgtcaagctggcccaggacgacctgcacatcatggactccctagagctgcccaccggagacccacagtacctgacagagctggcgcactaccgccgctggggggactccgtactcctcgtggacttaacacacgaggagatgccacagagcatcgtggaggccacctctaggcttaagaccttcaacttgatcccggctgttggcctaaatgtgcacagcatgctcaagcaccagacgctggtcctgacgctgcccaccgtcgccttcctggaggacaagctgctctggcaggactcacgttacagacccctctaccccttcagcctgccctacagcgacttcccccgacccctaccccacgctacccagggcccagcggccaccccgtaccactgttgatgtgaagcacctcttctgagccaggccgagcccctggacgacttgggagcctcaggcccacgcccacccttcgaggaaggtgtcacctggcccccttcattccacggaggaagctgaggccacagggagcggccatcgccattgggaaggggcgactccacggagagcccagacggggcttcttgcatccattccctctttttgttttttaaaataaattgtatttttgg

SEQ ID NO: 1200 - protein, 311 aa, Homo sapien
MLQFVRAGARAWLRPTGSQGLSSLAEEAARATENPEQVASEGLPEPVLRKVELPVPTHRRPVQAWVESLRGFEQERVGLADLHPDVFATAPRLDILHQVAMWQKNFKRISYAKTKTRAEVRGGGGKPLAAERHWAGPAWQHPLSALARRRCCPWPPGPTSYYYMLPMKVRALGLKVALTVKLAQDDLHIMDSLELPTGDPQYLTELAHYRRWGDSVLLVDLTHEEMPQSIVEATSRLKTFNLIPAVGLNVHSMLKHQTLVLTLPTVAFLEDKLLWQDSRYRPLYPFSLPYSDFPRPLPHATQGPAATPYHC

SEQ ID NO: 1201 - DNA, 1697 bp, Homo sapien
tttttttttttttttggagttatacctttggttctgtttttaccctttatttggaatacagtgcaacattacagttttggatcattaaatgaatggacttggtgatatagtactaacaagcacgacctgaattctgggagtaagtggttttctagttcatgggggaggaaaacagatacgtgcaagatctccagaggagaacagaaccatggtactcagtgagtcaccaaagggctttggcttcaactcactaatggctggaacaagtgccagtcttggtcagccatccaggattttcatcacagcaaatcaaaatctccaatttttcaaactaattgtaggtagaagagagagaataactccaaactgtcttataaaaggatctagatgactactgaagtgtcctccattcatgagttggcaaaatcttcagagtgactgttggagcaaggagcctttcatgtgctcccagttattatatagtgcatagaggctggtaagtgttagtcctgtcagaccacctcgtgctatccctcgaagaccacctttggactctggatgggtcctccaaatattaaccttgaagattagtgacggccaggcatggtggctcacacatgtaatcccagcactttgggaggctgaggcaggcttgagctcaggagtttgagaacaacctaggcaacacggcaaaaccctgtctctgcaaaaaatagaaaaattagcttagtggggtggcatgcgcctgtggtcccagctatttgggaggctgaggtaggaggatcgcttgagcccaggaggtcgaggctgcagtgagctgagattacaccactgcactccagcctgggtgacagagtgagaaagaaaaaaaaaatgtggtaagatagctataatcacactttgagttagatgctggtgaccaccccccacttcatgcactgacgcatcaatctcccacaattaaaaaacagtgagtgacacctagcatcatgctagttgaaaagaactcaagaattacagatattgaactacctgcttgataacaagtgaacaattttacatgtggcaaaagattagcaacaaggatttcacttgcaatggagaaacaaaaatatttcaatcggttacttaaaaatagtccccaagtgtaaataaaaggaagctacagataaatttctcaaaataaaaaggcctaactgcttatggttataaaatgttagtcttacaaacgtaatgtggcaaagagaaaccaagctacaaaactcctcaggaatgggggtgcccaaagcagctttttaaaaaatgtgaagtcctcaagcagctccatgagtagggatcataaacttcaggtagccatctttgtacctagagtgtatttgttccaagtcatgtgttagggagacagaggtagagcggagttgtgggggtggctagaggcccttttagctccgtgcctgtcaattctgtgacattcagtgatgttgctgagctacaacatttcagaactaaccatttctgcaacgagcgtcctaccagatggcttcagctgatggattaaagggccactccccctccaggaatctctccagtctgaagacttctgatagctgacctgcttacgttcttcttagttttccaatgctaagtgtcataattatctctctcaaacagaaactgcagacattatctataaacag

SEQ ID NO: 1202 - protein, 60 aa, Homo sapien
MVLSESPKGFGFNSLMAGTSASLGQPSRIFITANQNLQFFKLIVGRRERITPNCLIKGSR

SEQ ID NO: 1203 - DNA, 2477 bp, Homo sapien
gcagaggtgcggccggggaggcgcgcggaggctggagctggaggcgcggcgccggtgagctgagaaccatgtgtgctcagtattgcatctcctttgctgatgttgaaaaagctcatatcaacattcgagattctatccacctcacaccagtgctaacaagctccattttgaatcaactaacagggcgcaatcttttcttcaaatgtgaactcttccagaaaacaggatcttttaagattcgtggtgctctcaatgccgtcagaagcttggttcctgatgctttagaaaggaagccgaaagctgttgttactcacagcagtggaaaccatggccaggctctcacctatgctgccaaattggaaggaattcctgcttatattgtggtgccccagacagctccagactgtaaaaaacttgcaatacaagcctacggagcgtcaattgtatactgtgaacctagtgatgagtccagagaaaatgttgcaaaaagagttacagaagaaacagaaggcatcatggtacatcccaaccaggagcctgcagtgatagctggacaagggacaattgccctggaagtgctgaaccaggttcctttggtggatgcactggtggtacctgtaggtggaggaggaatgcttgctggaatagcaattacagttaaggctctgaaacctagtgtgaaggtatatgctgctgaaccctcaaatgcagatgactgctaccagtccaagctgaaggggaaactgatgcccaatctttatcctccagaaaccatagcagatggtgtcaaatccagcattggcttgaacacctggcctattatcagggaccttgtggatgatatcttcactgtcacagaggatgaaattaagtgtgcaacccagctggtgtgggagaggatgaaactactcattgaacctacagctggtgttggagtggctgctgtgctgtctcaacattttcaaactgtttccccagaagtaaagaacatttgtattgtgctcagtggtggaaatgtagacttaacctcctccataacttgggtgaagcaggctgaaaggccagcttcttatcagtctgtttctgtttaatttacagaaaaggaaatggtgggaattcagtgtctttagatactgaagacattttgtttcctagtattgtcaactcttagttatcagattcttaatggagagtggctatttcattaagatttaatagttttttttggactaagtagtggaaaaacttttatacttaactgagacattttgtcaaggctaaaaaaaagtcttgcaaaatggggcagtggactgacaggctgacatagaaaataaactttgcccaatcacaacttgtgcctcccatccctggagtactgactggcaccggtaagacagaatctctctgaatccattactccatgcccccttgaggcactgttgaagaaatctcacttttcagccagggtactggttctggtacatatggatcataagtccatttggggaagactcgtttatacaggttcatcagtactgtgtcttgagattttagcttcccatcaaagctgcatttcatgtggccatgggtacctagaaagacatcagaacaagtcggtcaaattaaaagtagaaaattttaaagcaatgacttccaacccaacagtcatttagcaacactgcagaaatgcagacatggtctcaaatcccgtgtttccttacctaaaggttccttgatatgtcctctccggccccacttcgttctcagttccactggtttaaaccacagcacatcctcttagaatcaaacacattaaagaccaagatgaaacatttacccacaaaatgtaaacccaacctttataccacaaaggcaatcagatcccatcctcctccttcatacccacctctgttgaagaacatgtaacgtactactgccatcttagtaaaaattttgaaaggatgaccactcagaacaactctcttgatgaccattctgtctggatctactgacataagatggcctgtagcaatgaggctgtgcattcctaaaggacaaaagcaaagaagctatttaggaatttacaggccaaagtcttcatttattgcccagtccatttaaagacccatgcaagagcctggtttgtcatccctgccctagcccaatctgaggctaagattggtaaactgtaagcccacacttaaccttgtcaataggttcttgaaaacttgtacttcaagagaaatgatgtataacaaaaccatactttttctcatcagttgttacaaggaaaggatgttgaacaaaaggcagttatttgaggactggctatacactgtttcacgtaaaagttggagttttcattgttctattaacaatgttaaatgaagacttactgtattttgaaaaccatcattaccttctccataccatttggctcccaaatttaaataaacaagagaaaacggtgttcatct

SEQ ID NO: 1204 - protein, 340 aa, Homo sapien
MCAQYCISFADVEKAHINIRDSIHLTPVLTSSILNQLTGRNLFFKCELFQKTGSFKIRGALNAVRSLVPDALERKPKAVVTHSSGNHGQALTYAAKLEGIPAYIVVPQTAPDCKKLAIQAYGASIVYCEPSDESRENVAKRVTEETEGIMVHPNQEPAVIAGQGTIALEVLNQVPLVDALVVPVGGGGMLAGIAITVKALKPSVKVYAAEPSNADDCYQSKLKGKLMPNLYPPETIADGVKSSIGLNTWPIIRDLVDDIFTVTEDEIKCATQLVWERMKLLIEPTAGVGVAAVLSQHFQTVSPEVKNICIVLSGGNVDLTSSITWVKQAERPASYQSVSV

SEQ ID NO: 1205 - DNA, 1633 bp, Homo sapien
cacgagggggacccgggccgcgtgggcgccgggatggagggcgccaaggggcggggagcgggcgtgcgtgtgtgtgcgagtgcgaatgcgagggaggccggccttgagtgaaaccggagctacaaagaaggggagagtccgggagcgggagggcgcgagggaggagcggcggctccggggcagctccgacgccctcccgcggggaaggagcccccgcggtgccgccgaggccccgacgcggggccgcccctcggctcgccgccccgcgcccgcgcccgctgggaatgatgaagaagaacaattccgccaagcggggacctcaggatggaaaccagcagcctgcaccgcccgagaaggtcggctgggtccggaaattctgcgggaaagggattttcagggagatttggaaaaaccgctatgtggtgctgaaaggggaccagctctacatctctgagaaggaggtaaaagatgagaaaaatattcaagaggtatttgacctgagtgactatgagaagtgtgaagagctccggaagtccaagagcaggagcaagaaaaatcatagcaagtttactcttgcccactccaaacagcccggtaacacggcacccaacctgatcttcctggcagtgagtccagaagagaaggaatcgtggatcaatgccctcaactctgccatcacccgagccaagaaccgtatcttggatgaggtcaccgttgaggaggacagctatcttgcccatcccactcgagacagggcaaaaatccagcactcccgccgccccccaacaaggggacacctaatggctgtggcttccacctctacctcggatgggatgctgaccttggacttgatccaagaggaagacccttcccctgaggaaccaacctcttgtgctgagagctttcgggttgacctggacaagtctgtggcccagctggcagggagccggcggagagcggactcagaccgcatccagccctccgcagaccgggcaagcagtctctcccgaccttgggaaaaaacagacaaaggggccacctacaccccccaggcacccaagaagttgacgcccacagagaaaggccgctgcgcctccctggaggagatcctatctcagcgggatgctgcctctgcccgcaccctccagctgcgggctgaggaacccccaacccctgccctccccaacccggggcagctgtcccggatccaggacctggtagcaaggaaactggaggagactcaggagcttctggcagaggttcagggactgggagatgggaagcgaaaggccaaggacccccctcggtctccgccggattctgagtcagagcagctgctgctggagacggaacggctgctgggagaggcatcatcgaattggagccaggcaaagagggtgctgcaggaggtcagggagctgagagacctgtacagacagatggacctgcagaccccggactcccacctcagacagaccaccccgcacagtcagtaccggaagagcctgatgtgagggcagggtggggtctggaacttgtcgggttggacagactcttatctccgtgttgctggataaagcttttttatttacctcaatcaaaaaaagaaaacaaaaatgaaaaaaaaaaaaaa

SEQ ID NO: 1206 - protein, 409 aa, Homo sapien
MMKKNNSAKRGPQDGNQQPAPPEKVGWVRKFCGKGIFREIWKNRYVVLKGDQLYISEKEVKDEKNIQEVFDLSDYEKCEELRKSKSRSKKNHSKFTLAHSKQPGNTAPNLIFLAVSPEEKESWINALNSAITRAKNRILDEVTVEEDSYLAHPTRDRAKIQHSRRPPTRGHLMAVASTSTSDGMLTLDLIQEEDPSPEEPTSCAESFRVDLDKSVAQLAGSRRRADSDRIQPSADRASSLSRPWEKTDKGATYTPQAPKKLTPTEKGRCASLEEILSQRDAASARTLQLRAEEPPTPALPNPGQLSRIQDLVARKLEETQELLAEVQGLGDGKRKAKDPPRSPPDSESEQLLLETERLLGEASSNWSQAKRVLQEVRELRDLYRQMDLQTPDSHLRQTTPHSQYRKSLM

SEQ ID NO: 1207 - DNA, 2414 bp, Homo sapien
cccgcgtgcatacggttgccggcatggcacattacaacttcaagaaaattacggtggtgccgtccgccaaggacttcatagacctcacgttgtcgaagactcaacgaaagactccaaccgttattcataaacattaccaaatacatcgcattagacatttttacatgagaaaagtcaaatttactcaacagaattaccatgatagactttcacaaattctaacagatttccccaaattggatgatattcatccgttctatgctgatttgatgaatattctctacgacaaggatcattacaagttggctctggggcaaataaatattgccaaaaatttagtggacaatgttgctaaagattatgtgcgactgatgaagtatggcgactctctctaccgctgcaaacagctgaagcgtgcggccctgggacggatgtgcacagtgatcaagaggcagaagcagagtttggagtatttggagcaagtgcgtcagcatttatcccgtttgccaaccattgatccgaataccaggaccctgcttttgtgtgggtacccaaatgttgggaagtccagcttcatcaacaaggtgacgagagcagacgtggatgtccagccctatgcgttcacaaccaagtctctgtttgttgggcacatggattataagtatctacgttggcaggttgtagacactcctgggatcctggaccaccctctggaggataggaacaccatcgagatgcaggccatcactgccctggcccacctccgtgctgcggtcctgtatgtgatggatttgtctgagcagtgtgggcatgggctgagggagcagctagaactcttccagaacatcagacctctcttcatcaacaagcctctcatagttgtagccaacaaatgtgatgtgaagagaatagctgaactttctgaagatgatcagaaaatatttacagatttgcagtctgaaggattccctgtaatagagaccagcaccctgactgaggaaggtgttattaaagttaaaacagaggcttgcgataggcttttggctcatcgagtggaaaccaaaatgaagggaaataaagtgaatgaggtgctgaatagactgcacctggctatcccaaccaggagggacgataaggagaggccccctttcatccctgaaggagtggtggctcgcaggaagaggatggaaactgaggagtccaggaagaagagggaacgagatcttgagctggaaatgggagatgattatattttggatcttcagaagtactgggatttaatgaatttgtctgaaaaacatgataagataccagaaatctgggaaggccataatatagctgattatattgatccagccatcatgaagaaattggaagaattagaaaaagaagaagagctgagaacagctgctggagagtatgacagtgtatctgagagtgaagacgaagagatgctggaaatccgacagctggcaaagcaaattcgagagaaaaagaagttgaaaattctggagtccaaagaaaagaatacacagggacccaggatgccgcgaactgctaagaaggttcagaggacagttttggagaaggagatgcgtagtcttggtgttgacatggacgataaagacgatgcccattacgcagtccaggcaagaagatcccggagcatcactaggaaaagaaagcgggaagactctgctcccccgtcctctgtggcccggagtgggagttgctctcgaactccacgtgacgtttctggtcttagggatgtcaagatggtgaagaaagccaagactatgaagaatgctcagaagaagatgaatcggttggggaagaaaggggaggcggatagacacgtgtttgatatgaagcccaagcacttgctgtctgggaagaggaaagctggtaaaaaggacaggagatagtatccgtttggttggcgtggcttcgctagagtgttgctgtttatttcctggtttggtacagtatggtttcatgaaattggagctctgtacaaactgaaaaagacaaaataagtaaagcacttgttgctttgctgaaaactatggttaaccctatataggtgtgggaaatttttgtcactgcataatattacaaatattttgagtagacagtgtttccacatttaatggagtatcagttgcttcagattttcagaactgggaagatttactggtgtaactgggttgtttttgatggagaaaaaccttattttcttttgtaagagctgggagcaaacacgtttatgagtgtgtcggaatcccgtgcttaaaatacgctcttaaattattttctagtcttattttacaatgtctcattgtagtctgtcttcaactattttatccaaaataaacctccagaagaaactaaaaaaaaaaaaaaaaaaaaaaaaa

SEQ ID NO: 1208 - protein, 633 aa, Homo sapien
MAHYNFKKITVVPSAKDFIDLTLSKTQRKTPTVIHKHYQIHRIRHFYMRKVKFTQQNYHDRLSQILTDFPKLDDIHPFYADLMNILYDKDHYKLALGQINIAKNLVDNVAKDYVRLMKYGDSLYRCKQLKRAALGRMCTVIKRQKQSLEYLEQVRQHLSRLPTIDPNTRTLLLCGYPNVGKSSFINKVTRADVDVQPYAFTTKSLFVGHMDYKYLRWQVVDTPGILDHPLEDRNTIEMQAITALAHLRAAVLYVMDLSEQCGHGLREQLELFQNIRPLFINKPLIVVANKCDVKRIAELSEDDQKIFTDLQSEGFPVIETSTLTEEGVIKVKTEACDRLLAHRVETKMKGNKVNEVLNRLHLAIPTRRDDKERPPFIPEGVVARRKRMETEESRKKRERDLELEMGDDYILDLQKYWDLMNLSEKHDKIPEIWEGHNIADYIDPAIMKKLEELEKEEELRTAAGEYDSVSESEDEEMLEIRQLAKQIREKKKLKILESKEKNTQGPRMPRTAKKVQRTVLEKEMRSLGVDMDDKDDAHYAVQARRSRSITRKRKREDSAPPSSVARSGSCSRTPRDVSGLRDVKMVKKAKTMKNAQKKMNRLGKKGEADRHVFDMKPKHLLSGKRKAGKKDRR

SEQ ID NO: 1209 - DNA, 1280 bp, Homo sapien
ggctgcgagaagacgacagaagggggaaggggctgatgcgaactggggccacggtagccatcgcgctttgcagttcggtctcctggtgtacggccaacgccaagtaggggattgcgttccctccagtcgcagaccctatcagatttggatatgtccttcatatttgattggatttacagtggtttcagcagtgtgctacagtttttaggattatataagaaaactggtaaactggtatttcttggattggataatgcaggaaaaacaacattgctacacatgctaaaagatgacagacttggacaacatgtcccaacattacatcccacttccgaagaactgaccattgctggcatgacgtttacaacttttgatctgggtggacatgttcaagctcgaagagtgtggaaaaactaccttcctgctatcaatggcattgtatttctggtggattgtgcagaccacgaaaggctgttagagtcaaaagaagaacttgattcactaatgacagatgaaaccattgctaatgtgcctatactgattcttgggaataagatcgacagacctgaagccatcagtgaagagaggttgcgagagatgtttggtttatatggtcagacaacaggaaaggggagtatatctctgaaagaactgaatgcccgacccttagaagttttcatgtgtagtgtgctcaaaagacaaggttacggagaaggcttccgctggatggcacagtacattgattaacacaaactcacattggttccaggtctcaacgttcaggcttactcagagatttgattgctcaacatgcataacttgaattcaatagacttttgctggttataaaacagatgttttttagattattaatattaaatcaacttaatttgaatgagaattgaaaactgattcaagtaagtttgagtatcacaatgttagctttctaattccataaaagtacttggtttttacagtttataatctgacatcaccccagcgccatttgtaaagagcaactttccagcagtacatttgaagcactttttaacaacatgaaactataaaccatatttaaaagctcatcatgttaaattttttatgtacttttctggaactagtttttaaattttagattatatgtccacctatcttaagtgtacagttaataattagcttattcaatgattgcatgatgccttacagttttcaataactttttttcttatgcaaacgtcatgcaataaaacaaactctaatgtttggcaaaaaaaaaaaaa

SEQ ID NO: 1210 - protein, 198 aa, Homo sapien
MSFIFDWIYSGFSSVLQFLGLYKKTGKLVFLGLDNAGKTTLLHMLKDDRLGQHVPTLHPTSEELTIAGMTFTTFDLGGHVQARRVWKNYLPAINGIVFLVDCADHERLLESKEELDSLMTDETIANVPILILGNKIDRPEAISEERLREMFGLYGQTTGKGSISLKELNARPLEVFMCSVLKRQGYGEGFRWMAQYID

SEQ ID NO: 1211 - DNA, 2555 bp, Homo sapien
cacggggctgcgtggaaagagcgccgagcggtggcgtcgttgtcgccccctcctcgtcgggaagaatcgtttggtctcctgccgtgcccggccggtgctgctgtcgctgctgctgcccgcgcgggttgtggatgttgtcggctccgtgttgtgatgacaggagaatgtgtgtgtgtcccgggcccagacgaattggaatcccagtcagaagttccagcctgccactgttctctgatgccatgccagcaccaactcaactgttttttcctctcatccgtaactgtgaactgagcaggatctatggcactgcatgttactgccaccacaaacatctctgttgttcctcatcgtacattcctcagagtcgactgagatacacacctcatccagcatatgctaccttttgcaggccaaaggagaactggtggcagtacacccaaggaaggagatatgcttccacaccacagaaattttacctcacacctccacaagtcaatagcatccttaaagctaatgaatacagtttcaaagtgccagaatttgacggcaaaatgtcagttctatccttggatttgacagcaatcaagctgcctgcaaatgcacccattgaggaccggagaagtgcagcaacctgcttgcagaccagagggatgcttttgggggtttttgatggccatgcaggttgtgcttggtcccaggcagtcagtgaaagactcttttattatattgctggctctttggtaccccatgagactttgctagagattgaaaatgcagtggagagcggccgggcactgctacccattctccagtggcacaagcaccccaatgattactttagtaaggaggcatccaaattgtactttaacagcttgaggacttactggcaagagcttatagacctcaacactggtgagtcgactgatattgatgttaaggaggctctaattaatgccttcaagaggcttgataatgacatctccttggaggcgcaagttggtgatcctaattcttttctcaactacctggtgcttcgagtggcattttctggagccactgcttgtgtggcccatgtggatggtgttgaccttcatgtggccaatactggcgatagcagagccatgctgggtgtgcaggaagaggacggctcatggtcagcagtcacgctgtctaatgaccacaatgctcaaaatgaaagagaactagaacggctgaaattggaacatccaaagagtgaggccaagagtgtcgtgaaacaggatcggctgcttggcttgctgatgccatttagggcatttggagatgtaaagttcaaatggagcattgaccttcaaaagagagtgatagaatctggcccagaccagttgaatgacaatgaatataccaagtttattcctcctaattatcacacacctccttatctcactgctgagccagaggtaacttaccaccgattaaggccacaggataagtttctggtgttggctactgatgggttgtgggagactatgcataggcaggatgtggttaggattgtgggtgagtacctaactggcatgcatcaccaacagccaatagctgttggtggctacaaggtgactctgggacagatgcatggccttttaacagaaaggagaaccaaaatgtcctcggtatttgaggatcagaacgcagcaacccatctcattcgccacgctgtgggcaacaacgagtttgggactgttgatcatgagcgcctctctaaaatgcttagtcttcctgaagagcttgctcgaatgtacagagatgacattacaatcattgtagttcagttcaattctcatgttgtaggggcgtatcaaaaccaagaaaagtgagtggctctttactggcaattctcaaatgattacatttaaagggcagattttttaaaagatctactataataaacattttcaggtggcattctaagcatttacccttttgatactctaggggcgctccaaattgactttgcagcagggtggcagggcagaagagtctggtcctgcctagctcagatttcatggcacctgcacttgaggcaagcacttctttatcacaggtgtcttgaaacattagcttcttttaccaacctgagaaaattaggatgacctggcaaataagatcttgaatagccaaaagcaagtatcttgctgtgtgtagtctcttggttaaagtgaagaacagtactgttcacacctttcttcactgagattccagtgacatgagaacatatatttattgcatgattttctagtacacagtctatgcattattcatatacatttattttagcctaaagtggttttcaaatccagttcttcaagccataaatgaccaagatccaagcaatctgaatttgtttttgtgattatttgactggaatgcttcttaagtggaataactatactccgttatccacccgatttcctaatgtaattgaaacattttctagtttgccacacacttggagaccgtaagggtttttagtttgatctactcttctattgaagttaaaaaaaaaaaaaaaaaaa

SEQ ID NO: 1212 - protein, 574 aa, Homo sapien
MLSAPCCDDRRMCVCPGPRRIGIPVRSSSLPLFSDAMPAPTQLFFPLIRNCELSRIYGTACYCHHKHLCCSSSYIPQSRLRYTPHPAYATFCRPKENWWQYTQGRRYASTPQKFYLTPPQVNSILKANEYSFKVPEFDGKMSVLSLDLTAIKLPANAPIEDRRSAATCLQTRGMLLGVFDGHAGCAWSQAVSERLFYYIAGSLVPHETLLEIENAVESGRALLPILQWHKHPNDYFSKEASKLYFNSLRTYWQELIDLNTGESTDIDVKEALINAFKRLDNDISLEAQVGDPNSFLNYLVLRVAFSGATACVAHVDGVDLHVANTGDSRAMLGVQEEDGSWSAVTLSNDHNAQNERELERLKLEHPKSEAKSVVKQDRLLGLLMPFRAFGDVKFKWSIDLQKRVIESGPDQLNDNEYTKFIPPNYHTPPYLTAEPEVTYHRLRPQDKFLVLATDGLWETMHRQDVVRIVGEYLTGMHHQQPIAVGGYKVTLGQMHGLLTERRTKMSSVFEDQNAATHLIRHAVGNNEFGTVDHERLSKMLSLPEELARMYRDDITIIVVQFNSHVVGAYQNQEK

SEQ ID NO: 1213 - DNA, 3290 bp, Homo sapien
ccatggagtcagccgggctagagcagctcctacgggagctgctgctaccggacaccgagcgcatccgtcgggccacggaacagctccagatcgttcttcgggcccccgccgctttgccggctctctgcgacctgctagcctcggcggccgacccccagatccgccagtttgcggccgtgctgacccgcagacgactgaacacccgctggcgacggctggcggcggagcaacgggagagcctcaagtccctgatcctgacggccctgcagagagaaacagagcactgtgtgagcctcagcctggcccagctctcagccaccatttttcgaaaggaaggcttggaggcctggccacagcttttgcagctgcttcagcacagtacccacagcccccacagcccagagagagagatggggcttttgctgctaagtgtggtggtgacctcccggcccgaggccttccaaccccaccaccgggagcttcttcggcttctgaatgagactcttggtgaggtgggctctcctgggctgctcttctactccctgcgcactctgaccaccatggctccctacctcagcactgaagatgtgcctctcgctcggatgttggtgcccaagctgatcatggccatgcagactctgatccccatagatgaggcaaaggcctgtgaggcccttgaggctttggatgaactgttggagtcagaggtgccggtcatcaccccctacctctctgaagtcctcacattctgcctggaggtagctagaaatgtggccctgggcaatgcgatacgcatacgtattctctgctgcctcactttcttggtcaaagtcaagagcaaggccttactgaagaatcgtctcctgccacccttgctgcacacccttttccccattgtggctgctgagcccccaccaggccagttggatcccgaggaccaggattcagaagaggaagagttggagattgagctgatgggggagactcccaagcatttcgctgtacaagttgtggacatgctggcactacacctgccccccgagaagctctgtccccagctgatgcccatgttggaagaggctttgcggagcgagagcccataccagcgcaaagctggactcctggtgctggccgtgctgtctgacggagctggcgaccacatcaggcagagactgctgcccccactgctgcagattgtgtgcaagggcctggaggacccctcgcaagttgtacgcaatgctgcgctgtttgccctgggccagttctcagaaaacctacagccccatatcagcagctattcaagggaggtaatgccactgctcctcgcctacttgaagtcggtgcctcttggacacacacaccacctagccaaggcctgctatgccctggagaattttgtggagaacctagggcccaaggtgcagccctaccttccggagcttatggaatgcatgctgcagcttctgaggaaccccagcagtccccgggccaaggagctggctgtgagcgccctgggagccattgctacggctgcccaggtctcgctgctgccctacttccctgccatcatggagcacctgcgggaattcctgttaacaggccgtgaggaccttcagcctgtgcagatccagagcctggagacactgggggtgctggcacgagcagtgggggagcccatgaggccgctggctgaggaatgctgccagctgggtctgggcctctgcgaccaggtagacgacgctgacttgcggcgctgcacgtacagcctatttgcagccttatcgggtctgatgggtgagggcctggcgccccacttggaacagatcaccacgctcatgctgctgtcactgcgttccaccgagggcattgtgcctcagtatgacgggagcagctccttccttctgtttgacgatgagagtgatggggaagaagaggaggagctcatggatgaggatgtggaagaagaggatgactcagagatctcagggtacagcgtggagaatgccttcttcgatgagaaggaagacacctgtgctgccgtgggggagatctctgtgaacaccagtgtggccttccttccatacatggaaagtgtctttgaagaagtatttaaactgctggagtgccctcacctgaatgtgcggaaggcagcccatgaggctctgggtcagttttgctgtgcactgcacaaggcctgtcaaagctgcccctcggaacccaacactgctgctttgcaggctgccctggcccgagtcgtgccatcctacatgcaggcagtgaacagggagcgggaacgccaggtggtgatggccgtgctggaggccctgacaggggtgctccgcagctgtgggaccctcacactgaagccccctgggcgcctcgctgagctctgtggcgtgctcaaggctgtgctgcagaggaagacagcctgtcaggatactgacgaggaggaggaagaggaagatgatgatcaggctgaatacgacgccatgttgctggagcacgctggagaggccatccctgccctggcagccgcggctgggggagactcctttgccccattctttgccggtttcctgccattattggtgtgcaagacaaaacagggctgcacagtggcagagaagtcctttgcagtggggaccttggcagagactattcagggcctgggtgctgcctcagcccagtttgtgtctcggctgctccctgtgctgttgagcaccgcccaagaggcagaccccgaggtgcgaagcaatgccatcttcgggatgggcgtgctggcagagcatgggggccaccctgcccaggaacacttccccaagctgctggggctcctttttcccctcctggcgcgggagcgacatgatcgtgtccgtgacaacatctgtggggcacttgcccgcctgttgatggccagtcccaccaggaaaccagagccccaggtgctggctgccctactgcatgccctgccactgaaggaggacttggaggagtgggtcaccattgggcgcctcttcagcttcctgtaccagagcagccctgaccaggttatagatgtggctcccgagcttctgcgtatctgcagcctcattctggctgacaacaagatcccaccagacaccaaggccgcactgttgctgctcctgacgttcctggccaaacagcacaccgacagctttcaagcagctctgggctcactgcctgttgacaaggctcaggagctccaggctgtactgggcctctcctagactgcaggctgcagccagtccagagagaatagagcctgccca

SEQ ID NO: 1214 - protein, 1081 aa, Homo sapien
MESAGLEQLLRELLLPDTERIRRATEQLQIVLRAPAALPALCDLLASAADPQIRQFAAVLTRRRLNTRWRRLAAEQRESLKSLILTALQRETEHCVSLSLAQLSATIFRKEGLEAWPQLLQLLQHSTHSPHSPEREMGLLLLSVVVTSRPEAFQPHHRELLRLLNETLGEVGSPGLLFYSLRTLTTMAPYLSTEDVPLARMLVPKLIMAMQTLIPIDEAKACEALEALDELLESEVPVITPYLSEVLTFCLEVARNVALGNAIRIRILCCLTFLVKVKSKALLKNRLLPPLLHTLFPIVAAEPPPGQLDPEDQDSEEEELEIELMGETPKHFAVQVVDMLALHLPPEKLCPQLMPMLEEALRSESPYQRKAGLLVLAVLSDGAGDHIRQRLLPPLLQIVCKGLEDPSQVVRNAALFALGQFSENLQPHISSYSREVMPLLLAYLKSVPLGHTHHLAKACYALENFVENLGPKVQPYLPELMECMLQLLRNPSSPRAKELAVSALGAIATAAQVSLLPYFPAIMEHLREFLLTGREDLQPVQIQSLETLGVLARAVGEPMRPLAEECCQLGLGLCDQVDDADLRRCTYSLFAALSGLMGEGLAPHLEQITTLMLLSLRSTEGIVPQYDGSSSFLLFDDESDGEEEEELMDEDVEEEDDSEISGYSVENAFFDEKEDTCAAVGEISVNTSVAFLPYMESVFEEVFKLLECPHLNVRKAAHEALGQFCCALHKACQSCPSEPNTAALQAALARVVPSYMQAVNRERERQVVMAVLEALTGVLRSCGTLTLKPPGRLAELCGVLKAVLQRKTACQDTDEEEEEEDDDQAEYDAMLLEHAGEAIPALAAAAGGDSFAPFFAGFLPLLVCKTKQGCTVAEKSFAVGTLAETIQGLGAASAQFVSRLLPVLLSTAQEADPEVRSNAIFGMGVLAEHGGHPAQEHFPKLLGLLFPLLARERHDRVRDNICGALARLLMASPTRKPEPQVLAALLHALPLKEDLEEWVTIGRLFSFLYQSSPDQVIDVAPELLRICSLILADNKIPPDTKAALLLLLTFLAKQHTDSFQAALGSLPVDKAQELQAVLGLS

SEQ ID NO: 1215 - DNA, 644 bp, Homo sapien
gctccctggggaacccagcaggcggcgaagatggcggagaacagcggtcgcgccggcaagagcagcgggagcggcgcggggaagggggcggtgtccgcagagcaggtgattgctggcttcaaccgccttcggcaggaacagcgaggcctggcatccaaagcagctgagttggagatggagttgaatgagcacagcctagtgatcgatacactgaaggaggtagatgaaactcgtaagtgctaccgcatggttggaggagtgctggtggagcgaactgtcaaagaggtgctgcccgctttggagaacaacaaggagcagatacagaagatcattgagacactgacacagcagcttcaggcaaagggaaaagaactaaatgaattccgggaaaagcacaacattcgtctcatgggagaagatgagaagccagcagccaaggaaaactcagaaggggctggggctaaggccagctcagctggagtgttggtctcctagggaccaaggcctttgcatttttttctaccctgactcccacttctaatttctctttattgttattattattattttctctgctattgtaatatttttttgttaattaaatgttttggtcagaatcttaaaaaaaaaaaaaaaaaaaaaaa

SEQ ID NO: 1216 - protein, 154 aa, Homo sapien
MAENSGRAGKSSGSGAGKGAVSAEQVIAGFNRLRQEQRGLASKAAELEMELNEHSLVIDTLKEVDETRKCYRMVGGVLVERTVKEVLPALENNKEQIQKIIETLTQQLQAKGKELNEFREKHNIRLMGEDEKPAAKENSEGAGAKASSAGVLVS

SEQ ID NO: 1217 - DNA, 735 bp, Homo sapien
ggcttccgtagcgggagggcgaaagatggcggcggcagtactgggacagttgggtgcgttatggatacataacctgaggagccgggggaagctggccttgggtgttttacctcaatcatatatccacacaagtgcttctcttgacatttctcgaaaatgggagaagaagaataaaattgtttatcctccacaactgcctggagaacctcggagaccagcagaaatctaccactgtcgaagacaaataaaatatagcaaagacaagatgtggtatttggcaaaattgatacgaggaatgtctattgaccaggctttggctcagttggaattcaatgacaaaaaaggggccaaaataattaaagaggttctcttagaagcacaagatatggcagtgagagaccataacgtggaattcaggtccaatttatatatagctgagtccacctcaggacgaggccagtgcctgaaacgcatccgctaccatggcagaggtcgctttgggatcatggagaaggtttattgccattattttgtgaagttggtggaagggcccccacctccacctgagccaccaaagacggcagttgcccatgccaaagagtatattcagcagcttcgcagccggaccatcgttcacactctatgatgaggagattcagactccacagtgtatatattttgccatttattttctaaaaataaacaaaaattgaaggcaaaaaaaaaaaaaaaaaa

SEQ ID NO: 1218 - protein, 206 aa, Homo sapien
MAAAVLGQLGALWIHNLRSRGKLALGVLPQSYIHTSASLDISRKWEKKNKIVYPPQLPGEPRRPAEIYHCRRQIKYSKDKMWYLAKLIRGMSIDQALAQLEFNDKKGAKIIKEVLLEAQDMAVRDHNVEFRSNLYIAESTSGRGQCLKRIRYHGRGRFGIMEKVYCHYFVKLVEGPPPPPEPPKTAVAHAKEYIQQLRSRTIVHTL

SEQ ID NO: 1219 - DNA, 2785 bp, Homo sapien
gatccgccaccatggctgaaggagagaatgaagtgagatgggatggactctgcagcagagattcaactactagggagacagcattggaaaacattaggcaaaccattttgaggaaaaccgagtatcttcgttcggtgaaagaaacacctcatcgtccatcagacgggctttcaaataccgagtcttcggatgggttgaataagctacttgctcatctgcttatgctttctaagaggtgtcccttcaaagatgtgagagagaaaagtgagtttattctgaagagcatccaggaacttggcattagaattcctcgaccactaggacagggaccaagcagattcatcccagaaaaggagatcctccaagtggggagtgaagacgcacagatgcatgctttatttgcagattcttttgctgctttgggccgtttggataacattacgttagtgatggttttccacccacaatatttagaaagtttcttaaaaactcagcactatctactgcaaatggatgggccgttacccctacattatcgtcactacattggaataatggctgcggcaagacatcagtgctcctacttagtgaacctgcatgtaaatgatttccttcatgttggtggggaccccaagtggctcaatggtttagagaatgctcctcaaaaactacagaatttaggagaacttaacaaagtgttagcccatagaccttggcttattaccaaagaacacattgagggacttttaaaagctgaagagcacagctggtcccttgcggaattggtacatgcagtagttttactcacacactatcattctcttgcctcattcacattcggctgtggaatcagtccagaaattcattgtgatggtggccacacattcagacctccttctgttagcaactactgcatctgtgacattacaaatggcaatcacagtgtggatgagatgccggtcaactcagcagaaaatgtttctgtaagtgattctttctttgaggttgaagccctcatggaaaagatgaggcagttacaggaatgtcgagatgaagaagaggcaagtcaggaagagatggcttcacgttttgaaatagaaaaaagagagagtatgtttgtcttctcttcagatgatgaagaagttacaccagcaagagctgtatctcgtcattttgaggatactagttatggctataaagatttctctagacatgggatgcatgttccaacatttcgtgtccaggactattgctgggaagatcatggttattctttggtaaatcgcctttatccagatgtgggacagttgattgatgaaaaatttcacattgcttacaatcttacttataatacaatggcaatgcacaaagatgttgatacctcaatgcttagacgggcaatttggaactatattcactgcatgtttggaataagatatgatgattatgactatggtgaaattaaccagctattggatcgtagctttaaagtttatatcaaaactgttgtttgcactcctgaaaaggttaccaaaagaatgtatgatagcttctggaggcagttcaagcactctgagaaggttcatgttaatctgcttcttatagaagctaggatgcaagcagaactcctttatgctctgagagccattacccgctatatgacctgatgcctttccttcattaaagatgattctggaatgatcagcagatatagtctacaagggggaaggtactaagccccaggaccaatggtagacaaaataattcagaaatccattgtgccatgattcctttagtttctgctatttttctgtggaaaaccactgctggcacaagcagtgactgtttggcagcttcaagtttagagctgtgaagacaggctgccattcacagtattttgctttttgacagtacaagatgctgtgtaactgttttaatacagcaaatagtaactctccaaatcctgttgcttttatgttaaataagataacaagaattggagcatgcaaagaatgggacttggataatgacttaagctttatatgtaaagaattttagaagatcttggtgctgctattcctgctggaggaatgaatagatggctgtttcagttaagctattagtaataaaagtgaacattgctactatctgagcctacatacataacttgtgtgatttcaaattaaacttgcattatgtgttaattttcttgcatctaaaaaagcatagaattcctactcacacagctcagcaacaaccattttgatggtaacagttaatttctttcattagttttttaaattcagggttctggatattaaattaaaatggcattcttaaagattttcttcaaaaagcaatcctaaatgaaagtgtgtaaattataagaagctggcgatcttttgatatgctgtttcacaggatcctgacactggagggcagctgtcttgtgcattacttgtgttcccagcaccaaagttgtgggacatgttgctgtagactgctgcgcagtcctgggtgcattcagtctctctgcctctgcctgcctcctggtccccactttaaaggctgtgcagctccttaaataataaagctggaaaatatttttagtcgggttatcaaatttgatttacaaaaacgctaactttgtttgaaatgcaaacaggtttgaaaatatgtattaagtactttgtattctggaagcgtgaattgcttttgaagtctgtcagtattactggtatttttaaataaagaagaatttttctccaaaaaaaaaaaaaaaaaa

SEQ ID NO: 1220 - protein, 551 aa, Homo sapien
MAEGENEVRWDGLCSRDSTTRETALENIRQTILRKTEYLRSVKETPHRPSDGLSNTESSDGLNKLLAHLLMLSKRCPFKDVREKSEFILKSIQELGIRIPRPLGQGPSRFIPEKEILQVGSEDAQMHALFADSFAALGRLDNITLVMVFHPQYLESFLKTQHYLLQMDGPLPLHYRHYIGIMAAARHQCSYLVNLHVNDFLHVGGDPKWLNGLENAPQKLQNLGELNKVLAHRPWLITKEHIEGLLKAEEHSWSLAELVHAVVLLTHYHSLASFTFGCGISPEIHCDGGHTFRPPSVSNYCICDITNGNHSVDEMPVNSAENVSVSDSFFEVEALMEKMRQLQECRDEEEASQEEMASRFEIEKRESMFVFSSDDEEVTPARAVSRHFEDTSYGYKDFSRHGMHVPTFRVQDYCWEDHGYSLVNRLYPDVGQLIDEKFHIAYNLTYNTMAMHKDVDTSMLRRAIWNYIHCMFGIRYDDYDYGEINQLLDRSFKVYIKTVVCTPEKVTKRMYDSFWRQFKHSEKVHVNLLLIEARMQAELLYALRAITRYMT

SEQ ID NO: 1221 - DNA, 2480 bp, Homo sapien
atagttgaccagcttctgcaggggctcctcagtgagagaatggaggtgaggtcagggactcctgccttgcctctgccatcacttccagtgatgcctattcctaagattgatcgtgtcctgtgctgaagatgtttccggaacaacagaaagaggaatttgtaagtgtctgggttcgagatcctaggattcagaaggaggacttctggcattcttacattgactatgagatatgtattcatactaatagcatgtgttttacaatgaaaacatcctgtgtacgaagaagatatagagaattcgtgtggctgaggcagagactccaaagtaatgcgttgctggtacaactgccagaacttccatctaaaaacctgtttttcaacatgaacaatcgccagcacgtggatcagcgtcgccagggtctggaagatttcctcagaaaagtcctacagaatgcacttttgctttcagatagcagccttcacctcttcttacagagccatctgaattcagaagacattgaggcgtgtgtttctgggcagactaagtactctgtggaagaagcaattcacaagtttgccttaatgaatagacgtttccctgaagaagatgaagaaggaaaaaaagaaaatgatatagattatgattcagaaagttcatcctctgggcttggacacagtagtgatgacatcagttcacatggatgtaaagtaaatacagctccgcaggaatcctgaaaaataattctaatgttactatcttaggaatagcaaattatgtccagtcatagagaagaaagcttcataataatacattcttacctaaagctcactgtcatgatgttaggtatttaaattcttaaagatgttgggttgtttattagtggtatttttatgttgtcttattttaggtaagcttctgtgtaaagctaaaaatcctgtgaatacaatactatcctttacaggcagacattattggtaaacaagatcttgccctccaatgaaatgacttacatgttttaaaaaaccgagttggttttattgaatttaaaaagataggtaactaagtagcatttaaaatcaagatagagcattccttcttgtatcagtggggcagtgttaccataaacacggtgtatatgttgttaaaccctatgaagagtaacagtgtagaccagactgcctctctcagatatgtgcctgatattttgtggatacctcccctgcactggcaaaacactatgcttttgggtgttagactgaaatattttaagagtatttaacctttccagtattctgtttcacgcttagatggaaatgtatcttatgaatagagacatattaaaataatgtttacatcttagaaaaaacatagatagtgctagtaatattacttataactgtaatatatagattcagaaatacattttcattatccaaaatcagcttcaacaaatggtttctggagacaaataatttgttttcattatcattgtataatcaggttaatgatttattttttgactaaatgtgcaatttcttatcactagataactttcagtatcagtggtggttacttattacttaaatcagaggaaggattttataaagattaataaatttaattttaccaataaatattcccataatttagaaaaggatgtcgacttgctaatttcagaaataattattcatttttaaaaagccccttttaaagcatctacttgaagattggtataattttcataaaatgtctttttttttagtgtcccaaagatatcttagataaactattttgaagttcagatttcagatgaggcaacattttcttgagataattacccaagtttcatccatgttgaatggtacaaaatatttctgtgaaactaacaggaagatattttcagataactaggataacttgttgctttgttacccagcctaattgaagagtggcagaggctactacaaaaagcaaccttttcattttcactaagagtttaaaagctattgtattattaaaaagtctttacaatgcttgtttcaaagaaccaacagaaaaaaaagctaagaaaactgagaactaacattaaaaaaattaaatttagaataagaatgatttctttaatttgtcctttttttctttggtctaaaacattattaaatttttgtaaatattttgatttaatgtgtcttagatcctcattattttaatacaggaaaagaaaagatttagtaatttcttaccatgctaatatgtaaagttcatgccatccaggcatttaagagcgatcctcatcccttcagcaatatgtatttgagttcacactatttctgttttacagcagttttgaaaaacacatactatgccaccaattgtcatattatttttagatgatgtaacatagccatcaaaattaatattatgtaatgcctaatacttagtatgtaaatgtcacgagatcatttttacattaaacgtga

SEQ ID NO: 1222 - protein, 201 aa, Homo sapien
MFPEQQKEEFVSVWVRDPRIQKEDFWHSYIDYEICIHTNSMCFTMKTSCVRRRYREFVWLRQRLQSNALLVQLPELPSKNLFFNMNNRQHVDQRRQGLEDFLRKVLQNALLLSDSSLHLFLQSHLNSEDIEACVSGQTKYSVEEAIHKFALMNRRFPEEDEEGKKENDIDYDSESSSSGLGHSSDDISSHGCKVNTAPQES

SEQ ID NO: 1223 - DNA, 4445 bp, Homo sapien
gcgccgcctcccgcagcccgccgcccgccgcccgccgcccgggccactgcaggggccgctaacggtccggcgcccctcggcgtccgcgcgcccccagcctggcggacgagcccggcggcggagatgggggcgacgggggcggcggagccgctgcaatccgtgctgtgggtgaagcagcagcgctgcgccgtgagcctggagcccgcgcgggctctgctgcgctggtggcggagcccggggcccggagccggcgcccccggcgcggatgcctgctctgtgcctgtatctgagatcatcgccgttgaggaaacagacgttcacgggaaacatcaaggcagtggaaaatggcagaaaatggaaaagccttacgcttttacagttcactgtgtaaagagagcacgacggcaccgctggaagtgggcgcaggtgactttctggtgtccagaggagcagctgtgtcacttgtggctgcagaccctgcgggagatgctggagaagctgacgtccagaccaaagcatttactggtatttatcaacccgtttggaggaaaaggacaaggcaagcggatatatgaaagaaaagtggcaccactgttcaccttagcctccatcaccactgacatcatcgttactgaacatgctaatcaggccaaggagactctgtatgagattaacatagacaaatacgacggcatcgtctgtgtcggcggagatggtatgttcagcgaggtgctgcacggtctgattgggaggacgcagaggagcgccggggtcgaccagaaccacccccgggctgtgctggtccccagtagcctccggattggaatcattcccgcagggtcaacggactgcgtgtgttactccaccgtgggcaccagcgacgcagaaacctcggcgctgcatatcgttgttggggactcgctggccatggatgtgtcctcagtccaccacaacagcacactccttcgctactccgtgtccctgctgggctacggcttctacggggacatcatcaaggacagtgagaagaaacggtggttgggtcttgccagatacgacttttcaggtttaaagaccttcctctcccaccactgctatgaagggacagtgtccttcctccctgcacaacacacggtgggatctccaagggataggaagccctgccgggcaggatgctttgtttgcaggcaaagcaagcagcagctggaggaggagcagaagaaagcactgtatggtttggaagctgcggaggacgtggaggagtggcaagtcgtctgtgggaagtttctggccatcaatgccacaaacatgtcctgtgcttgtcgccggagccccaggggcctctccccggctgcccacttgggagacgggtcttctgacctcatcctcatccggaaatgctccaggttcaattttctgagatttctcatcaggcacaccaaccagcaggaccagtttgacttcacttttgttgaagtttatcgcgtcaagaaattccagtttacgtcgaagcacatggaggatgaggacagcgacctcaaggagggggggaagaagcgctttgggcacatttgcagcagccacccctcctgctgctgcaccgtctccaacagctcctggaactgcgatggggaggtcctgcacagccctgccatcgaggtcagagtccactgccagctggttcgactctttgcacgaggaattgaagagaatccgaagccagactcacacagctgagaagccggcgtcctgctcacaaactgggaaagtgtgaaaactatttaagataattattacagaccaattatgttgatatatacatttaaatgtagaaatttatttttgatagttaaatcttgattttagaagaaaacccttttgtcaacaattttgtgtacatatttggcattttcagttctgtacgcatctgcgggttgcagcccacgccgcttactctcagcggatgcagctgctcacttgggggcactggcctcttaggttttaacgatgtcaacagtgtagtttagaaaatggcccgttagtggctctattgcaataatgttagggacattatatgatttccacgcaggtcacaccatctgggcctgaggtagcagtgggtcactttgatccactttgcaggacttattctgtaacggtttgtggccaagttttgggaagtggttgattatctttgccttcatttcaccttcctcttcgtttacggttaggacatcgctgcttgatccttacaatactgtgcaactgcaatgcaacgtggccctgcttcaggtgatccgcgggaggggcctccacgccagcgccgggaaggctgctggggcctccacacctgcctcatcacggcggcgaggctacgacaatccggctgggagcatgaccttggcgtctgttctgggagcacagatgataagctctggaagctggcagtgtgtaaagcactggcaagtttgttactgttaaaatgtcaaataccaatgctttatatcgacgcgaagtgcttaacacagccgggcttgggggcagtcaggaggaagctggccatccgtggaggaggggccggtcctggactcccgcaggactcctctgatgcagggcctgaagtctgtacacgtggtccagatttgtccttgtcttttcttcacactgagttctctatatttattgaacatcttgtccttttaagccagagtagtgtaaactgcgtctcggatgtctgtcttttgtctcgaagccacgatggatcgctggtttcctctgcagcgcaagggctccggcgaccagaggattcttcccggaaggcattcctgccgcgctccccggggcacccctcaattgtgtactacgtccttgtttagtgtgtatccgtgcccacgtagatgatgtctgtaacgcagttttgtttgaaatatgagaatatgcggcttaaactttgatctgtaaggagcggggccgtggccgtttggagcacgctgtagacaccgttcctcatgctgccgggtgggttttgcagaagctcccttagtgatttcacgtttaacaggcagcatccattttcagaatttcctggcattgatttatattttgaagcatacaggaaacttctcgtttcctcgtttagccccacccagatcaggtgaaagggcagctttaatggtggtttttatggaccacattatcagagagcactgtgcaagccaaatggttcaataatgaatgaaaattctgggtgtaaagagtaaatatgccctggctctttctaccaatgtttgctcctggttggaaagaaaccaaagatttaagacgggctgctcttccagactggctgtgcctgcctgtgcccagcaacctgtgcagccggcagtgtgcctggtgtcacgccaggaggctgtggctgctgtgggccctctggaattgtgctcctcacaaagtttccccaaaaggttcttctaagcctttattgtccctggtaaatgtttcccggctgggcgcggtggctcacgcctgtaatcccagcactttgggaggccgaggcgggtggatcacctaaggtcaggagtttgagatcagcctgcccaacatggtgaaacctcgtctctactaaaaatacacaacttagccagtcttgttggcgcacgcctgtaatctcagctactagggacgctgaggcaggagaatcgcttgaacccaagaggtggaggttgcggtgagccaagattgcgccactgcactccagcctgggcaacagagggagactccatcgccccccctcaacaacaaaaaaagtttcccatacactggcctgccccaaaacccactaacaattttagcaaaacagtccaggccaaagaggaagcatttcatgttcaataagaaacccagccattccgcatggctggttcctgagtggctctggtgatactctccagccacctgctgacattcagaatctcagacctcgggactgctgttgcggtaccgtgtgtctgacacctgccagcagccctttgctatctgcgcgcaggatgggggtgactgcccagacattcccgctagataggctctgatttccggggcagcctttcagatgcggcagacatacaacacctgtactttagagttttaagggaaaaaaaaatcagaagtgctggttagatagtaaaaacttaggataacttagaaaggctagttttagcttcctttgtggctccctggtgcaaaacaattagcagttatgcaatggacctgattctagtttattctaattaagaagtgaggccgggtttgacttcgttcctgaatacaatcttgagtaactgggaaagtctgagtgaaaggatggcctcattctctttctaatcttgctggtttcaagattagaaaatggcattatttgatctgaaatgtttgagaagacacgaataaag

SEQ ID NO: 1224 - protein, 531 aa, Homo sapien
MGAMGAAEPLHSVLWVKRRRCAVSLEPARALLRWWRSPEPGPSAPGADARSVLVSEIIAVEEKDDCEKHASSGRWHKMENPFAFTVHRVKRVRHHRWKWARVTFWSADEQLCHLWLQTLRGLLESLTSRPKHLLVFINPFGGKGQGKRIYEKTVAPLFTLASITTEIIITEHANQAKETLYEINTDSYDGIVCVGGDGMFSEVLHGVIGRTQQSAGIDPNHPRAVLVPSTLRIGIIPAGSTDCVCYSTVGTNDAETSALHIIIGDSLAIDVSSVHYHNTLLRYSVSLLGYGFYGDLIKDSEKKRWMGLVRYDFSGLKTFLSHQYYEGTLSFLPAQHTVGSPRDNKPCRAGCFVCRQSKQQLEEEEKKALYGLENAEEVEEWQVTCGKFLAINATNMSCACPRSPGGLSPFAHLGDGSSDLILIRKCSRFNFLRFLIRHTNQEDQFDFTFVEVYRVKKFHFTSKHVEDEDNDSKEQEKQKFGKICKDRPSCTCSASRSSWNCDGEVMHSPAIEVRVHCQLVRLFARGIEEES

SEQ ID NO: 1225 - DNA, 3561 bp, Homo sapien
ccggctgtcggtctccgtgtcgccgccgccgcccggcatcgtggagctggggcccccttttgcctgggagttttgtagtcgcctagggtcagcggtgacatcccaaagggcaggcccggcagccgccatggtggccaaggattaccccttctacctcacggtcaagagagcgaactgcagcctggagctacctccggccagcggtccggccaaggacgctgaggagcctagtaataaacgggtcaaacccctttcccgagtcacgtcgctagcaaacctcatcccgcccgtgaaggccacgccattaaagcgcttcagtcaaaccctgcagcgctccattagcttccgcagtgagagccgccctgacatcctcgccccccgaccctggtccagaaatgccgccccctcgagcacgaaacggagagatagcaagctgtggagtgagaccttcgatgtgtgcgtcaatcagatgcttacatccaaggaaatcaaacgtcaggaggcgatctttgagctttcccaaggagaagaagacttgatagaagacttgaaattagcaaaaaaggcctatcatgaccccatgctgaaactctccataatgacagaacaagagttgaatcaaatttttggaacactggactctctaattcctctacatgaagagctccttagtcagcttcgagatgttaggaagcctgatggctcgactgaacatgttggtcccatcctcgtgggctggctcccttgcctcagctcctatgatagctactgcagcaatcaagtagccgccaaagctctgctggaccacaaaaagcaagatcaccgagtccaggatttcctacagcgatgtttagaatccccctttagccgcaaactagatctctggaatttcctcgatattccaagaagccgcctggtaaaataccctctgcttctccgagaaatcttgaggcacacaccaaatgataatccagatcagcagcacttggaagaagctataaatatcattcagggaattgtggcagaaatcaacaccaagactggtgaatctgaatgccgctattataaagagcggcttctttacttggaagaaggccagaaagactccctgatcgacagctctcgagtcttgtgttgtcatggtgaactgaagaacaatcggggcgtgaaactgcatgttttcctgttccaagaagtgcttgtgatcactcgagccgtcacccacaatgagcagctttgctaccagctgtaccgtcagccaatccccgtgaaagacctcctgctggaagacctccaggatggagaagtgaggctgggtggctccctgcgaggggcattcagcaacaatgagagaattaaaaacttcttcagagtcagtttcaaaaatggatcccaaagtcagacccactcgctacaagccaatgacactttcaacaaacagcagtggcttaactgtattcgtcaagccaaagaaacagttttgtgtgctgccgggcaagctggggtgcttgactccgagggatcgttcctaaatcccaccaccgggagcagagagctacagggagaaacaaaacttgagcagatggaccaatcggacagtgagtcagactgtagtatggacacgagtgaggtcagcctcgactgtgagcgcatggaacagacagactcttcctgtggaaacagcaggcacggtgaaagtaacgtctgacagaagcatgtgcacttcgggaagcaggcctgcatcttacctgtacagtatttgcattccacagatggaacggtttggagaagcactttttcatacttttgtgaaagtatacatgttggcccagtctctcgtatctgtacctttgtccctagtactgtaactgccaatctgtctgtgtaagctggaatctgtggcaactattaccctgtgttgtatttcccaagtgtctggatggatggagaggtactcaaacaagttactttcagttgtcctgctggattttaaaaaaatagaaaaagaatctcaaaactactgttttacatagattgtttgaagagtccttcctcttgtgcttctgtaccactttcccagctcttagatgtggtagctaaaggcacggaatttagacggccttgtaaatagggcatgaggaactcatctgtgtattgggatggtattagagagagaatcaggaaagaccaactcatgaagtgaacttggtttgatcttactcaactagaaagcttgaaaacatccctggggattctgaaggcttaattttgcaaaggaggatgcattgtctgaactttgcaacttcatccagtgcaagtttgatgcaagaatgtattaggacataaaatagaggctgaccttaaaagggccaggacagaagcggctgccagctctgaatctttaactgaaatgcacatggcaccaggaggtgtctctcatagttggttgctagcctaaaacatcagaatagaacccaaagggcttaggaaggcctgccaggataacaagaaggccctgtattcattgtgtttcatctgcctaggcctactcattattttagagaatgaatgaagcaacaaggaagagagaacatgactctatcgatgacactgtttatagaaacacaggagaggaagaatttggaatgaaaagcacttcgtcagaaccttctgtgggagccattgagagaaaagcatggtccagtgccttctgagaaaggccagagctttgggctttcctgctctgcttttgggtcgtcaatttgccatctctggttctgtgctataatcagaattgtaattatgttctccagaggccaatttcattaactctgattaattagaatcagctagccagattagtaacctctttgtccagccttgatttacagtgcagggtaaagtgcagaccttaaaaacagctaagtacctagaagagctccctgcaagtgtaaatattaaggatgacctgtgcaaaattatacccacaccagcactagtggtaattattctaaattattgccaaaaagttttttttaatctgtctttcaagtttacagaaaagaaagcagtaaatgcattgatgtcattttattatgtacatatatcatgtgcattcaagctgtgtgacaagatatatcaatataaaaacaaggtatatactttattattttttgaaaacaaggatattgtgatcaattttaccctgtaaaacatatttctgtatttataggtcttaaacatgatgaattttttctattacaagtttatttaaaactgctttctcaagtcgttattgatacagcaagtgaacctgctgcagacagaagcagaggaaagccaagaacagcctttattggtgaagaaaagaatgaatgattctttgtaggcgccatcagccacttttagaagccatcagccagtgtgttgggaaaagaggtttgtcaagtgttggcctatgggaaggtggtcaatgaatgttttgatgaaatgaatgtttttgtataatggccttaaacttttctggaagtatttcaaataaattacattattaagtcatca

SEQ ID NO: 1226 - protein, 526 aa, Homo sapien
MVAKDYPFYLTVKRANCSLELPPASGPAKDAEEPSNKRVKPLSRVTSLANLIPPVKATPLKRFSQTLQRSISFRSESRPDILAPRPWSRNAAPSSTKRRDSKLWSETFDVCVNQMLTSKEIKRQEAIFELSQGEEDLIEDLKLAKKAYHDPMLKLSIMTEQELNQIFGTLDSLIPLHEELLSQLRDVRKPDGSTEHVGPILVGWLPCLSSYDSYCSNQVAAKALLDHKKQDHRVQDFLQRCLESPFSRKLDLWNFLDIPRSRLVKYPLLLREILRHTPNDNPDQQHLEEAINIIQGIVAEINTKTGESECRYYKERLLYLEEGQKDSLIDSSRVLCCHGELKNNRGVKLHVFLFQEVLVITRAVTHNEQLCYQLYRQPIPVKDLLLEDLQDGEVRLGGSLRGAFSNNERIKNFFRVSFKNGSQSQTHSLQANDTFNKQQWLNCIRQAKETVLCAAGQAGVLDSEGSFLNPTTGSRELQGETKLEQMDQSDSESDCSMDTSEVSLDCERMEQTDSSCGNSRHGESNV

SEQ ID NO: 1227 - DNA, 1720 bp, Homo sapien
agaagggcaacctcgtgctttctgcagaggagaccggagggcagaaggcagagtccaggcttagactgcagttcctcgcttacctgtgcagtctaattttgagctgcctctttgtagtcttaaaaggcaggagcttcgtgttgtgggtctgctaacccgtacgtttccgtgggcaagtcgtgtgtactcctcgccatggctcagctccaaacacgcttctacactgataacaagaaatatgccgtagatgatgttcccttctcaatccctgctgcctctgaaattgccgaccttagtaacatcatcaataaactactaaaggacaaaaatgagttccacaaacatgtggagtttgatttccttattaagggccagtttctgcgaatgcccttggacaaacacatggaagtggagaacatctcatcagaagaagttgtggaaatagaatacgtggagaagtgtaccgcaccccagccagagcaatgcatgttccatgatgactggatcagttcaattaaaggggcagaggaatggatcttgactggttcttatgataagacttctcggatctggtccttggaaggaaagtcaataatgacaattgtgggacatacggatgttgtaaaagatgtggcctgggtgaaaaaagatagtttgtcctgcttattattgagtgcttctatggatcagactattctcttatgggagtggaatgtagagagaaacaaagtgaaagccctacactgctgtagaggtcatgctggaagtgtagattctatagctgttgatggctcaggaactaaattttgcagtggctcctgggataagatgctaaagatctggtctacagtccctacagatgaagaagatgaaatggaggagtccacaaatcgaccaagaaagaaacagaagacagaacagttgggactaacaaggactcccatagtgaccctctctggccacatggaggcagtttcctcagttctgtggtcagatgctgaagaaatctgcagtgcatcttgggaccatacaattagagtgtgggatgttgggtctggcagtcttaagtcaactttgacaggaaataaagtgtttaattgtatttcctattctccactttgtaaacgtttagcatctggaagcacagataggcatatcagactgtgggatccccgaactaaagatggttctttggtgtcgctgtccctaacgtcacatactggttgggtgacatcagtaaaatggtctcctacccatgaacagcagctgatttcaggatctttagataacattgttaagctgtgggatacaagaagttgtaaggctcctctctatgatctggctgctcatgaagacaaagttctgagtgtagactggacagacacagggctacttctgagtggaggagcagacaataaattgtattcctacagatattcacctaccacttcccatgttggggcatgaaagtgaacaataatttgactatagagattatttctgtaaatgaaattggtagagaaccatgaaattacatagatgcagatgcagaaagcagccttttgaagtttatataatgttttcacccttcataacagctaacgtatcactttttcttattttgtatttataataagataggttgtgtttatgaaatacaaactgtggcatacattctctatacaaacttgaaattaaactgagttttacatttctcttt

SEQ ID NO: 1228 - protein, 423 aa, Homo sapien
MAQLQTRFYTDNKKYAVDDVPFSIPAASEIADLSNIINKLLKDKNEFHKHVEFDFLIKGQFLRMPLDKHMEVENISSEEVVEIEYVEKCTAPQPEQCMFHDDWISSIKGAEEWILTGSYDKTSRIWSLEGKSIMTIVGHTDVVKDVAWVKKDSLSCLLLSASMDQTILLWEWNVERNKVKALHCCRGHAGSVDSIAVDGSGTKFCSGSWDKMLKIWSTVPTDEEDEMEESTNRPRKKQKTEQLGLTRTPIVTLSGHMEAVSSVLWSDAEEICSASWDHTIRVWDVGSGSLKSTLTGNKVFNCISYSPLCKRLASGSTDRHIRLWDPRTKDGSLVSLSLTSHTGWVTSVKWSPTHEQQLISGSLDNIVKLWDTRSCKAPLYDLAAHEDKVLSVDWTDTGLLLSGGADNKLYSYRYSPTTSHVGA

SEQ ID NO: 1229 - DNA, 1240 bp, Homo sapien
tgcgcgtgcgcagggataagagagcggtctggacagcgcgtggccggcgccgctgtggggacagcatgagcggcggttggatggcgcaggttggagcgtggcgaacaggggctctgggcctggcgctgctgctgctgctcggcctcggactaggcctggaggccgccgcgagcccgctttccaccccgacctctgcccaggccgcaggccccagctcaggctcgtgcccacccaccaagttccagtgccgcaccagtggcttatgcgtgcccctcacctggcgctgcgacagggacttggactgcagcgatggcagcgatgaggaggagtgcaggattgagccatgtacccagaaagggcaatgcccaccgccccctggcctcccctgcccctgcaccggcgtcagtgactgctctgggggaactgacaagaaactgcgcaactgcagccgcctggcctgcctagcaggcgagctccgttgcacgctgagcgatgactgcattccactcacgtggcgctgcgacggccacccagactgtcccgactccagcgacgagctcggctgtggaaccaatgagatcctcccggaaggggatgccacaaccatggggccccctgtgaccctggagagtgtcacctctctcaggaatgccacaaccatggggccccctgtgaccctggagagtgtcccctctgtcgggaatgccacatcctcctctgccggagaccagtctggaagcccaactgcctatggggttattgcagctgctgcggtgctcagtgcaagcctggtcaccgccaccctcctccttttgtcctggctccgagcccaggagcgcctccgcccactggggttactggtggccatgaaggagtccctgctgctgtcagaacagaagacctcgctgccctgaggacaagcacttgccaccaccgtcactcagccctgggcgtagccggacaggaggagagcagtgatgcggatgggtacccgggcacaccagccctcagagacctgagctcttctggccacgtggaacctcgaacccgagctcctgcagaagtggccctggagattgagggtccctggacactccctatggagatccggggagctaggatggggaacctgccacagccagaactgaggggctggccccaggcagctcccagggggtagaacggccctgtgcttaagacactcctgctgccccgtctgagggtggcgattaaagttgct

SEQ ID NO: 1230 - protein, 282 aa, Homo sapien
MSGGWMAQVGAWRTGALGLALLLLLGLGLGLEAAASPLSTPTSAQAAGPSSGSCPPTKFQCRTSGLCVPLTWRCDRDLDCSDGSDEEECRIEPCTQKGQCPPPPGLPCPCTGVSDCSGGTDKKLRNCSRLACLAGELRCTLSDDCIPLTWRCDGHPDCPDSSDELGCGTNEILPEGDATTMGPPVTLESVTSLRNATTMGPPVTLESVPSVGNATSSSAGDQSGSPTAYGVIAAAAVLSASLVTATLLLLSWLRAQERLRPLGLLVAMKESLLLSEQKTSLP

SEQ ID NO: 1231 - DNA, 2684 bp, Homo sapien
cggaagcaggaagtgagtttgcgaacggagcagctgctgcagggcccatggcggacacccagtacatcctgcccaatgacatcggcgtgtctagcctggactgccgtgaggccttccgcctgctgtcacccacagagcgcctctatgcctaccacctgtcccgtgccgcctggtacggaggcctggctgtgctgcttcagacctcccctgaggccccctacatctatgctctgctcagccgcctcttccgcgcccaggaccccgaccagctgcgccaacatgccctggctgaaggccttaccgaggaggagtatcaggcgttcctggtctatgccgcgggtgtttactccaacatgggcaactacaagtcctttggtgacaccaagtttgttcccaacttgcccaaggaaaagctggaacgggtgatcctagggagtgaggctgctcagcagcacccagaagaagtcaggggcctctggcagacctgcggggagcttatgttctctctggagccaaggcttcgacacctcggactggggaaggagggaatcaccacctatttctctgggaattgtaccatggaagatgccaaattggcccaggactttctggactcacagaacctcagtgcctacaacacccggctcttcaaagaggtcgatggagaagggaagccctactacgaggtgcggctggcttctgtgcttggctcagagccttccctggactctgaggtgacttccaagctgaagagctatgaattccggggaagccctttccaggtgacccggggggactacgcgcccatcctccagaaggtggtggagcagctggagaaagccaaggcctatgcagccaacagccaccaggggcagatgctggcccagtatatagagagcttcacccagggctccatcgaggcccacaagaggggctcccgcttctggatccaggacaaaggccccatcgtggagagttacatcgggttcatcgagagctaccgcgacccctttggttcccgaggagaatttgaaggtttcgtagctgtggtgaacaaggccatgagtgccaagtttgagcggctggtggcgagcgcagagcagctgctgaaggagctgccctggcccccaacctttgagaaggacaagttcctcacccctgacttcacctccctggatgttctcaccttcgctggctccggcatccctgccggcatcaacatccccaactacgatgatctgaggcagacggaaggctttaagaacgtgtcgctggggaatgtgctggctgtggcctacgccacgcagcgggagaagcttacctttctggaggaggatgacaaggacctgtacatcctctggaaggggccctccttcgatgtgcaggtgggcctgcacgagctgctgggccatggcagtggcaagctcttcgtacaggacgaaaaaggagcattcaactttgaccaggaaacagtgatcaacccagagacgggcgagcagattcagagctggtatcggagcggggagacctgggatagcaagttcagcaccatcgcctccagctacgaagagtgccgggctgagagcgtgggtctctacctctgtctccacccgcaagtgctggagatctttggctttgagggggctgatgcggaggacgtgatctacgtgaactggctcaacatggttcgggccgggctgctcgctctggagttctacacacctgaggccttcaactggcgacaggcccatatgcaggcccggtttgtgatcctgagagtcttgctggaggctggcgagggactcgttaccatcactcccaccacaggctccgatgggcgcccagatgcccgggtccgcctcgaccgcagcaagatccggtctgtgggcaagcctgctctagagcgcttcctgcggagacttcaggtgctgaagtccacaggggatgtggccggagggcgggccctgtacgaggggtatgcaacggtcactgatgcgccccccgagtgcttcctcaccctcagggacacggtgctgctgcgtaaggaatctcggaagctcattgttcagcccaacactcgccttgaaggctcagacgtgcagcttctggaatacgaggcgtcagctgctggcctcatccgatccttctctgagcgtttcccagaggatggacccgagttggaggagatcctcacacagctggccacagccgatgcccgattctggaagggccccagtgaggccccatctggccaagcttgaggaagatgtgtggccttgcccccaattccatcagaccaaggctgcaagtggccctccattcgtgtgtgtatttaggggctggggagggggaggggcaggagcttggaccttggtactacctcagctgagggtggtgacacaaccccttccatttgtcagcactttccagcctgccaattgcttcccctctgtgatctcatttcatctgcactgccatacgtggagtgagcaagacagggcttaccatcctgtctaccagatgaggaaatggcagttctgagaagtcactggtctagatcccgcaggtggcacgtgacagctagggttcaaaacgttctcaccaaatccaatgctcctcacatattaattttataaccagacaaataaatattagagacaaccaaaaaaaaaaaaaaaaaaaaa

SEQ ID NO: 1232 - protein, 737 aa, Homo sapien
MADTQYILPNDIGVSSLDCREAFRLLSPTERLYAYHLSRAAWYGGLAVLLQTSPEAPYIYALLSRLFRAQDPDQLRQHALAEGLTEEEYQAFLVYAAGVYSNMGNYKSFGDTKFVPNLPKEKLERVILGSEAAQQHPEEVRGLWHTCGELMFSLEPRLRHLGLGKEGITTYFSGNCTMEDAKLAQDFLDSQNLSAYNTRLFKEVDGEGKPYYEVRLASVLGSEPSLDSEVTSKLKSYEFRGSPFQVTRGDYAPILQKVVEQLEKAKAYAANSHQGQMLAQYIESFTQGSIEAHKRGSRFWIQDKGPIVESYIGFIESYRDPFGSRGEFEGFVAVVNKAMSAKFERLVASAEQLLKELPWPPTFEKDKFLTPDFTSLDVLTFAGSGIPAGINIPNYDDLRQTEGFKNVSLGNVLAVAYATQREKLTFLEEDDKDLYILWKGPSFDVQVGLHELLGHGSGKLFVQDEKGAFNFDQETVINPETGEQIQSWYRSGETWDSKFSTIASSYEECRAESVGLYLCLHPQVLEIFGFEGADAEDVIYVNWLNMVRAGLLALEFYTPEAFNWRQAHMQARFVILRVLLEAGEGLVTITPTTGSDGRPDARVRLDRSKIRSVGKPALERFLRRLQVLKSTGDVAGGRALYEGYATVTDAPPECFLTLRDTVLLRKESRKLIVQPNTHLEGSDVQLLEYEASAAGLIRSFSERFPEDGPELEEILTQLATADARFWKGPSEAPSGQA

SEQ ID NO: 1233 - DNA, 1118 bp, Homo sapien
ctgatgaaagtgcttccaaactgaaaattggacgtgcctttacgatggtaagcgttaacagctcccactgcttctataatgactcctttaagtacactttgtatgggtgcatgttcagcatggtgtttgtgcttgggttagtatccaattgtgttgccatatacattttcatctgcgtcctcaaagtccgaaatgaaactacaacttacatgattaacttggcaatgtcagacttgctttttgtttttactttacccttcaggattttttacttcacaacacggaattggccatttggagatttactttgtaagatttctgtgatgctgttttataccaacatgtacggaagcattctgttcttaacctgtattagtgtagatcgatttctggcaattgtctacccatttaagtcaaagactctaagaaccaaaagaaatgcaaagattgtttgcactggcgtgtggttaactgtgatcggaggaagtgcacccgccgtttttgttcagtctacccactctcagggtaacaatgcctcagaagcctgctttgaaaattttccagaagccacatggaaaacatatctctcaaggattgtaattttcatcgaaatagtgggattttttattcctctaattttaaatgtaacttgttctagtatggtgctaaaaactttaaccaaaccagttacattaagtagaagcaaaataaacaaaactaaggttttaaaaatgatttttgtacatttgatcatattctgtttctgttttgttccttacaatatcaatcttattttatattctcttgtgagaacacaaacatttgttaattgctcagtagtggcagcagtaaggacaatgtacccaatcactctctgtattgctgtttccaactgttgttttgaccctatagtttactactttacatcggacacaattcagaattcaataaaaatgaaaaactggtctgtcaggagaagtgacttcagattctctgaagttcatggtgcagagaattttattcagcataacctacagaccttaaaaagtaagatatttgacaatgaatctgctgcctgaaataaaaccattaggactcactgggacagaactttcaag

SEQ ID NO: 1234 - protein, 344 aa, Homo sapien
MVSVNSSHCFYNDSFKYTLYGCMFSMVFVLGLVSNCVAIYIFICVLKVRNETTTYMINLAMSDLLFVFTLPFRIFYFTTRNWPFGDLLCKISVMLFYTNMYGSILFLTCISVDRFLAIVYPFKSKTLRTKRNAKIVCTGVWLTVIGGSAPAVFVQSTHSQGNNASEACFENFPEATWKTYLSRIVIFIEIVGFFIPLILNVTCSSMVLKTLTKPVTLSRSKINKTKVLKMIFVHLIIFCFCFVPYNINLILYSLVRTQTFVNCSVVAAVRTMYPITLCIAVSNCCFDPIVYYFTSDTIQNSIKMKNWSVRRSDFRFSEVHGAENFIQHNLQTLKSKIFDNESAA

SEQ ID NO: 1235 - DNA, 1349 bp, Homo sapien
agaaggcctcgcacaaaacactgtacaaacccgaaaggaagtctgagagacgaaccgccttcctccctgaagcttctagaactggagcagaaagaaggtgtggcccagggccagccccgcctcctccccgggcggaagctgtgtcagttgccggaagtcggcgtgaggtggggcttatgcggcggcgtggtgaaatagatatggcgaccgagggggatgtggagctggagttggagactgagaccagtggaccagagcggcctccggagaagccacggaaacatgacagcggtgcggcggacttggagcgggtcaccgactatgcagaggagaaggagatccagagttccaatctggagacggccatgtctgtgattggagacagaaggtcccgggagcagaaagccaaacaggagcgggagaaagaactggcaaaagtcactatcaagaaggaagatctggagctaataatgactgagatggagatatctcgagcagcagcagaacgcagtttgcgggaacacatgggcaacgtggtagaggcgcttattgccctaaccaactgatgcgtgctttctcaaatatacctactggattaatttatggcaataaaatttttttttgtctttttcagttttatcatcttgggtcaagtagagtgtatactatatcctatgttgtggagaatttatatgttggagactaactgaatttaagtgacccattaaaatctagcacacctgtatgaaaaatcagtgtagaagaatacctcatgtgcagatgctaggtggcaggccagtctcattcatctgactagctctcaacagtattcaaggtacatctggagtctcagcagagttactgtactcaaatggcatgtgtctccaagacagcttatgaatatctaaaaggccagctacctgcctaggagccactatatatatagatagatgtaggttatgaacccagttcataggccaccttgagttagaattttggtacctacaacatgcttgattttgagtgattaaaaaaaaataatttggctgggtgctgtggctcacgcctctaatcccagcactttgggaggtcgaggcaggtagatcacgaggtcaggaattcaagaccagcctggccaacatgtgaaaccccgtctccactgaaaatagaaaaattagctgggcatggtggtgggcgcctataatcccagctattctggaggctgaggcaggaatcgcttgaaattggaaagcagaggttgcagtgagctgagatcacactactgtactactgtactccagcctgggggaaagagtgaaactccatctcaaaaaaaaaaaaaaaaaaaa

SEQ ID NO: 1236 - protein, 121 aa, Homo sapien
MATEGDVELELETETSGPERPPEKPRKHDSGAADLERVTDYAEEKEIQSSNLETAMSVIGDRRSREQKAKQEREKELAKVTIKKEDLELIMTEMEISRAAAERSLREHMGNVVEALIALTN

SEQ ID NO: 1237 - DNA, 896 bp, Homo sapien
  Unsure 886: Unknown base
acctccggaaaccgtagattccgggcggtcggagccgccgggagctgtagttctcccgcggctcagagaagtaggcagagagcggacctggcggccgggcagcatggcggggctggagctcttgtcggaccagggctaccgggtggacgggcggcgcgccggggagctgcgcaagatccaggcgcggatgggcgtgttcgcgcaggctgacggctcggcctacattgagcagggcaacaccaaggcactggctgtggtctacggcccgcacgagatccggggctcccgggctcgagccctgccggacagggccctagtgaactgtcaatatagttcagcgaccttcagcacaggtgagcgcaagcgacggccacatggggaccgtaagtcctgtgagatgggcctgcagctccgccagactttcgaagcagccatcctcacacagctgcacccacgctcccagattgatatctatgtgcaggtgctacaggcagatggtgggacctatgcagcttgtgtgaatgcagccacgctggcagtgctggatgccgggatacccatgagagactttgtgtgtgcgtgctcagctggcttcgtggacggcacagccctggcggacctcagccatgtggaggaagcagctggtggcccccagctggccctggccctgctgccagcctcaggacagattgcgctgcttgagatggatgcccggctgcacgaggaccacctggagcgggtgttggaggctgctgcccaggctgcccgagatgtgcacaccctcttagatcgagtggtccggcagcatgtgcgtgaggcctctatcttgctgggggactgaccacccagccacccatgtccagaataaaccctccttgcccacacnaaaaaaaaaa

SEQ ID NO: 1238 - protein, 245 aa, Homo sapien
MAGLELLSDQGYRVDGRRAGELRKIQARMGVFAQADGSAYIEQGNTKALAVVYGPHEIRGSRARALPDRALVNCQYSSATFSTGERKRRPHGDRKSCEMGLQLRQTFEAAILTQLHPRSQIDIYVQVLQADGGTYAACVNAATLAVLDAGIPMRDFVCACSAGFVDGTALADLSHVEEAAGGPQLALALLPASGQIALLEMDARLHEDHLERVLEAAAQAARDVHTLLDRVVRQHVREASILLGD

SEQ ID NO: 1239 - DNA, 806 bp, Homo sapien
tcgctttgtgattcttgatccggaactttgtcacccaggaaccccggaagaggtagctcacgcgatagaaacgtgttcgcttgcccagaagaagggaaggcgcgagtgaggaaaggaggtactgtagatgccctccaaatccttggttatggaatatttggctcatcccagtacactcggcttggctgttggagttgcttgtggcatgtgcctgggctggagccttcgagtatgctttgggatgctccccaaaagcaagacgagcaagacacacacagatactgaaagtgaagcaagcatcttgggagacagcggggagtacaagatgattcttgtggttcgaaatgacttaaagatgggaaaagggaaagtggctgcccagtgctctcatgctgctgtttcagcctacaagcagattcaaagaagaaatcctgaaatgctcaaacaatgggaatactgtggccagcccaaggtggtggtcaaagctcctgatgaagaaaccctgattgcattattggcccatgcaaaaatgctgggactgactgtaagtttaattcaagatgctggacgtactcagattgcaccaggctctcaaactgtcctagggattgggccaggaccagcagacctaattgacaaagtcactggtcacctaaaactttactaggtggactttgatatgacaacaacccctccatcacaagtgtttgaagcctgtcagattctaacaacaaaagctgaatttcttcacccaacttaaatgttcttgagatgaaaataaaacctattcccatgttctaaaaaaa

SEQ ID NO: 1240 - protein, 179 aa, Homo sapien
MPSKSLVMEYLAHPSTLGLAVGVACGMCLGWSLRVCFGMLPKSKTSKTHTDTESEASILGDSGEYKMILVVRNDLKMGKGKVAAQCSHAAVSAYKQIQRRNPEMLKQWEYCGQPKVVVKAPDEETLIALLAHAKMLGLTVSLIQDAGRTQIAPGSQTVLGIGPGPADLIDKVTGHLKLY

SEQ ID NO: 1241 - DNA, 2956 bp, Homo sapien
ggcacgaggccaggcgactccgggacagggggtctcggccgtcggcgtcatggtttcgcgcgtgcagctcccgcctgagatccagctggctcagcgcctggcggggaatgagcaggtgacccgggaccgggcggtgaggaagctccggaaatacatcgtcgccaggactcagcgggccgcaggtggttttacgcacgacgagctgctgaaggtgtggaaaggactgttttattgcatgtggatgcaggacaagccactcctccaggaagaattaggaaggactatttcccagctcgttcatgcttttcagaccacggaggcgcagcacctgttccttcaggccttctggcagaccatgaatcgcgagtggacgggcattgacaggctgcgcctggataaattctacatgctcatgcggatggtcctgaacgagtccttgaaggttctgaagatgcaaggctgggaagaaagacagatcgaggagctgctagagctgctgatgactgagatcctgcaccccagcagccaggcccccaacggtgtgaagagccacttcatcgagatcttcctggaggagctgaccaaagtgggcgccgaggagcttacggcagaccagaacctgaagttcatcgaccccttctgcagaatcgctgcccggaccaaggattccttggttttgaacaacatcactcgaggcatctttgagacgattgtggagcaggccccgcttgccattgaagacctcctgaatgaactggacacacaggatgaggaggtggcgtcggacagtgatgagtcctctgagggtggtgagcgtggagacgcgctgtcccagaagaggtctgagaagccgcccgcaggctccatctgcagggctgaacctgaggctggtgaggagcaggcaggtgacgacagggacagtggcggccccgttctccagtttgactacgaggcagttgctaacagactgtttgaaatggccagccgccagagcaccccttctcagaacagaaagcgtctctacaaagtgatccggaagctgcaggacctggcaggaggcattttccctgaagatgagatcccagagaaggcctgcaggcgcctgcttgaagggaggcggcagaagaagacgaagaagcagaagcgtctgctcaggttgcagcaggagagagggaaaggtgagaaggagcccccgagcccgggcatggagaggaagaggagcaggaggaggggtgtaggggccgaccccgaggcgcgggcagaggctggtgagcagccaggcacagctgagcgggccctgctccgagatcagcccaggggccgtggccagagaggggctcgccagagaaggaggacacctcggcccctgaccagtgcccgagcaaaggcggccaatgtccaggagccggagaagaagaagaaacgcagggagtgatgtggccgggccaaggacaggcagggagggaggccaggcctcgcttgcaccgcgggacgaggctgaccgggctgttctgtagactcaggaccgtggctccagaactcctgtgccaggcgggagggaagggcggcactggagagatgggcccatcattaggggccagcatcccaggaactggacctttccccagagcctccgcctgtggctgtgatgaccttgggccagaaggtcaaactccgaagactgaaactctgcctgcagcaggactggctgcccctgctgtggggggttcagaaaataaaatgccgcgcagcccttgccagggaagtgtcgcttcgggtgtgtcctacggacgtgtgggaggtggcaggcgccagcctccgagcagtgtggtggtttatattcatgtttgtggaaaaatcttgcaagacatttctcctttcacagaactgcccaggtgttaacagggctgtctggacggggctcttttgcttccccctcaatctggggtctagagttgtgcagggaattcagctccagtaaggcctggattgcccggggtgagcgtgtgtgtggtgggaagacctggcttccgcgagagccttgttcctggaggcaggagcgccccgccatcctgggtacccgcgggtccgcaggctgcgcacctctttccctcagccaggtcaccctcagcgtcctccctgcccctctccccttcacacctgctggagcctgtgagggaggtggcgggtccccactgtggcgacggagagctgacagtagcccagggctttctacctgcatggaacaagggcctgtctgccgccagcgctgtggccacagcctgcataggtgacaaggggccgctgcgttgggttttgcccgcatcttctgttccatgggtgcccagccagccaggccgtgtgggatccagcgagaggccagggcttggagtgggcctgggaccaggaaggacctctaggctgtggctggccttgtgcagaccctggactgcatccggttccccaaagccctgctgcattcgagtgtcccccaaccccgggcaggtggcacctggtgacacctccttcagtcccactcagctgggcggccggggcaggcttagggcacagttaggggccaaggagagggaaggccagggcccctgttctaggggttagggttctttccccaaaggaacttaaaaagacaagcgtggccaggcacagtggctcacacctgtaatcccagcactttgggaggccgaggtggccagatcacctgaggtcaggagtttgagaccagactgaccaacatggagaaaccccatctctactaaaatacaaaattagccaggcgtggtggcacatgcctgtaatcccagctactcgggaggctgaggcaggagaattgcttgaacctgggaggcagaggttgtggtgagctaagatcacgccattgcactccagcctgggcaacgagagggaaactctgtttcaaaaaaaaaaaaaaaaaaaa

SEQ ID NO: 1242 - protein, 461 aa, Homo sapien
MVSRVQLPPEIQLAQRLAGNEQVTRDRAVRKLRKYIVARTQRAAGGFTHDELLKVWKGLFYCMWMQDKPLLQEELGRTISQLVHAFQTTEAQHLFLQAFWQTMNREWTGIDRLRLDKFYMLMRMVLNESLKVLKMQGWEERQIEELLELLMTEILHPSSQAPNGVKSHFIEIFLEELTKVGAEELTADQNLKFIDPFCRIAARTKDSLVLNNITRGIFETIVEQAPLAIEDLLNELDTQDEEVASDSDESSEGGERGDALSQKRSEKPPAGSICRAEPEAGEEQAGDDRDSGGPVLQFDYEAVANRLFEMASRQSTPSQNRKRLYKVIRKLQDLAGGIFPEDEIPEKACRRLLEGRRQKKTKKQKRLLRLQQERGKGEKEPPSPGMERKRSRRRGVGADPEARAEAGEQPGTAERALLRDQPRGRGQRGARQRRRTPRPLTSARAKAANVQEPEKKKKRRE

SEQ ID NO: 1243 - DNA, 1780 bp, Homo sapien
ggcgctcgcagagccggaaagaagtgctgtaagggacgctcgggggacgctgttcctgaggtgtcgccgcctccctgtcctcgccctccgcggtgggggagaaacccaggagcgaagcccagagcccgcggcgcggccggcggacgaacgagcgcgcagcagccggtgcgcggccgcggcgagggcgggggaagaaaaacaccctgtttcctctccggcccccaccgcggatcatgtaccaggattatcccgggaactttgacacctcgtcccggggcagcagcggctctcctgcgcacgccgagtcctactccagcggcggcggcggccagcagaaattccgggtagatatgcctggctcaggcagtgcattcatccccaccatcaacgccatcacgaccagccaggacctgcagtggatggtgcagcccacagtgatcacctccatgtccaacccataccctcgctcgcacccctacagccccctgccgggcctggcctctgtccctggacacatggccctcccaagacctggcgtgatcaagaccattggcaccaccgtgggccgcaggaggagagatgagcagctgtctcctgaagaggaggagaagcgtcgcatccggcgggagaggaacaagctggctgcagccaagtgccggaaccgacgccgggagctgacagagaagctgcaggcggagacagaggagctggaggaggagaagtcaggcctgcagaaggagattgctgagctgcagaaggagaaggagaagctggagttcatgttggtggctcacggcccagtgtgcaagattagccccgaggagcgccgatcgcccccagcccctgggctgcagcccatgcgcagtgggggtggctcggtgggcgctgtagtggtgaaacaggagcccctggaagaggacagcccctcgtcctcgtcggcggggctggacaaggcccagcgctctgtcatcaagcccatcagcattgctgggggcttctacggtgaggagcccctgcacacccccatcgtggtgacctccacacctgctgtcactccgggcacctcgaacctcgtcttcacctatcctagcgtcctggagcaggagtcacccgcatctccctccgaatcctgctccaaggctcaccgcagaagcagtagcagcggggaccaatcatcagactccttgaactcccccactctgctggctctgtaacccagtgcacctccctccccagctccggagggggtcctcctcgctcctccttcccagggaccagcaccttcaagcgctccagggccgtgagggcaagagggggacctgccaccagggagcttcctggctctgggggacccaggtgggacttagcagtgagtattggaagacttgggttgatctcttagaagccatgggacctcctccctcattcatcttgcaagcaaatcccatttcttgaaaagccttggagaactcggtttggtagacttggacatctctctggcttctgaagagcctgaagctggcctggaccattcctgtccctttgttaccatactgtctctggagtgatggtgtccttccctgccccaccacgcatgctcagtgccttttggtttcaccttccctcgacttgaccctttcctcccccagcgtcagtttcactccctcttggtttttatcaaatttgccatgacatttcatctgggtggtctgaatattaaagctcttcatttctggaaaaaaaaaaaaaaaaaaaaaaaaaaaaaaaaaaaaaaaaaaaa

SEQ ID NO: 1244 - protein, 326 aa, Homo sapien
MYQDYPGNFDTSSRGSSGSPAHAESYSSGGGGQQKFRVDMPGSGSAFIPTINAITTSQDLQWMVQPTVITSMSNPYPRSHPYSPLPGLASVPGHMALPRPGVIKTIGTTVGRRRRDEQLSPEEEEKRRIRRERNKLAAAKCRNRRRELTEKLQAETEELEEEKSGLQKEIAELQKEKEKLEFMLVAHGPVCKISPEERRSPPAPGLQPMRSGGGSVGAVVVKQEPLEEDSPSSSSAGLDKAQRSVIKPISIAGGFYGEEPLHTPIVVTSTPAVTPGTSNLVFTYPSVLEQESPASPSESCSKAHRRSSSSGDQSSDSLNSPTLLAL

SEQ ID NO: 1245 - DNA, 1554 bp, Homo sapien
aattatatatttttactctatgtttctctacatgtttttttctttccgttgctggcggaagaggcacgtgcgctgctgaatggagctggtcgctggttgctacgagcaggtcctctttgggttcgctgtacacccggagcccaaggcttgcggcgaccacgagcaatggactcttgtggctgacttcactcaccatgctcacactgcctccttgtcagcagtagctgtaaatagtcgttttgtggtcactgggagcaaagatgaaacaattcacatttatgacatgaaaaagaagattgagcatggggctctagtgcatcacagtggtacaataacttgcctgaaattctatggcaacaggcatttaatcagtggagcggaagatggactcatctgtatctgggatgcaaagaaatgggaatgcctgaagtcaattaaagctcacaaaggacaggtgaccttcctttctattcacccatctggcaagttggccctgtcggttggtacagataaaactttaagaacgtggaatcttgtagaaggaagatcagcattcataaaaaatataaaacaaaatgctcacatagtagaatggtccccaagaggagagcagtatgtagttatcatacagaataaaatagacatctatcagcttgacactgcatccattagtggcaccatcacaaatgaaaagagaatttcctctgttaaatttctttcagagtctgtccttgcagtggctggagatgaagaagttataaggttttttgactgtgattcactagtgtgcctctgcgaatttaaagctcatgaaaacagggtaaaggacatgttcagttttgaaattccagagcatcatgttattgtttcagcatcgagtgatggtttcatcaaaatgtggaagcttaagcaggataagaaagttcccccatctttactctgtgaaataaacactaatgccaggctgacgtgtcttggagtgtggctagacaaagtggcagacatgaaaagccttcctccagctgcagagccttctcctgtaagtaaagaacagtccaaaattggcaaaaaggagcctggtgacacagtgcacaaagaagaaaagcggtcaaaacctaacacaaagaaacgcggtttaacaggtgacagtaagaaagcaacaaaagaaagtggcctgatatcaaccaagaagaggaaaatggtagaaatgttggaaaagaagaggaaaaagaagaaaataaaaacaatgcagtgaatcacagatgtctcctgaaagaactcttttagatgaaatcattctactcaaatgtaccttaatttttttttttccctgagtaaaagcaagaaatttcttcctttggaaaaaatatatatattaaaaaaccacttttagatggttttttttaaaaaaaaaaaaaaaactggtaaaattacttttggcagacagtgttttatgaattatgtatcatgttgatatataatatgttaatgtgtcatgtaatttttactttgtacaaagcaaataaagatctttctcaaaaaaaaaaaaaaaaa

SEQ ID NO: 1246 - protein, 391 aa, Homo sapien
MELVAGCYEQVLFGFAVHPEPKACGDHEQWTLVADFTHHAHTASLSAVAVNSRFVVTGSKDETIHIYDMKKKIEHGALVHHSGTITCLKFYGNRHLISGAEDGLICIWDAKKWECLKSIKAHKGQVTFLSIHPSGKLALSVGTDKTLRTWNLVEGRSAFIKNIKQNAHIVEWSPRGEQYVVIIQNKIDIYQLDTASISGTITNEKRISSVKFLSESVLAVAGDEEVIRFFDCDSLVCLCEFKAHENRVKDMFSFEIPEHHVIVSASSDGFIKMWKLKQDKKVPPSLLCEINTNARLTCLGVWLDKVADMKSLPPAAEPSPVSKEQSKIGKKEPGDTVHKEEKRSKPNTKKRGLTGDSKKATKESGLISTKKRKMVEMLEKKRKKKKIKTMQ

SEQ ID NO: 1247 - DNA, 2308 bp, Homo sapien
agcaggtttcgaatgctctttacttcctttgtggagcaaaagaaaaaagcaggagtatttgaacaaatcactaagactcatggaacaattattggcattacttcagggattgtcttggtccttctcattatttctattttagtacaagtgaaacagcctcgaaaaaaggtcatggcttgcaaaaccgcttttaataaaaccgggttccaagaagtgtttgatcctcctcattatgaactgttttcactaagggacaaagagatttctgcagacctggcagacttgtcggaagaattggacaactaccagaggatgcggcgctcctccaccgcctcccgctgcatccacgaccaccactgtgggtcgcaggcctccagcgtcaaacaaagcaggaccaacctcagttccatggagcttcctctccgaaatgactttgcacaaccacagccaatgaaaacatttaatagcaccttcaagaaaagtagttacactttcaaacagggacatgagtgccctgagcaggccctggaagaccgagtaatggaggagattccctgtgaaatttatgtcagggggcgagaagattctgcacaagcatccatatccattgacttctaatcttctgctaatggtgatgtgaattcttagggtgtgtacgtacgcagcctccagggcaccatactgtttccagcagccaacccttttctcccatcacaactacgaagaccttgatttaccgttaacctattgtatggtgatgtttttattctctcaggcagtctatatatgttaaaccaatcaaggaacttactctattcagtggaaacaataatcatctctattgcttggtgtcatttataggaagcactgccagttaaagagcattagaagaggtggttggatggagccaggctcaggctgcctcttcgttttagcaacaagaagactgctcttgactgataacagctctgtcaatattttgatgccacaataaacttgatttttctttacattccttttatttttcctttctctaaatttaatttgttttataagcctatcgttttaccatttcattttcttacataagtacaagtggttaatgtaccacatacttcagtataggcatttgttcttgagtgtgtcaaaatacagctagttactgtgccaattaagacccagttgtatttcacccatctgtttcttcttggctaatctctgtacttctgccttttaattactgggcccttattccttattttctgtgagaaataatagatgatatgatttattacctttcaattatatttttctcagttatactagaaaatttcataatcctgggatatatgtaccattgtcagctatgactaaaaatttgaaaaagataaaaatttctagcaagcctttgaagtttaccaagtatagtcacattcagtgacagcccattcattccagtaaagaatcatttcattcactttgggagaggcctataattacatttatttgcaatgtttctcttcgctagattgttacatagctcccattctgttggttttgcttacagcatatggtaaccaaggttagatgccagttaaaattccttagaaattggatgagccttgagattgcttcttaactgggacatgacatttttctagctcttatcaagaataacaacttccacttttttttaaactgcacttttgactttttttatggtataaaaacaataatttataaacataaaagctcattgtgttttttagacttttgatattatttgatactgtacaaactttattaaatcaagatgaaagacctacaggacagattcctttcagtgttcacatcagtggctttgtatgcaaatatgctgtgttggacctggacgctataacttattgtaaagaccttggaaatgtggacataagctctttctttccttttgttactgtatttagtttgtgataaatttttcactgtgtgatatttatgctctaaatcactacacaaatcccatattaaaatatacattgtacctgaccctttaatcatgttatttatgccaccaaggttgtggatcttaaggtatgtatggaaaggaactcatttatcaaattgtaagtaatacagacatgccatttaaaagaggtaaattcttgttttctatattttgttagtaaattctcaatgaaataagttgaagtttcactggatttcattaacttttaaatattacatatatgtgttttctcagattagtgaaaattgtgaccttaaatttaatacacatatactgcctcag

SEQ ID NO: 1248 - protein, 201 aa, Homo sapien
MLFTSFVEQKKKAGVFEQITKTHGTIIGITSGIVLVLLIISILVQVKQPRKKVMACKTAFNKTGFQEVFDPPHYELFSLRDKEISADLADLSEELDNYQRMRRSSTASRCIHDHHCGSQASSVKQSRTNLSSMELPLRNDFAQPQPMKTFNSTFKKSSYTFKQGHECPEQALEDRVMEEIPCEIYVRGREDSAQASISIDF

SEQ ID NO: 1249 - DNA, 2805 bp, Homo sapien
aaacccaaagcggccgccgtaggcgaaggtgaagatggctgcctctgcctttgctggtgcagtgagagcagcttcaggaatcctacggcccctgaatattttggcatcttcaacctaccgcaactgtgtcaagaatgcctctcttatttctgcattgtccactggacgttttagtcatattcagacaccagttgtttcctccactcccagacttaccacatctgagagaaacctgacatgtgggcatacctcagtgatccttaatagaatggcccccgtgcttccaagtgtcctgaagctgccagtcagatctctaacatacttcagtgcaagaaaaggcaagagaaagaccgtgaaagctgtcatcgataggtttcttcgacttcattgtggcctttgggtgaggagaaaggctggctataagaaaaaattatggaaaaagacacctgcaaggaagaagcgattgagggaatttgtattctgcaataaaacccagagtaaactcttagataaaatgacgacgtccttctggaagaggcgaaactggtacgttgatgatccttatcagaagtatcatgatcgaacaaacctgaaagtatagatcagaagtttcacttgtttctcagttattggatatgtatctttgtgtacatatctttgcaaaaatggataagtacaaaacttgatgtaaattgtaccaatgaatacgtaaacatacagtgacaacattaaacttagaaaagttttaaaacttaatggatcagactttgccagatttggttagggaaacagaaatttagaatggtgcattatttttaacaaatggtattggcttaactagttgtttcagttatgctcttttagttgcaaggaatctcaagtgggacaaacataaaaagactcaaaagctacaagttagctcaagcaatgtgacattatttcaaggatatgtgccagggaattcaggaaccacctcaccaaccccatctcccactcagaaatcacctcccagcctcaggaagagtagaaattgggtggtgctcctcagcaggggaaggtggatgtttaggcttgggctctgcatgcatgtgacttgcttctttttgcattgttaactccattctctctattcaccaacttctctacacagcttttgcatacttacagtttctgttcctttgtaataactttaacttgcacctttgaggttcttttctacatgatgaccttcagctcctgctgctagtctccaattgccaagggaatttaactgggccagactacctttttatactaggtctggttgggtcattgtctagagtagggattggctgtccttaagtcaggagcccgctttgtattagcaggtttgcatgcagcaaaaaaacagttatgtgagcagtttcacttggaggttcacatggggtggcagcacacttaacatctaacacaccaggttcattgtgttcataacacttgtcatttactgtaacaacattttttcataggagagtaaatagcccttcagcatgctcattcatgaaacagaagaggctgtacaagtgaagacaagggctttttatgcaagttttgaaagataggtatttattttttctagagacaggagttttgctctgttgcccaggctggagtgcagtggtgcaatcatagctcattgaagcctcgcactcctgggctcaagtggtcctcctgcctcagcttactgagtaaggatatgtatttcttaaaagttagtttatccacttcagatttcatgttttcatttgtaaggataaacttttcccacaaattttcaacaatcattgtagaaactaagggggagaaagtaatctcagttgttttagaaacgaaaaagttaagcattgtttacttgaagtgggcagggaagcagcactgagtaaagttcaattgagtggttacagtctagggcagtggttcccaactctccgatcagaatcatctgggaagcattttcaaacagcaaagtactttgaaaaccattattaaatagaattatgcatgaattactgtttcagatcctttaatgtggtagttggtaataataagatgaaattcctctgttgttagtaaaattatgaaattgaagttctgcagcatgtcaggccaggattattagggagattcctcgaaactagtgtgtgtttattaaaaggagaaaggataacaatagaatgttctaaaaccagaagtccaagtgcgtgtctacttatgggaccaataaataaagaacagacatttgatttgaggtgaggtaaaagcctgaaacatggaatggcattctgttttgatggattttcatttcttcgcacttctgagacggcaaagccaaccacttagaagccttccacatctttgtcacctgcctggctcctgctctctgatgtacctctgggtagtgagatggaaatggtgcctgcagaagttggggagaaggatacttttgcacagcctccatgatgtctttattgcaaatatggatgacaagggtctctgttacaggggcctcagagcaccttcgtttctcctctagaccagggacaggtgtagagataaggactggcaaccagagcctcagcatccaaagatggactgaagtgggatggctgacaggcacataacttacgggaaagggaatttcatacatacgatttttgttttgtgggtaggagggcttatcatcaacactgattttataatctgacaataaatgtctttcattaaagagtttacctaaatgaaaaaaaaaaaaaaaaaaaaaaaaaa

SEQ ID NO: 1250 - protein, 170 aa, Homo sapien
MAASAFAGAVRAASGILRPLNILASSTYRNCVKNASLISALSTGRFSHIQTPVVSSTPRLTTSERNLTCGHTSVILNRMAPVLPSVLKLPVRSLTYFSARKGKRKTVKAVIDRFLRLHCGLWVRRKAGYKKKLWKKTPARKKRLREFVFCNKTQSKLLDKMTTSFWKRRN

SEQ ID NO: 1251 - DNA, 2117 bp, Homo sapien
ggcaacgaggggctgcctctggggggtccgctagtcgcggggcggcggcggcggctgcgggcgcgaggttcccagcaggatgccccggctctgcaggaagctgaagtgagaggcccggagagggcccagcccgcccggggcaggatgaccaaggcccggctgttccggctgtggctggtgctggggtcggtgttcatgatcctgctgatcatcgtgtactgggacagcgcaggcgccgcgcacttctacttgcacacgtccttctctaggccgcacacggggccgccgctgcccacgcccgggccggacagggacagggagctcacggccgactccgatgtcgacgagtttctggacaagtttctcagtgctggcgtgaagcagagcgaccttcccagaaaggagacggagcagccgcctgcgccggggagcatggaggagagcgtgagaggctacgactggtccccgcgcgacgcccggcgcagcccagaccagggccggcagcaggcggagcggaggagcgtgctgcggggcttctgcgccaactccagcctggccttccccaccaaggagcgcgcattcgacgacatccccaactcggagctgagccacctgatcgtggacgaccggcacggggccatctactgctacgtgcccaaggtggcctgcaccaactggaagcgcgtgatgatcgtgctgagcggaagcctgctgcaccgcggtgcgccctaccgcgacccgctgcgcatcccgcgcgagcacgtgcacaacgccagcgcgcacctgaccttcaacaagttctggcgccgctacgggaagctctcccgccacctcatgaaggtcaagctcaagaagtacaccaagttcctcttcgtgcgcgaccccttcgtgcgcctgatctccgccttccgcagcaagttcgagctggagaacgaggagttctaccgcaagttcgccgtgcccatgctgcggctgtacgccaaccacaccagcctgcccgcctcggcgcgcgaggccttccgcgctggcctcaaggtgtccttcgccaacttcatccagtacctgctggacccgcacacggagaagctggcgcccttcaacgagcactggcggcaggtgtaccgcctctgccacccgtgccagatcgactacgacttcgtggggaagctggagactctggacgaggacgccgcgcagctgctgcagctactccaggtggaccggcagctccgcttccccccgagctaccggaacaggaccgccagcagctgggaggaggactggttcgccaagatccccctggcctggaggcagcagctgtataaactctacgaggccgactttgttctcttcggctaccccaagcccgaaaacctcctccgagactgaaagctttcgcgttgctttttctcgcgtgcctggaacctgacgcacgcgcactccagtttttttatgacctacgattttgcaatctgggcttcttgttcactccactgcctctatccattgagtactgtatcgatattgttttttaagattaatatatttcaggtatttaatacgaaatgtggaagggaatgctggagtaaaatatcccctctcccctccgcccgcccgcccgcccgcccgctcgcccgcccgcccgctcgcccgctcctgtggtttttctgagcgtgcgggctccgggaggggatgctgaggctgatggagctgcctccagggctagggccactcaccggaggagggcggggcctgcacttgaagtcaggccgcacctgtctgtttttggaagggtagccgacaaatccttccagagggaaagttctttgtttaagtgttgtacttgaaaaggtcaatcttcagggcttcctgtttgaagtcaagtcagaggtaaaccggtcagttacagaagcaggatttctaggatttctaactccagctgttcccatactgtctagtttaaattatggctgttaaggccgggcgggtgactcaggcaggtaatcccagaactttgggaggcccagacagaaggatcgcttgaggtcaggaatttgagacctggccaacatggtgaaaccctgtctctactaaaaaaaaaaaaaaaaaaaaaaaaa

SEQ ID NO: 1252 - protein, 414 aa, Homo sapien
MTKARLFRLWLVLGSVFMILLIIVYWDSAGAAHFYLHTSFSRPHTGPPLPTPGPDRDRELTADSDVDEFLDKFLSAGVKQSDLPRKETEQPPAPGSMEESVRGYDWSPRDARRSPDQGRQQAERRSVLRGFCANSSLAFPTKERAFDDIPNSELSHLIVDDRHGAIYCYVPKVACTNWKRVMIVLSGSLLHRGAPYRDPLRIPREHVHNASAHLTFNKFWRRYGKLSRHLMKVKLKKYTKFLFVRDPFVRLISAFRSKFELENEEFYRKFAVPMLRLYANHTSLPASAREAFRAGLKVSFANFIQYLLDPHTEKLAPFNEHWRQVYRLCHPCQIDYDFVGKLETLDEDAAQLLQLLQVDRQLRFPPSYRNRTASSWEEDWFAKIPLAWRQQLYKLYEADFVLFGYPKPENLLRD

SEQ ID NO: 1253 - DNA, 600 bp, Homo sapien
agtcttggcggaggtgaccaaagccacgtaatgtccgtagttcgctcatccgtccatgccagatggattgtggggaaggtgattgggacaaaaatgcaaaagactgctaaagtgagagtgaccaggcttgttctggatccctatttattaaagtattttaataagcggaaaacctactttgctcacgatgcccttcagcagtgcacagttggggatattgtgcttctcagagctttacctgttccacgagcaaagcatgtgaaacatgaactggctgagatcgttttcaaagttggaaaagtcatagatccagtgacaggaaagccctgtgctggaactacctacctggagagtccgttgagttcggaaaccacccagctaagcaaaaatctggaagaactcaatatctcttcagcacagtgaagcgggagtggaagaaggatctaaagggaaaaactgacatgtttatgttatggaaaaagaaatttttctaagtttcatcacaaactgtgtccagtttctctgtggtgtttatgaaatagctaaaagcaaatgaagtaaagggcatactatggtttttcacaaaaaaaaaaaaaaaaa

SEQ ID NO: 1254 - protein, 130 aa, Homo sapien
MSVVRSSVHARWIVGKVIGTKMQKTAKVRVTRLVLDPYLLKYFNKRKTYFAHDALQQCTVGDIVLLRALPVPRAKHVKHELAEIVFKVGKVIDPVTGKPCAGTTYLESPLSSETTQLSKNLEELNISSAQ

SEQ ID NO: 1255 - DNA, 760 bp, Homo sapien
gagttttcatttgtggtgagattctctcccaggccacaagacatttcctgctcggaaccttgtttactaatttccactgcttttaaggccctgcactgaaaatgcaagctcaggcgccggtggtcgttgtgacccaacctggagtcggtcccggtccggccccccagaactccaactggcagacaggcatgtgtgactgtttcagcgactgcggagtctgtctctgtggcacattttgtttcccgtgccttgggtgtcaagttgcagctgatatgaatgaatgctgtctgtgtggaacaagcgtcgcaatgaggactctctacaggacccgatatggcatccctggatctatttgtgatgactatatggcaactctttgctgtcctcattgtactctttgccaaatcaagagagatatcaacagaaggagagccatgcgtactttctaaaaactgatggtgaaaagctcttaccgaagcaacaaaattcagcagacacctcttcagcttgagttcttcaccatcttttgcaactgaaatatgatggatatgcttaagtacaactgatggcatgaaaaaaatcaaatttttgatttattataaatgaatgttgtccctgaacttagctaaatggtgcaacttagtttctccttgctttcatattatcgaatttcctggcttataaactttttaaattacatttgaaatataaaccaaatgaaatattttaactgataaaaaaaaaaaaaaaaaataaaaaa

SEQ ID NO: 1256 - protein, 115 aa, Homo sapien
MQAQAPVVVVTQPGVGPGPAPQNSNWQTGMCDCFSDCGVCLCGTFCFPCLGCQVAADMNECCLCGTSVAMRTLYRTRYGIPGSICDDYMATLCCPHCTLCQIKRDINRRRAMRTF

SEQ ID NO: 1257 - DNA, 1363 bp, Homo sapien
acgaggatccggtgttccaacccagggggaaaaatgcggcctttgactgaagaggagacccgtgtcatgtttgagaagatagcgaaatacattggggagaatcttcaactgctggtggaccggcccgatggcacctactgtttccgtctgcacaacgaccgggtgtactatgtgagtgagaagattatgaagctggccgccaatatttccggggacaagctggtgtcgctggggacctgctttggaaaattcactaaaacccacaagtttcggttgcacgtcacagctctggattaccttgcaccttatgccaagtataaagtttggataaagcctggtgcagagcagtccttcctgtatgggaaccatgtgttgaaatctggtctgggtcgaatcactgaaaatacttctcagtaccagggcgtggtggtgtactccatggcagacatccctttgggttttggggtggcagccaaatctacacaagactgcagaaaagtagaccccatggcgattgtggtatttcatcaagcagacattggggaatatgtgcggcatgaagagacgttgacttaaaacgaagccattccaaggacagacggctgtatggaaaggccgagctttgtttcctgtgtttgtgtggactccaccatcatgttgaattttgtcaacactctggcctcttcagggacttcttatttactgtactctctatcactgacaaatgcaggctggattcttattatatacagagatggctcaaaaatggggtttcagatctttgtgacgaaatagaatactgtttcatatttgaatcagagggcttcttgttctgagaaataggttcaaaatcattggaaccaggaacaagaatagcttattgttatctgtgataacactgttttctaaacacaaggattttcttttttattaatatgcaacatagacattgccataacagaataataaaccacatgtggggttttaaaaatgaaatttggctaataggagcaattcagctatttttctatacagtaattggtgtgtggtatagaagaaaaacgggttcaaaccccacttctgccacctaccagctatatggccttgaatgagtcattcagctttaataaggttcattttcttctgtttaaaaagacacaaaacttgaaaatcagctttggccatctacctgagaattagaaagtctgatttttggaattagaaatcatgattgtaggctgggcacagtgtcgcgcctgtaatcccagcactttgggaggccaaggcggacggatcacttgaggttaggagtttgagaccagcctggccaacatggtgaaaccccatctctactaaaaaaaaa

SEQ ID NO: 1258 - protein, 180 aa, Homo sapien
MRPLTEEETRVMFEKIAKYIGENLQLLVDRPDGTYCFRLHNDRVYYVSEKIMKLAANISGDKLVSLGTCFGKFTKTHKFRLHVTALDYLAPYAKYKVWIKPGAEQSFLYGNHVLKSGLGRITENTSQYQGVVVYSMADIPLGFGVAAKSTQDCRKVDPMAIVVFHQADIGEYVRHEETLT

SEQ ID NO: 1259 - DNA, 1308 bp, Homo sapien
ggaagaaaacctgaaaaagaccccaaagaagaatatgaaaatggtaactggagccgtagcgtcggtgctggaagacgaggccacagacacttctgatagtgaaggaagctgtggatcggaaaaggaccacttttattctgatgatgacgcaatagaagctgacagtgagggtgatgctgagccctgtgacaaagaaaatgaaaatgatggagaatcaagtgttgggactaatatgggctgggcagatgctatggctaaagtcctcaacaagaaaactcctgaaagtaaacctactattctggtcaaaaataagaagctggaaaaggaaaaagaaaagttaaagcaagaaagactagagaaaataaaacagcgtgataagaggctggagtgggaaatgatgtgcagagtaaagccagatgttgtccaagacaaagagacagagagaaatcttcagagaattgcaacaaggggtgtggtgcaattatttaatgctgttcagaaacatcaaaagaatgttgatgaaaaggttaaggaagctggaagttctatgagaaagcgtgctaagttgatatcaactgtttccaagaaagatttcatcagtgttttgagagggatggatggaagtacaaatgagactgcttcaagcaggaagaaaccaaaagccaaacagactgaagtgaaatcagaagaaggcccaggttggacgatcctacgtgatgatttcatgatgggagcatctatgaaagactgggacaaggaaagtgatgggccagatgacagcagaccagaatctgcaagtgactctgatacataaagcatcataggaaatacaattgcagtcgttttattttttctagaaaaatatgtcatcctctgatagttggggaattataaggataccatttgtaagaaagccaaaagacttttgccagatttcatatttccccttttcatgtacactttatatatacttcattaaaattatattttaaacccttgtataattttaagcattgttcctcagaacatttgtaaaaggatatatttctgcttgaccagcgagatgtgcattttgccaggatcatattggtcatgtctattggtgtattatttcagtatcaccaatgttttcagaaatacagtactaattcatcattaaactctttgaagttaatatttttctgccttctaacttatagactcaactatgtatctgtagtttttgggaatggttggtgttttttgctttgtgttgggaagttattgagaaaacctatataataaaatttaaaattatagtttttcaaa

SEQ ID NO: 1260 - protein, 259 aa, Homo sapien
MKMVTGAVASVLEDEATDTSDSEGSCGSEKDHFYSDDDAIEADSEGDAEPCDKENENDGESSVGTNMGWADAMAKVLNKKTPESKPTILVKNKKLEKEKEKLKQERLEKIKQRDKRLEWEMMCRVKPDVVQDKETERNLQRIATRGVVQLFNAVQKHQKNVDEKVKEAGSSMRKRAKLISTVSKKDFISVLRGMDGSTNETASSRKKPKAKQTEVKSEEGPGWTILRDDFMMGASMKDWDKESDGPDDSRPESASDSDT

SEQ ID NO: 1261 - DNA, 2675 bp, Homo sapien
aaacatgaattcaaacggctcatcttatttcgaccattcggccccatcatgaaagtgaaaaatgaaaagctcaacatggccaacacgcttatcaatgttatcgtgcctctagcaaaaagggtggacaagttccggcagttcatgcagaatttcaggcctgctgatgaagtttttagatgtgtgcctttaagcccttgattgtgcggtgttggatcttagaagctgtgatggctcagatgcacatattggctgaggataaccagctaagtgatttcaccagcttgttttaaacatagaaaatcctactgtctaattataaatcttgaaagatcaagctgattttttatttctttttttttgagatggagtcttactctgtcacccaggctggagtgcagtggcacgaactctgctcactgcaaccttcacctcccaggttcagggagatgtgcattgagcaggatgggagagtccatctcactgttgtttactttgggaaagaagaaataaatgaagtcaaaggagtacttgaaaacacttccaaagctgccaacttcaggaactttaccttcatccagctgaatggagaattttctcggggaaagggacttgatgttggagcccgcttctggaagggaagcaacgtccttctctttttctgtgatgtggacatctacttcacatctgaattcctcaatacgtgtaggctgaatacacagccagggaagaaggtattttatccagttcttttcagtcagtacaatcctggcataatatacggccaccatgatgcagtccctcccttggaacagcagctggtcataaagaaggaaactggattttggagagactttggatttgggatgacgtgtcagtatcggtcagacttcatcaatataggtgggtttgatctggacatcaaaggctggggcggagaggatgtgcacctttatcgcaagtatctccacagcaacctcatagtggtacggacgcctgtgcgaggactcttccacctctggcatgagaagcgctgcatggacgagctgacccccgagcagtacaagatgtgcatgcagtccaaggccatgaacgaggcatcccacggccagctgggcatgctggtgttcaggcacgagatagaggctcaccttcgcaaacagaaacagaagacaagtagcaaaaaaacatgaactcccagagaaggattgtgggagacactttttctttccttttgcaattactgaaagtggctgcaacagagaaaagacttccataaaggacgacaaaagaattggactgatgggtcagagatgagaaagcctccgatttctctctgttgggctttttacaacagaaatcaaaatctccgctttgcctgcaaaagtaacccagttgcaccctgtgaagtgtctgacaaaggcagaatgcttgtgagattataagcctaatggtgtggaggttttgatggtgtttacaatacactgagacctgttgttttgtgtgctcattgaaatattcatgatttaagagcagttttgtaaaaaattcattagcatgaaaggcaagcatatttctcctcatatgaatgagcctatcagcagggctctagtttctaggaatgctaaaatatcagaaggcaggagaggagataggcttattatgatactagtgagtacattaagtaaaataaaatggaccagaaaagaaaagaaaccataaatatcgtgtcatattttccccaagattaaccaaaaataatctgcttatctttttggttgtccttttaactgtctccgtttttttcttttatttaaaaatgcactttttttcccttgtgagttatagtctgcttatttaattaccactttgcaagccttacaagagagcacaagttggcctacatttttatattttttaagaagatactttgagatgcattatgagaactttcagttcaaagcatcaaattgatgccatatccaaggacatgccaaatgctgattctgtcaggcactgaatgtcaggcattgagacatagggaaggaatggtttgtactaatacagacgtacagatactttctctgaagagtattttcgaagaggagcaactgaacactggaggaaaagaaaatgacactttctgctttacagaaaaggaaactcattcagactggtgatatcgtgatgtacctaaaagtcagaaaccacattttctcctcagaagtagggaccgctttcttacctgtttaaataaaccaaagtataccgtgtgaaccaaacaatctcttttcaaaacagggtgctcctcctggcttctggcttccataagaagaaatggagaaaaatatatatatatatatatatattgtgaaagatcaatccatctgccagaatctagtgggatggaagtttttgctacatgttatccaccccaggccaggtggaagtaactgaattattttttaaattaagcagttctactcgatcaccaagatgcttctgaaaattgcattttattaccatttcaaactattttttaaaaataaatacagttaacatagagtggtttcttcattcatgtgaaaattattagccagcaccagatgcatgagctaattatctctttgagtccttgcttctgtttgctcacagtaagctcattgtttaaaagcttc

SEQ ID NO: 1262 - protein, 275 aa, Homo sapien
MESYSVTQAGVQWHELCSLQPSPPRFREMCIEQDGRVHLTVVYFGKEEINEVKGVLENTSKAANFRNFTFIQLNGEFSRGKGLDVGARFWKGSNVLLFFCDVDIYFTSEFLNTCRLNTQPGKKVFYPVLFSQYNPGIIYGHHDAVPPLEQQLVIKKETGFWRDFGFGMTCQYRSDFINIGGFDLDIKGWGGEDVHLYRKYLHSNLIVVRTPVRGLFHLWHEKRCMDELTPEQYKMCMQSKAMNEASHGQLGMLVFRHEIEAHLRKQKQKTSSKKT

SEQ ID NO: 1263 - DNA, 1021 bp, Homo sapien
ccgctgttatacgtcacttccacggctcagcgtcagggaggagagagaatgtcttttcgaggcggaggtcgtggaggctttaatcgaggtggtggaggtggcggcttcaaccgaggcggcagcagcaaccacttccgaggtggaggcggcggtggaggcggcggcaatttcagaggcggcggcaggggaggatttggacgagggggtggccgcggaggctttaacaaaggccaagaccaaggacctccagaacgtgtagtcttattaggagagttcctgcatccctgtgaagatgacatagtttgtaaatgtaccacagatgaaaataaggtgccttatttcaatgctcctgtttacttagaaaacaaagaacaaattggaaaagtggatgaaatatttggacaactcagagatttttatttttcagttaagttgtcagaaaacatgaaggcttcatcctttaaaaaactacagaagttttatatagacccatataagctgctgccactgcagaggtttttacctcgacctccaggtgagaaaggacctccaagaggtggtggcaggggaggccgaggaggaggaagaggaggaggtggcagaggtggtggcagaggcggtggttttagaggtggaagaggaggtggaggtgggggcttcagaggaggaagaggtggtggtttcagagggagaggacattaagtgaaacagttgacagacatcaccagttgacttctgcattaacctgcatgatctgtttctactatggattggaaacttgtttcttgaacaagtcttgaagatcttggtcattttatgacaatggatctaaaatgtcagcatcatgcaaagtgcaacggaatagtgaattttgctctaaaagagcatgaacaagtctttctaatgttttgtacagtgcctggcactctgtgggtgctcaataaatggataggagttttcatttgaagcatatttgaatttttaaaataaagtgttttattcccttaaaaaaaaaaaaaaa

SEQ ID NO: 1264 - protein, 217 aa, Homo sapien
MSFRGGGRGGFNRGGGGGGFNRGGSSNHFRGGGGGGGGGNFRGGGRGGFGRGGGRGGFNKGQDQGPPERVVLLGEFLHPCEDDIVCKCTTDENKVPYFNAPVYLENKEQIGKVDEIFGQLRDFYFSVKLSENMKASSFKKLQKFYIDPYKLLPLQRFLPRPPGEKGPPRGGGRGGRGGGRGGGGRGGGRGGGFRGGRGGGGGGFRGGRGGGFRGRGH

SEQ ID NO: 1265 - DNA, 1124 bp, Homo sapien
atgctgctgaaagagtaccggatctgcatgccgctcaccgtagacgagtacaaaattggacagctgtacatgatcagcaaacacagccatgaacagagtgaccggggagaaggggtggaggtcgtccagaatgagccctttgaggaccctcaccatggcaatgggcagttcaccgagaagcgggtgtatctcaacagcaaactgcctagttgggctagagctgttgtccccaaaatattttatgtgacagagaaggcttggaactattatccctacacaattacagaatacacatgttcctttctgccgaaattctccattcatatagaaaccaagtatgaggacaacaaaggaagcaatgacaccattttcgacagtgaagccaaagacgtggagagagaagtttgctttattgatattgcctgcgatgaaattccagagcgctactacaaagaatccgaggatcctaagcacttcaagtcagagaagacaggacggggacagttgagggaaggctggagagatagtcatcagcctatcatgtgctcctacaagctggtgactgtgaagtctgaggtctgggggcttcagaccagagtggaacaatttgtacacaaggtggtccgagacattctgctgattggacatagacaggcttttgcatgggttgatgagtggtatgacatgacaatggatgaagtccgagaatttgaacgagccactcaggaagccaccaacaagaaaatcggcattttcccacctgcaatttctatctccagcatccccctgctgccttcttccgtccgcagtgcgccttctagtgctccatccacccctctctccacagacgcacccgaatttctgtccgttcccaaagatcggccccggaaaaagtctgccccagaaactctcacacttccagaccctgagaaaaaagccaccctgaatttacccggcatgcactcttcagataagccatgtcggcccaaatctgagtaactttatataaatatctcatggggttttatattttcatttgttgttgttgtttttttttaagaatcttctgatagagaaaaagactgctttgtcactcaaacatgttccttcgacctttcagtgtg

SEQ ID NO: 1266 - protein, 332 aa, Homo sapien [sequence omitted]

SEQ ID NO: 1267 - DNA, 1740 bp, Homo sapien
ggccggtagctgttgctgttgggggaccccctcattcctgccgctgccgtccctgctgcctcatggcggccatcggagttcacctgggctgcacctcagcctgtgtggccgtctataaggatggccgggctggtgtggttgcaaatgatgccggtgaccgagttactccagctgttgttgcttactcagaaaatgaagagattgttggattggcagcaaaacaaagtagaataagaaatatttcaaatacagtaatgaaagtaaagcagatcctgggcagaagctccagtgatccacaagctcagaaatacatcgcggaaagtaaatgtttagtcattgaaaaaaatgggaaattacgatatgaaatagatactggagaagaaacaaaatttgttaacccagaagatgttgccagactgatatttagtaaaatgaaagaaacggcacattctgtattgggctcagatgcaaatgatgtagttattactgtcccgtttgattttggagaaaagcaaaaaaatgcccttggagaagcagctagagctgctggatttaatgttttgcgattaattcacgaaccgtctgcagctcttcttgcttatggaattggacaagactcccctactggaaaaagcaatattttggtgtttaagcttggaggaacatccttatctctcagcgtcatggaagttaacagtggaatatatcgggttctttcaacaaacactgatgataacatcggtggtgcacatttcacagaaaccttagcacagtatctagcttctgagttccaaagatccttcaaacatgatgtgagaggaaatgcgcgagccatgatgaaattaacgaacagtgctgaagtagcgaaacattctttgtcaaccttgggaagtgccaactgttttcctgactcattatatgaagggcaagattttgattgcaatgtgtccagagcaagatttgaacttctttgttctccactttttaataagtgtttagaagcaatcagaggactcttagatcaaaatggatttacagcagatgatatcaacaaggttgtcctttgtggagggtcttctcgaatcccaaagctacagcaactgattaaagatcttttcccagctgttgagcttctcaattctatccctcctgatgaagtgatccctattggtgcagctatagaagcaggaattcttattgggaaagaaaacctgttggtggaagactctcttatgatagagtgttcagccagagatattttagttaagggtgtggacgaatcaggagccagtagattcacagtgctgtttccatcagggactcctttgccagctcgaagacaacacacattgcaagcccctggaagcatatcttcagtgtgccttgaactctatgagtctgatgggaagaactctgccaaagaggaaaccaagtttgcacaggttgtactccaggatttagataaaaaagaaaatggattacgtgatatattagctgttcttactatgaaaagggatggatctttacatgtgacatgcacagatcaagaaactggaaaatgtgaagcaatctctattgagatagcatcttagtgttttagagaaatcaagaatttttaaaaacaagaatatcaacatttggttttgtgtataagtggtgtttgtattaaaatactttttcaatgaactgtataaactatgttttattaaactacaatatatcagtaaaaaaaaaaaaaaa

SEQ ID NO: 1268 - protein, 509 aa, Homo sapien
MAAIGVHLGCTSACVAVYKDGRAGVVANDAGDRVTPAVVAYSENEEIVGLAAKQSRIRNISNTVMKVKQILGRSSSDPQAQKYIAESKCLVIEKNGKLRYEIDTGEETKFVNPEDVARLIFSKMKETAHSVLGSDANDVVITVPFDFGEKQKNALGEAARAAGFNVLRLIHEPSAALLAYGIGQDSPTGKSNILVFKLGGTSLSLSVMEVNSGIYRVLSTNTDDNIGGAHFTETLAQYLASEFQRSFKHDVRGNARAMMKLTNSAEVAKHSLSTLGSANCFPDSLYEGQDFDCNVSRARFELLCSPLFNKCLEAIRGLLDQNGFTADDINKVVLCGGSSRIPKLQQLIKDLFPAVELLNSIPPDEVIPIGAAIEAGILIGKENLLVEDSLMIECSARDILVKGVDESGASRFTVLFPSGTPLPARRQHTLQAPGSISSVCLELYESDGKNSAKEETKFAQVVLQDLDKKENGLRDILAVLTMKRDGSLHVTCTDQETGKCEAISIEIAS

SEQ ID NO: 1269 - DNA, 1926 bp, Homo sapien
agagaggggtgcaagatcctgatttttcaggagttcaagcgacaatggcagcccaatacggcagtatgagcttcaaccccagcacaccaggggccagttatgggcctggaaggcaagagcccagaaattcccaattgagaattgtgttagtgggtaaaaccggagcaggaaaaagtgcaacaggaaacagcatccttggccggaaagtgtttcattctggcactgcagcaaaatccattaccaagaagtgtgagaaacgcagcagctcatggaaggaaacagaacttgtcgtagttgacacaccaggcattttcgacacagaggtgcccaatgctgaaacgtccaaggagattattcgctgcattcttctgacctccccagggcctcatgctctgcttctggtggttccactgggccgttacactgaggaagagcacaaagccacagagaagatcctgaaaatgtttggagagagggctagaagtttcatgattctcatattcacccggaaagatgacttaggtgacaccaatttgcatgactacttaagggaagctccagaagacattcaagacttgatggacattttcggtgaccgctactgtgcgttaaacaacaaggcaacaggcgctgagcaggaggcccagagggcacagttgctgggcctgatccagcgcgtggtgagggagaacaaggaaggctgctacactaataggatgtaccaaagggcggaggaggagatccagaagcaaacacaagcaatgcaagaactccacagagtggagctggagagagagaaagcgcggataagagaggagtatgaagagaaaatcagaaagctggaagataaagtggagcaggaaaagagaaagaagcaaatggagaagaaactagcagaacaggaggctcactatgctgtaaggcagcaaagggcaagaacggaagtggagagtaaggatgggatacttgaattaatcatgacagcgttacagattgcttcctttattttgttacgtctgttcgcggaagattaaacttaatgaaaatctgtttgtattttctgcatattctctggcaaccttgccccatacttacttatttagcatagtcgagtgctctagtttctgtctctcaggcactcgtaactaaggaccaccattggccattggtagatgtttgattgacttaacaagagagggacaaattttcaatttgtgaaactccaaagcagaaagtattggtgcttgctaccttgtgaattcttccttagacatgcagagaaaatgtatgcaagagaccaaaaagatggctccaagctatgtcatgttacctgtaataaaatcttttcttctagattctctctatgttggcagataatctccccttgtagcttccactcacttattcttgcattcagagtcacaatgatcatcttacccatgtggtttttgagaaagaaagatcaattctttgtttgcagtgggtaatcttagagatggagatgattgtagaattattcctagatgagtgtcaatttatttaattccattgtcatataaggagtcaaattgtttcttatcatttgttcattgaagaacagagacctgtctggaaaatcgatctctacaaattcaattaaataatgatccccaaatgctgaaaaagtgaaatacagcaattcaacagataatagagcaatgtttagtatattcagctgtatctgtagaaactctttgacgaacctcaatttaaccaatttgatgaatacccagttctcttcttttctagagaaagatagttgcaacctcacctccctcactcaacactttgaatacttattgtttggcaggtcatccacacacttctgcccccactgcattgaattttttgcttatgttgtttataataaaacttttcaattatctc

SEQ ID NO: 1270 - protein, 329 aa, Homo sapien
MAAQYGSMSFNPSTPGASYGPGRQEPRNSQLRIVLVGKTGAGKSATGNSILGRKVFHSGTAAKSITKKCEKRSSSWKETELVVVDTPGIFDTEVPNAETSKEIIRCILLTSPGPHALLLVVPLGRYTEEEHKATEKILKMFGERARSFMILIFTRKDDLGDTNLHDYLREAPEDIQDLMDIFGDRYCALNNKATGAEQEAQRAQLLGLIQRVVRENKEGCYTNRMYQRAEEEIQKQTQAMQELHRVELEREKARIREEYEEKIRKLEDKVEQEKRKKQMEKKLAEQEAHYAVRQQRARTEVESKDGILELIMTALQIASFILLRLFAED

SEQ ID NO: 1271 - DNA, 1882 bp, Homo sapien
agtcgcctggaagcgtccgcccaaggtcgcgggccgcttggggagtcagcagcgcgccaggccccttcgggccccacacgcattaggtgccttcttgatgggtacggagtgaacgcgggcggcggcgggaccgaggcagcgcccagtttgtaaccgccgcgccgcccgtgcccgcgcgcgccacaccccagcgcgcttccggccgggccacgtgaccgcgcgtgcacgtgttccggcctctccgcttcgccgctccgaacctcctcctggtcgtcccggcattcgtccacgcggagccggcttgggcggggcccgggaggcggcggccggagaagccgcggagacgcgagcgccgagcgtcgcgagggagcaggcccgggcaggcaagcggcggcctccgccatgaaccccaggggcctgttccaggacttcaacccagtaagtttctcatctacacctgcctgctgctcttctcggtgctgctgcccctccgcctggacggcatcatccaatggagctactgggccgtctttgcccccatatggctgtggaagcttctagtcgtcgcaggcgccttcgtgggcgcgggcgtttgggcccgcaaccctcgctaccgcaccgagggagaggcctgtgtggagttcaaagccatgctgatcgctgtgggcatccacctgctgctgctcatgttcgaagtcctggtctgcgacagggtggagaggggcacccacttctggctgctggtcttcatgcctctcttcttcgtgtcccccgtgtccgtggctgcctgcgtctggggctttcgacacgataggtcgctggagctggagatcctgtgctcggtcaacatcctgcagttcatcttcatcgccctaaagctggacaggattattcactggccgtggctggtggtgtttgtgcccctgtggatcctcatgtcgttcctttgcctggtcgtcctctattacatcgtctggtccctcctgttcctgcggtccctggatgtggttgccgagcagcggagaacacacgtgaccatggctatcagttggataacgattgtcgtgcctctgctcacttttgaggtcctgctggttcacagattggatggccacaatacattctcctacgtctccatatttgtccccctctggctttccttactaactttaatggccacaacatttaggcgaaaggggggcaatcattggtggtttggcattcgcagagacttctgtcagtttctgcttgaaattttcccatttttaagagaatatgggaacatttcatatgatctccatcacgaagatagtgaagatgctgaagaaacatcagttccagaagctccgaaaattgctccaatatttggaaagaaggccagagtagttataacccagagccctgggaaatacgttcccccccctcccaagttaaatattgatatgccagattaaactcctagagaggacccaggcacacacagactccacttggccttcgcctcttgttcattcatcccaaacctggaaatggaaacaggcttcaaacactcgtctcacgccgtgtttgagatcaccgcctcatcagtatgcatcatagatggagatggtttcagtatgtgggtgtgtgtgatgtgtacctgggtaagagacttgctttccaggttcgcactttcaggtgtagctgggggcagtaagtcgaattgttttagtaggtcctcaaaaggaataaccacacagctgtttgtttaaatgctactgtacctatcaaaactattgtttaaaaagtatttttatacactgctaatctaaaattgtatttcagattgtgcctgtcataacaatagcaaatgtaaaaagttcaaaaaaaaaaaaaaaaaaaa

SEQ ID NO: 1272 - protein, 267 aa, Homo sapien
MLIAVGIHLLLLMFEVLVCDRVERGTHFWLLVFMPLFFVSPVSVAACVWGFRHDRSLELEILCSVNILQFIFIALKLDRIIHWPWLVVFVPLWILMSFLCLVVLYYIVWSLLFLRSLDVVAEQRRTHVTMAISWITIVVPLLTFEVLLVHRLDGHNTFSYVSIFVPLWLSLLTLMATTFRRKGGNHWWFGIRRDFCQFLLEIFPFLREYGNISYDLHHEDSEDAEETSVPEAPKIAPIFGKKARVVITQSPGKYVPPPPKLNIDMPD

SEQ ID NO: 1273 - DNA, 1077 bp, Homo sapien
gtgttttctgcgtgagaggaaaagatgctagaaccacaggagaatggcgtgattgacctaccagattatgagcatgtagaagatgaaacttttcctcctttcccacctccagcctctccagagagacaagatggtgaaggaactgagcctgatgaagagtcaggaaatggagcacctgttcctgtacctccaaagagaacagttaaaagaaatatacccaagctggatgctcagagattaatttcagagagaggacttccagccttaaggcatgtatttgataaggcaaaattcaaaggtaaaggtcatgaggctgaagacttgaagatgctaatcagacacatggagcactgggcacataggctattccctaaactgcagtttgaggattttattgacagagttgaatacctgggaagtaaaaaggaagttcagacctgtttaaaacgaattcgacttgatctccctattttacatgaagattttgttagcaataatgatgaagttgcggagaataatgaacatgatgtcacttctactgaattagatccctttctgacaaacttatctgaaagtgagatgtttgcttctgagttaagtagaagcctaacagaagagcaacaacgaagaattgagagaaataaacaactggccttggaaagaaggcaggcaaagctgctgagtaatagtcagaccctaggaaatgatatgttaatgaatacacccagggcacacacggttgaagaggttaatactgatgaggatcaaaaggaggagtcaaatggattaaacgaagacattctggacaatccatgtaatgatgctattgccaatactttaaatgaagaggaaacactgctggaccagtcttttaaaaatgtgcaacagcaacttgatgctacatccagaaatattactgaagctagataagtttccattaagagaaaatgtatctgttaagtcatcgtcctgcaagcttggcgttactatgtattttttcttcttggagtgaaaatccttagatagtaaaactgttatagattattgtttaaaaaaaaaaaaaaaaaaaaaaaaaaa

SEQ ID NO: 1274 - protein, 301 aa, Homo sapien
MLEPQENGVIDLPDYEHVEDETFPPFPPPASPERQDGEGTEPDEESGNGAPVPVPPKRTVKRNIPKLDAQRLISERGLPALRHVFDKAKFKGKGHEAEDLKMLIRHMEHWAHRLFPKLQFEDFIDRVEYLGSKKEVQTCLKRIRLDLPILHEDFVSNNDEVAENNEHDVTSTELDPFLTNLSESEMFASELSRSLTEEQQRRIERNKQLALERRQAKLLSNSQTLGNDMLMNTPRAHTVEEVNTDEDQKEESNGLNEDILDNPCNDAIANTLNEEETLLDQSFKNVQQQLDATSRNITEAR

SEQ ID NO: 1275 - DNA, 1528 bp, Homo sapien
ggcacgaggcaggccaggtgtgtgcgtccgtcggtctttccgtgcccacgccggagaccagccccggaggccgcctgggcctatccctgtgccaggcaccatgaagcaggagtctgcagccccgaacaccccgcccacctcgcagtcccctacgccgtccgctcagttcccccgaaacgacggcgaccctcaagcgctgtggattttcgggtacggctccctggtgtggaggcccgacttcgcctacagcgacagccgtgtgggcttcgtgcgcggctacagccgccgtttctggcagggagacaccttccatcggggcagcgacaagatgcctggccgtgtggtgacgctccttgaagatcatgagggctgcacttggggcgtggcataccaagtgcaaggggagcaggtaagcaaggccctgaagtacctgaatgtgcgagaggcagtgcttggtggctacgataccaaggaggtcaccttctatccccaagatgctcctgaccaaccactgaaggcattggcctatgtggccaccccacagaaccctggttacctgggccctgcgcctgaagaggccattgccacgcagatcctggcctgccggggcttctccggccacaaccttgaatacttgctgcgtctggcagacttcatgcagctctgtgggcctcaggcgcaggacgagcacctggcagccatcgtggacgctgtgggcaccatgttgccctgcttctgccccaccgagcaggctctggcgctggtgtgaggggctgagcccctgcggggagtgctcatgtggacatcagggccagacacccactccagtgcacaagacagacttgcgaccgcttgagcccactgagcagatatggtgggtggctggaggcttctctttctcagtccctgcctgtctgccagcctgcagctctcctgcttgacactgacttactacttgaaactttatttattgcaccatgttggtgtggtgggcaggtggagggcctgccctggacacaggggccctgctgagcagtggccccatcctggaacttgaccagattccccccagtgctgctgctaaccccacaccacccaggcctccacctccccagggagtctccaagagcctcgatcctctgctcactcagcccagccatccatagccctgggaattccacctgccaaggatcccagcaggctggatgagggatagtagggcatgaggagaaggagccctgtaaggactgaggccccggccagcccttctcctccaccagttccccagagcagagctggagctgatgcctggacacagctgctgagcctggcctgggcctcttacccacttggttgttttcttgtccctctgtctgtctgtctatctacttgtctgtctgggccactcctgcctgtgtgttggtctattcctgggaagctcatcactacaggccctggcaaccttcccagtctgtcccatactgttacccataaaactatctctttaaaaaaaaaaaaaaaaaaaaaa

SEQ ID NO: 1276 - protein, 222 aa, Homo sapien
MKQESAAPNTPPTSQSPTPSAQFPRNDGDPQALWIFGYGSLVWRPDFAYSDSRVGFVRGYSRRFWQGDTFHRGSDKMPGRVVTLLEDHEGCTWGVAYQVQGEQVSKALKYLNVREAVLGGYDTKEVTFYPQDAPDQPLKALAYVATPQNPGYLGPAPEEAIATQILACRGFSGHNLEYLLRLADFMQLCGPQAQDEHLAAIVDAVGTMLPCFCPTEQALALV

SEQ ID NO: 1277 - DNA, 8107 bp, Homo sapien
tgagggaagaagaggaagcgggaggagcttggcttcctcgcgtatttgaggacagcccatctcccttcaagaaccctacggagagtcggactgcatctccgcagcgagctcttggagcgccgccggccgggaggcgaaggatgcaggcggctccgcgcgccggctgcggggcagcgctcctgctgtggattgtcagcagctgcctctgcagagcctggacggctccctccacgtcccaaaaatgtgatgagccacttgtctctggactcccccatgtggctttcagcagctcctcctccatctctggtagctattctcccggctatgccaagataaacaagagaggaggtgctgggggatggtctccatcagacagcgaccattatcaatggcttcaggttgactttggcaatcggaagcagatcagtgccattgcaacccaaggaaggtatagcagctcagattgggtgacccaataccggatgctctacagcgacacagggagaaactggaaaccctatcatcaagatgggaatatctgggcatttcccggaaacattaactctgacggtgtggtccggcacgaattacagcatccgattattgcccgctatgtgcgcatagtgcctctggattggaatggagaaggtcgcattggactcagaattgaagtttatggctgttcttactgggctgatgttatcaactttgatggccatgttgtattaccatatagattcagaaacaagaagatgaaaacactgaaagatgtcattgccttgaactttaagacgtctgaaagtgaaggagtaatcctgcacggagaaggacagcaaggagattacattaccttggaactgaaaaaagccaagctggtcctcagtttaaacttaggaagcaaccagcttggccccatatatggccacacatcagtgatgacaggaagtttgctggatgaccaccactggcactctgtggtcattgagcgccaggggcggagcattaacctcactctggacaggagcatgcagcacttccgtaccaatggagagtttgactacctggacttggactatgagataacctttggaggcatccctttctctggcaagcccagctccagcagtagaaagaatttcaaaggctgcatggaaagcatcaactacaatggcgtcaacattactgatcttgccagaaggaagaaattagagccctcaaatgtgggaaatttgagcttttcttgtgtggaaccctatacggtgcctgtctttttcaacgctacaagttacctggaggtgcccggacggcttaaccaggacctgttctcagtcagtttccagtttaggacatggaaccccaatggtctcctggtcttcagtcactttgcggataatttgggcaatgtggagattgacctcactgaaagcaaagtgggtgttcacatcaacatcacacagaccaagatgagccaaatcgatatttcctcaggttctgggttgaatgatggacagtggcacgaggttcgcttcctagccaaggaaaattttgctattctcaccatcgatggagatgaagcatcagcagttcgaactaatagtccccttcaagttaaaactggcgagaagtacttttttggaggttttctgaaccagatgaataactcaagtcactctgtccttcagccttcattccaaggatgcatgcagctcattcaagtggacgatcaacttgtaaatttatacgaagtggcacaaaggaagccgggaagtttcgcgaatgtcagcattgacatgtgtgcgatcatagacagatgtgtgcccaatcactgtgagcatggtggaaagtgctcgcaaacatgggacagcttcaaatgcacttgtgatgagacaggatacagtggggccacctgccacaactctatctacgagccttcctgtgaagcctacaaacacctaggacagacatcaaattattactggatagatcctgatggcagcggacctctggggcctctgaaagtttactgcaacatgacagaggacaaagtgtggaccatagtgtctcatgacttgcagatgcagacgcctgtggtcggctacaacccagaaaaatactcagtgacacagctcgtttacagcgcctccatggaccagataagtgccatcactgacagtgccgagtactgcgagcagtatgtctcctatttctgcaagatgtcaagattgttgaacaccccagatggaagcccttacacttggtgggttggcaaagccaacgagaagcactactactggggaggctctgggcctggaatccagaaatgtgcctgcggcatcgaacgcaactgcacagatcccaagtactactgtaactgcgacgcggactacaagcaatggaggaaggatgctggtttcttatcatacaaagatcacctgccagtgagccaagtggtggttggagatactgaccgtcaaggctcagaagccaaattgagcgtaggtcctctgcgctgccaaggagacaggaattattggaatgccgcctctttcccaaacccatcctcctacctgcacttctctactttccaaggggaaactagcgctgacatttctttctacttcaaaacattaaccccctggggagtgtttcttgaaaatatgggaaaggaagatttcatcaagctggagctgaagtctgccacagaagtgtccttttcatttgatgtgggaaatgggccagtagagattgtagtgaggtcaccaacccctctcaacgatgaccagtggcaccgggtcactgcagagaggaatgtcaagcaggccagcctacaggtggaccggctaccgcagcagatccgcaaggccccaacagaaggccacacccgcctggagctctacagccagttatttgtgggtggtgctgggggccagcagggcttcctgggctgcatccgctccttgaggatgaatggggtgacacttgacctggaggaaagagcaaaggtcacatctgggttcatatccggatgctcgggccattgcaccagctatggaacaaactgtgaaaatggaggcaaatgcctagagagataccacggttactcctgcgattgctctaatactgcatatgatggaacattttgcaacaaagatgttggtgcattttttgaagaagggatgtggctacgatataactttcaggcaccagcaacaaatgccagagactccagcagcagagtagacaacgctcccgaccagcagaactcccacccggacctggcacaggaggagatccgcttcagcttcagcaccaccaaggcgccctgcattctcctctacatcagctccttcaccacagacttcttggcagtcctcgtcaaacccactggaagcttacagattcgatacaacctgggtggcacccgagagccatacaatattgacgtagaccacaggaacatggccaatggacagccccacagtgtcaacatcacccgccacgagaagaccatctttctcaagctcgatcattatccttctgtgagttaccatctgccaagttcatccgacaccctcttcaattctcccaagtcgctctttctgggaaaagttatagaaacagggaaaattgaccaagagattcacaaatacaacaccccaggattcactggttgcctctccagagtccagttcaaccagatcgcccctctcaaggccgccttgaggcagacaaacgcctcggctcacgtccacatccagggcgagctggtggagtccaactgcggggcctcgccgctgaccctctcccccatgtcgtccgccaccgacccctggcacctggatcacctggattcagccagtgcggattttccatataatccaggacaaggccaagctataagaaatggagtcaacagaaactcggctatcattggaggcgtcattgctgtggtgattttcaccatcctgtgcaccctggtcttcctgatccggtacatgttccgccacaagggcacctaccataccaacgaagcaaagggggcggagtcggcagagagcgcggacgccgccatcatgaacaacgaccccaacttcacagagaccattgatgaaagcaaaaaggaatggctcatttgaggggtggctacttggctatgggatagggaggagggaattactagggaggagagaaagggacaaaagcaccctgcttcatactcttgagcacatccttaaaatatcagcacaagttgggggaggcaggcaatggaatataatggaatattcttgagactgatcacaaaaaaaaaaaaaacctttttaatatttctttatagctgagttttcccttctgtatcaaaacaaaataatacaaaaaatgcttttagagtttaagcaatggttgaaatttgtaggtactatctgtcttattttgtgtgtgtttagaggtgttctaaagacccgtggtaacagggcaagttttctacgtttttaagagcccttagaacgtgggtattttttttcttgagaaaagctaatgcacctacagatggcccccaacattctcttccttttgcttctagtcaaccttaatgggctgttacagaaactagttcgtgtttatatactatttcctttgatgtcctataagtcggaaaagaaaggggcaaagagaacctattatttgccagtttttaagcagagctcaatctatgccagctctctggcatctggggttcctgactgataccagcagttgaaggaagagagtgcatggcacctggtgtgtaacgacacaatcagcacaactggagagaggcattaaagaaccagggaaggtagtttgatttttcattgaattctacaagctaatattgttccacgtatgtagtcttagaccaatagctgtaactatcagctgcaataccatggtgaccagctgttacaaaagattttttcctgttttatctgaaacatactggatttatatatgtataagcgcctcaatggggaattagagccagatgttatgatttgtttgctctttttcttttatagttatagcaaaaatatggataatttctagtgaatgcataaattaggttgcgtttcttattttgctttaaatctctggtagtttttccacccctgtgacacaatcctaatagacagtgtcctgtaaatggacacaacacaataaagtcaagttattattgctgttactctggatgatatggaaaacactgccatattttaaatcaactactccacgtgtttttccatccaatcacactgctgtgattcagggatctttcttctaaaacggacacatttgaacctcaggttcatcacaaacctggtacctgttgcttcccagaggatggagaagtgtagttaatcacacctcttagtttaatctgaaatcttgacccagttatttaacaaataaatacctcattgattatatttaaaagtaatacacttcctgtaaacaaatggggacaatgcatccaaaaaatctttttaaacagattacacaaaaattatttccagaaaggctaccatttatcatcattatatttcaagcctcttatacttaataagcactttctaaaaagtcttgagatcccaccattctgaggaattcaatatgatcactttttccttctttgcctgggagaggttaagaggcggtttcgaaggtatagatgctattgttctgatggcccggctgaataaaatggaaattctagtttgttagaattatgcattctttttcaagattctcagtgtgcctaacttattggagcacatcagtttcttgggtaatggaaaacattacctagagttgccagtggcacattacaccagtacagagcacattccaaaggagacattggaccagttaattcccatacaagtcaaggtaacagaacaaaagggaatcctgatgcccttttaccattgctggttgagctcaggcactgtcatggacacccttaattttaaaaggttttaatcattcttctataaaatacatttaaaatggaaaaatacttaatatcactaaatatcagaacaatgtaacatttacaaatgacatattgaaagcaaaggctgttttatttagccaagatgattaccattaggagttactttatgtattgttgaaagcaaattttaaacatgatgttttagaagtgtttctgatttttaaacctggtttacaggtattacttctgcacttaccaaataatgccagatggaaatttattatttcttgcaattcccgtgatagctctgttctttatgcattgtctcaacactttcccttttttcccaaaatgagtagagaattaaagccacccaaaacagcttctgctactaaaatgttctcatcctttctcctccctctccttttcctgccacaaaaggtgaaaaatgagatccaatcctctcaccaaaatttcaaacctaggacactggaatgactgcagggatcagtggttctcccatatcaccatcaattaagacatataggacactgtcttccttcaagagggttacaatgtggccatcagacaggaaaccaaacggtggataaagtattaagtaactaagtgccaaataaatgctggaaatcttgacctctccttgggattatgggtgtaacaaaaatccctacatctgtttatgaaggccatattcagtacattttaaatggtaaataatctgtttatgtgaagaaaaagaattaagtctttcttccaactctctccttggatagcctagcacagtgcagcctccataaccatgacattcccgcccaagctctcagtgcctaatcctgctttgtcattcacatctcacaaaatcttgacatcttacattccaatacattatcaagcaagcacaagtatgctggtagtagcctctttaaataatatgtatagacaacaacaacgacaaaaaatagactgttttaaagtttcagggaaagttggtggctgatttaaagttgtgcaggaaacatcttctgtgtatgaagcaaatgtcgatgttttgaaaagctaggagatgactttgaatgaatgcaaggttagtgagatcctaagctctcaaaatagcatattccctagagctcaagaaagctggtccaggaggttgaaaaagctattttgttgttaaattattttctggcccttcttaatatttaaaaatgtatttccccttgtggctttcaaccacctgctcaaaaaaagagacttgttacatgaaagttttcattaaagagctgaaaacaagaatttagagagccattcctagaaaatgtcctactgccctgcatttgacaaacaagcatcctttactaacaagagcaggaattcagaggcacaagaaaaagcattggcatgagccaaagagtctgtcttaatgttacttttgaaaatctgctgagcggccaccatatgcaggctgagagctgggcacaggcgaagccattggaagcacttcaggaacaagcacacagctgtgggacttgaacatgcaagtgttcaggttgtgtcaagaagcttttctttccttctatgatggaatctgttcttttctatcctacttttttctctcttcctctcctcaccacattataccctgctcttacgcagtaaacgttttaatggcccgtttatgtctcatgcctccaaacaacactgaatttgaaaccccccattttttcttttcaccaccctgttgagcaattttcccaaaaaaagggcagcaattattaaattgaattcaagtttctagattttactaagttttattttgtcaggttttttaaattttttcagtgagcgtggtgactgcagaggttagtgctgtgaaaagctgggctaaatattctttctgtaaagtcaaacaggattccatcccctgtgaaataacacaaaatttcactctctaaaagcaacagcatgtaaactagaatgaaagaaggaaattatgtacgtatgcctaatattctttgtgaatgtctttcatttaactaaaattatattagaaaccagattgataaataaaaaattcaaagtagttttaattatcct

SEQ ID NO: 1278 - protein, 1331 aa, Homo sapien
MQAAPRAGCGAALLLWIVSSCLCRAWTAPSTSQKCDEPLVSGLPHVAFSSSSSISGSYSPGYAKINKRGGAGGWSPSDSDHYQWLQVDFGNRKQISAIATQGRYSSSDWVTQYRMLYSDTGRNWKPYHQDGNIWAFPGNINSDGVVRHELQHPIIARYVRIVPLDWNGEGRIGLRIEVYGCSYWADVINFDGHVVLPYRFRNKKMKTLKDVIALNFKTSESEGVILHGEGQQGDYITLELKKAKLVLSLNLGSNQLGPIYGHTSVMTGSLLDDHHWHSVVIERQGRSINLTLDRSMQHFRTNGEFDYLDLDYEITFGGIPFSGKPSSSSRKNFKGCMESINYNGVNITDLARRKKLEPSNVGNLSFSCVEPYTVPVFFNATSYLEVPGRLNQDLFSVSFQFRTWNPNGLLVFSHFADNLGNVEIDLTESKVGVHINITQTKMSQIDISSGSGLNDGQWHEVRFLAKENFAILTIDGDEASAVRTNSPLQVKTGEKYFFGGFLNQMNNSSHSVLQPSFQGCMQLIQVDDQLVNLYEVAQRKPGSFANVSIDMCAIIDRCVPNHCEHGGKCSQTWDSFKCTCDETGYSGATCHNSIYEPSCEAYKHLGQTSNYYWIDPDGSGPLGPLKVYCNMTEDKVWTIVSHDLQMQTPVVGYNPEKYSVTQLVYSASMDQISAITDSAEYCEQYVSYFCKMSRLLNTPDGSPYTWWVGKANEKHYYWGGSGPGIQKCACGIERNCTDPKYYCNCDADYKQWRKDAGFLSYKDHLPVSQVVVGDTDRQGSEAKLSVGPLRCQGDRNYWNAASFPNPSSYLHFSTFQGETSADISFYFKTLTPWGVFLENMGKEDFIKLELKSATEVSFSFDVGNGPVEIVVRSPTPLNDDQWHRVTAERNVKQASLQVDRLPQQIRKAPTEGHTRLELYSQLFVGGAGGQQGFLGCIRSLRMNGVTLDLEERAKVTSGFISGCSGHCTSYGTNCENGGKCLERYHGYSCDCSNTAYDGTFCNKDVGAFFEEGMWLRYNFQAPATNARDSSSRVDNAPDQQNSHPDLAQEEIRFSFSTTKAPCILLYISSFTTDFLAVLVKPTGSLQIRYNLGGTREPYNIDVDHRNMANGQPHSVNITRHEKTIFLKLDHYPSVSYHLPSSSDTLFNSPKSLFLGKVIETGKIDQEIHKYNTPGFTGCLSRVQFNQIAPLKAALRQTNASAHVHIQGELVESNCGASPLTLSPMSSATDPWHLDHLDSASADFPYNPGQGQAIRNGVNRNSAIIGGVIAVVIFTILCTLVFLIRYMFRHKGTYHTNEAKGAESAESADAAIMNNDPNFTETIDESKKEWLI

SEQ ID NO: 1279 - DNA, 1870 bp, Homo sapien
aaaaaacaaccatttcctctctgctgagagccagggaaggcgagctctgcgcacacgggcgtccctgcagcagccactctgctttccaggaccggccaactgccctggaggcatccacacaggggcccaggcagcacagaggagctgtgaacccgctccacaccggccaccctgcccggagcctggcactcacagcaggccggtgctaaggagtgtggcgcgggctcgactcccactgctgccggcctcccgagtgactctgttttccactgctgcaggcgagaagaggcacgcgcggcacaggccggcctccgcttcccgggaagacggcgcactcctggccctgggttcttgctgctgcccaccctctgctccctgggatgggccccgaggcgagcagcttcagcacaggcctggccctgctccaggtgcaggaaggaggataaggccgggccgagaggcggcacacctggaccatcccatgggcctccgcccgcgccgccccgaggatgagtggtgatgtcctctagccacccctagcagcgtcggctctccctggacgtgcggccgcggactgggacttggctttctccggataagcggcggcaccggcgtcagcgatgaccgtgcagagactcgtggccgcggccgtgctggtggccctggtctcactcatcctcaacaacgtggcggccttcacctccaactgggtgtgccagacgctggaggatgggcgcaggcgcagcgtggggctgtggaggtcctgctggctggtggacaggacccggggagggccgagccctggggccagagccggccaggtggacgcacatgactgtgaggcgctgggctggggctccgaggcagccggcttccaggagtcccgaggcaccgtcaaactgcagttcgacatgatgcgcgcctgcaacctggtggccacggccgcgctcaccgcaggccagctcaccttcctcctggggctggtgggcctgcccctgctgtcacccgacgccccgtgctgggaggaggccatggccgctgcattccaactggcgagttttgtcctggtcatcgggctcgtgactttctacagaattggccatacaccaacctgtcctggtcctgctacctgaacattggcgcctgccttctggccacgctggcggcagccatgctcatctggaacattctccacaagagggaggactgcatggccccccgggtgattgtcatcagccgctccctgacagcgcgctttcgccgtgggctggacaatgactacgtggagtcaccatgctgagtcgcccttctcagcgttccatcgatgcacacctgctatcgtggaacagcctagaaaccaagggactccaccaccaagtcacttcccctgctcgtgcagaggcacgggatgagtctgggtgacctctgcgccatgcgtgcgagacacgtgtgcgtttactgttatgtcggtcatatgtctgtacgtgtcgtgggccaacctcgttctgcctccagctttcctggttagcgcaacgcggctccacgaccacacgcacttcagggtggaagctggaagctgagacacaggttaggtggcgcgaggctgccctgcgctccgctttgctttgggattaatttattctgcatctgctgagaggggcaccccagccatatcttacactttggtaaagcagaaaaccaggaaaattttcttaaaatatccacaatattccttgagtgagtcagaatctatagccggttagtgatggtttcaggcagaatcgtgttcgtgtctgttttgctcgattcctttcctaagttaaataaatgcaagcctctgaacttctgtctataaaaaaaaaaaaaaaaa

SEQ ID NO: 1280 - protein, 170 aa, Homo sapien
MTVQRLVAAAVLVALVSLILNNVAAFTSNWVCQTLEDGRRRSVGLWRSCWLVDRTRGGPSPGARAGQVDAHDCEALGWGSEAAGFQESRGTVKLQFDMMRACNLVATAALTAGQLTFLLGLVGLPLLSPDAPCWEEAMAAAFQLASFVLVIGLVTFYRIGHTPTCPGPAT

SEQ ID NO: 1281 - DNA, 1647 bp, Homo sapien
gcccgcccgcgccccgaccagcccggcctcgggcagccactcaccggtgtccccgtccgcgtccttcctccccgggtcccggccatggcgctgagtgaacccatcctgccgtccttctccactttcgccagcccgtgccgcgagcgcggcctgcaggagcgctggccgcgcgccgaacccgagtccggcggcaccgacgacgacctcaacagcgtgctggacttcatcctgtccatggggctggatggcctgggcgccgaggccgccccggagccgccgccgccgcccccgccgcctgcgttctattaccccgaacccggcgcgcccccgccctacagcgcccccgcgggtggcctggtgtctgagctgctgcgacccgagctggatgcgccgctggggcccgcactgcacggccgctttctgctggcgccgcccggccgcctggtcaaggccgagccccctgaagcggacggcggcggcggctacggctgcgcccccgggctgacccgtggaccgcgcggcctcaagcgcgagggcgccccgggcccggcggcttcgtgcatgcgaggtcccgggggccgccccccgccgccgcccgacacaccgccgctcagccccgacggccccgcgcgcctgcccgcgcccggtccgcgcgcctccttcccgccgcctttcggtggccctggtttcggcgcgcccgggcccggcctgcattacgcgccgcctgcgcccccagccttcggtctcttcgacgacgcggccgccgccgcggcagccctgggcctggcgccccccgccgcccgcggtctcctcacgccgcctgcgtccccgctggagctgctggaggccaagccaaagcgcggccgccgctcttggccccgcaaacgcaccgccactcacacctgcagctacgcgggctgcggcaagacctacaccaagagttcgcatctgaaggcgcatctgcgcacgcacacaggtgagaagccctaccactgcaactgggacggctgcggctggaagtttgcgcgctcagacgagctcacgcgccactaccgaaagcacacgggccaccggccattccagtgccatctgtgcgatcgtgccttttcgcgctccgatcacctggcgctgcacatgaaacggcacatgtagccgggacgcccccgcccacctgcggcgggccgtggcgggtcccacgcgccgggcgcggccccctcccaaactgtgactggtatttattggacccagagaaccgggccgggcacagcgtggctacagagggtctccctcgatgacgacgacgacgacgccaccaccccagcccccgtctgtgactgaaggcccggtgggaaaagaccacgatcctccttgacgagttttgtttttcaaaatggtgcaataatttaagtggcatcttctctcccaccgggtctacactagaggatcgaggcttgtgatgccttgtgagaaataagggccttaatttgtactgtctgcggcattttttataatattgtatatagtgactgacaaatattgtattactgtacatagagagacaggtgggcatttttgggctacctggttcgtttttataagattttgctgggttggttttttttttaattaaaaagttttgcatctttt

SEQ ID NO: 1282 - protein, 355 aa, Homo sapien
MALSEPILPSFSTFASPCRERGLQERWPRAEPESGGTDDDLNSVLDFILSMGLDGLGAEAAPEPPPPPPPPAFYYPEPGAPPPYSAPAGGLVSELLRPELDAPLGPALHGRFLLAPPGRLVKAEPPEADGGGGYGCAPGLTRGPRGLKREGAPGPAASCMRGPGGRPPPPPDTPPLSPDGPARLPAPGPRASFPPPFGGPGFGAPGPGLHYAPPAPPAFGLFDDAAAAAAALGLAPPAARGLLTPPASPLELLEAKPKRGRRSWPRKRTATHTCSYAGCGKTYTKSSHLKAHLRTHTGEKPYHCNWDGCGWKFARSDELTRHYRKHTGHRPFQCHLCDRAFSRSDHLALHMKRHM

SEQ ID NO: 1283 - DNA, 6182 bp, Homo sapien
ggtccccggctgcccgcagcccgctcgcggcgcttctccggcccggctccttctccgctcgttaacgtcgccaaccccccccacccctcatatctctctccacccacccaaccgccccccgctccttctcgccgcctcgagtccgcttgggggaaaacttcaaagagccggatcgcaggctccctgcctactcccccaccggggatttcagactagacgcttgaagcaaagctgccatcccagaagacgacatgctctcagcaacccccctgtatgggaacgttcacagctggatgaacagcgagagggtccgcatgtgtggggcgagcgaagacaggaaaatccttgtaaatgatggtgacgcttcaaaagccagactggaactgagggaagagaatcccttgaaccacaacgtggtggatgcgagcacggcccataggatcgatggcctggcagcactgagcatggaccgcactggcctgatccgggaagggctgcgggtcccgggaaacatcgtctattctagcttgtgtggactgggctcagagaaaggtcgggaggctgccacaagcactctaggtggccttgggttttcttcggaaagaaatccagagatgcagttcaaaccgaatacacccgagacagtggaggcttctgccgtctctggaaaacccccaaatggcttcagtgctatatacaaaacaccgcctggaatacaaaaaagtgctgtagccacagcagaagcgctgggcttggacaggcctgccagcgacaaacagagccctctcaacatcaatggtgctagttatctgcggctgccctgggtcaatccttacatggagggtgccacgccagccatctaccctttcctcgactcgccaaataagtattcactgaacatgtacaaggccttgctacctcagcagtcctacagcttggcccagccgctgtattctccagtctgcaccaatggggagcgctttctctacctgccgccacctcactacgtcggtccccacatcccatcgtccttggcatcacccatgaggctctcgacaccttcggcctccccagccatcccgcctctcgtccattgcgcagacaaaagcctcccgtggaagatgggcgtcagccctgggaatcctgttgattcccacgcctatcctcacatccagaacagtaagcagcccagggttccctctgccaaggcggtcaccagtggcctgccgggggacacagctctcctgttgcccccctcgcctcggccgtcaccccgagtccaccttcccacccagcctgctgcagacacctactcggagttccacaagcactatgccaggatctccacctctccttcagttgccctgtcaaagccatacatgacagttagcagcgagttccccgcggccaggctctccaatggcaagtatcccaaggctccggaagggggcgaaggtgcccagccagtgcccgggcatgcccggaagacagcggttcaagacagaaaagacggcagctcacctcctctgttggagaagcagaccgttaccaaagacgtcacagataagccactagacttgtcttctaaagtggtggatgtagatgcttccaaagctgaccacatgaaaaagatggctcccacggtcctggttcacagcagggctggaagtggcttagtgctctccggaagtgagattccgaaagaaacactatctcctccaggaaatggttgtgctatctatagatctgaaatcatcagcactgctccctcatcctgggtggtgcccgggccaagtcctaacgaagagaacaatggcaaaagcatgtcgctgaaaaacaaggcattggactgggcgataccacagcagcggagttcatcatgcccgcgcatgggcggcaccgatgctgtcatcactaacgtttcagggtcagtgtcgagtgcaggccgcccagcctccgcatcacccgcccccaatgccaatgcagatggcaccaaaaccagcaggagctctgtagaaaccacaccatccgttattcagcacgtgggccagcccccggccactcctgccaagcacagtagcagcaccagcagcaagggcgccaaagccagcaacccagaaccgagtttcaaagcaaacgagaacggccttccaccaagctctatatttctgtctccaaatgaggcattcaggtccccaccaattccctaccccaggagttacctcccttacccagcccctgagggcattgctgtaagtcccctctccttacatggcaaaggacctgtctaccctcacccagttttgttacccaatggcagtctgtttcctgggcaccttgccccaaagcctgggctgccctatgggcttcccaccggccgtccagagtttgtgacctaccaagatgccctggggttgggcatggtgcatcccatgttgataccacacacgcccatagagattactaaagaggagaaaccagagaggagatcccggtcccatgagagagcccgttacgaggacccaaccctccggaatcggttttccgagattttggaaactagcagcaccaagttacatccagatgtccccaccgacaagaacctaaagccgaaccccaactggaatcaagggaagactgttgtcaaaagcgacaagcttgtctacgtagaccttctccgagaagaaccagatgctaaaactgacacaaacgtgtccaaacccagctttgcagcagagagtgttggccagagcgctgagccccccaagccctcagttgagccggccctgcagcagcaccgtgatttcatcgccctgagagaggagttggggcgcatcagtgacttccacgaaacttatactttcaaacagccagtcttcaccgtaagcaaggacagtgttctggcaggtaccaacaaagagaacctagggttgccagtctcgactccattcctggagccacctctggggagcgatggccctgctgtaacttttggtaaaacccaagaggatcccaaaccattttgtgtgggcagtgccccaccaagtgtggatgtgacccccacctataccaaagatggagctgatgaggctgaatcaaatgatggcaaagttctgaaaccgaagccatctaagctggcaaagagaatcgccaactcagcgggttacgtgggtgaccgattcaaatgtgtcactaccgaactgtatgcagattccagtcagctcagccgggagcaacgggcattgcagatggaaggattacaagaggacagtattttatgtctacccgctgcttactgtgagcgtgcaatgatgcgcttctcagagttggagatgaaagaaagagaaggtggccacccagcaaccaaagactccgagatgtgcaaattcagcccagccgactgggaaaggttgaaaggaaatcaggacaaaaagccaaagtcggtcaccctggaggaggccattgcagaacagaacgaaagtgagagatgcgagtatagtgttggaaacaagcaccgtgatccctttgaagccccagaggacaaagatcttcctgtggagaagtactttgtggagaggcagcctgtgagcgagcctcccgcagaccaggtggcctcggacatgcctcacagccccaccctccgggtggacaggaaacgcaaagtctcaggtgacagcagccacactgagaccactgcggaggaggtgccagaggaccctctgctgaaagccaaacgccgacgagtctctaaagggctccatcctaaaaaacaacgccacttgctgcaccttagagaacgatgggagcagcaggtgtcggcagcagatggcaaacctggccggcaaagcaggaaggaagtgacccaggccactcagcctgaggccattcctcaggggactaacatcactgaagagaaacctggcaggaaaagggcagaggccaaaggcaacagaagctggtcggaagagtctcttaaacccagtgacaatgaacaaggcttgcctgtgttctccggctctccgcccatgaagagtctttcatccaccagtgcaggcggcaaaaagcaggctcagccaagctgcgcaccagcctccaggccgcctgccaaacagcagaaaattaaagaaaaccagaagacagatgtgctgtgtgcagacgaagaagaggattgccaggctgcctccctgctgcagaaatacaccgacaacagcgagaagccatccgggaagagactgtgcaaaaccaaacacttgatccctcaggagtccaggcggggattgccactgacaggggaatactacgtggagaatgccgatggcaaggtgactgtccggagattcagaaagcggccggagcccagttcggactatgatctgtcaccagccaagcaggagccaaagcccttcgaccgcttgcagcaactgctaccagcctcccagtccacacagctgccatgctcaagttcccctcaggagaccacccagtctcgccctatgccgccggaagcacggagacttattgtcaataagaacgctggcgagacccttctgcagcgggcagccaggcttggctatgaggaagtggtcctgtactgcttagagaacaagatttgtgatgtaaatcatcgggacaacgcaggttactgcgccctgcatgaagcttgtgctaggggctggctcaacattgtgcgacacctccttgaatatggcgctgatgtcaactgtagtgcccaggatggaaccaggcctctgcacgatgctgttgagaacgatcacttggaaattgtccgactacttctctcttatggtgctgaccccaccttggctacgtactcaggtagaaccatcatgaaaatgacccacagtgaacttatggaaaagttcttaacagattatttaaatgacctccagggtcgcaatgatgatgacgccagtggcacttgggacttctatggcagctctgtttgtgaaccagatgatgaaagtggctatgatgttttagccaaccccccaggaccagaagaccaggatgatgatgacgatgcctatagcgatgtgtttgaatttgaattttcagagacccccctcttaccgtgttataacatccaagtatctgtggctcaggggccacgaaactggctactgctttcggatgtccttaagaaattgaaaatgtcctcccgcatatttcgctgcaattttccaaacgtggaaattgtcaccattgcagaggcagaattttatcggcaggtttctgcaagtctcttgttctcttgctccaaagacctggaagccttcaaccctgaaagtaaggagctgttagatctggtggaattcacgaacgaaattcagactctgctgggctcctctgtagagtggctccaccccagtgatctggcctcagacaactactggtgagcaagctggacccaccatgtacagtgtgttatagtgttaatccttgtgcatatgtgtcataatacaactatttctgtaaagaaaggacactattacatatgaaaatatctcttctttatataagagaaattactccagtcagaaggacttagaaacatgtttttttccttttaaacttttaagtcagtttttatgaagttgttataatgtttctttacttttcaatgcacacatgctttgggatacgtttgtttttacttggaacatttgtttcttttcttttttaaggagaaaaaaaaatgagtaaaaggagctccacactttgacttaatttcatacaaagctctgatgacaggccatgactgtagagtggtcagaactgtgtggttggtttgagggagcgaattcggggaaggcacttggtgatataactttgttttgtttacagagtacctgctcgggccaggtaaatgctattggatgtaatccagtagtgtgtaatataaattcaaaccatatccacacacaacaactaattgtatgaaacttttatatcctaatttaaaagctgtgaaattagttttcacgcatcaaaccggattgtttatatgtttaaacattttatgctcttatttaaagaagactttgagctatttttttctgtaccctgtaaaatattgaaaactaacataatatgttgaggttgcttggaaatgtacataaaactaaaattttctgaatcgtgaaaaaaaaaaaaaaaaaaaa

SEQ ID NO: 1284 - protein, 211 aa, Homo sapien
MPPEARRLIVSKNAGETLLQRAARLGYEEVVLYCLENKICDVNHRDNAGYCALHEACARGWLNIVRHLLEYGADVNCSAQDGTRPLHDAVENDHLEIVRLLLSYGADPTLATYSGRTIMKMTHSELMERFLTDYLNDLQGRNDDDASGTWDFYGSSVCEPDDESGYDVLANPPGPEDQDDDDDAYSDVFEFEFSETPLLPCYNIQVSVAQG

SEQ ID NO: 1285 - DNA, 2059 bp, Homo sapien
ggcacgagggcgggtgggaagccgtgtctcgcagtcgtggactcgtgcagctggggcgtccgcagccgctcgtcacccgcgtgatgctgtttctggcgttgggcagcccgtgggcggtcgaactgcctctctgcggaaggaggactgcattgtgtgcggccgccgcgctccgaggtccccgggcctctgtctcccgggcgtcctccagcagcgggccttcggggccggtagccggctggagtacggggccttcgggagccgcgcgccttctccggcgtccgggtcgagcgcagatccctgtttattgggaaggatatgttcgattcttaaatacgccatctgacaaatcagaagatggaaggctaatttatactggcaatatggcccgagcagtgtttggtgtgaaatgtttctcttattctacgagtctgattggccttacatttctgccatacatttttacacaaaataatgctatttctgaaagtgtgcctctgcctattcaaatcatattctatggcatcatgggaagctttacggtgatcaccccagtgctgcttcactttattacaaaaggctatgtcattcgattgtaccatgaggccacaacagacacttataaagccattacctacaatgctatgcttgcagaaacgagtacagtgtttcaccagaatgatgtgaagattccagatgctaaacatgtatttaccacattttatgctaaaacaaaatcactgttagttaatccagtgctctttccaaaccgtgaagactatatccatctaatgggttatgacaaagaagaatttattttgtatatggaagaaaccagtgaagagaaacggcataaagatgacaaatgagcctatttgttagtgttcgtgctcaaatgtgatttacgttttaatgtataataataaaattgccttttgcattccgttagtgactgattgttaaaaataatttgaaattatcaaagcttttaatttccagagaatgatgtttgtttataataaaacaagctatgtttgaaaaccaaaatgtagtatctaccattcgtgttttagaaaggtatgtgaataaatatgttcatgctagtataagagttctgtgttactgtggttgactctaaactggggatctgatgtcagtagcaaatgggagagttgctttattctttgtgtatggatttttctaagtgtataaatattttccgacattaaaagacattttctctttgaggaagacacagtcataggtggtgcggagctgtggtccacctgctcctgctcctgactcactgctctttgctgttgcctgaggaccaagtctgtcaggaagctggctaggaagccttgcagcagccatggcttttaaacataccagaaaaacacccgtggagtcagaggtggcaattcaccgaattcatatcactctaacgagttgcaacgtaaaatccctggataaggtgtgtgctgacttgatctgaggagcaaaggaaaagaatcagtgaaaggaccagtttgaatgcctaccaagactttgagaatcactacaagaaaaacttacggtgaaggttctaaggcatgggatcgtttccagatgagaatccacaagcgactcattgacttgcgcagtcctcagatagttaagcagattacttccatcagtattgagccaggagttgagatggaagtcaccattgcaaatgcttaagtcaactgttttcataaattgattaccagttgttaaaaaattttcaaaaaaccgcaaaatttcaagaaattcacaaattatgggagcagttttaagtcttctttggttcagaacacaggtttttgcctaacccctggcatgattgcccataagaacatacatgtacagttgaactggtggttagctatacgggaaatggtaagtagtgttgtcttcagtatcttaatttgtttctgcaactgtgcactcctcccttggtggcaccctatgggtgtaggaaaaccactgttattaaacaggtgaaaaataaaaaatttttcaaaaaaaaaaaaaaaaaaaa

SEQ ID NO: 1286 - protein, 161 aa, Homo sapien
MARAVFGVKCFSYSTSLIGLTFLPYIFTQNNAISESVPLPIQIIFYGIMGSFTVITPVLLHFITKGYVIRLYHEATTDTYKAITYNAMLAETSTVFHQNDVKIPDAKHVFTTFYAKTKSLLVNPVLFPNREDYIHLMGYDKEEFILYMEETSEEKRHKDDK

SEQ ID NO: 1287 - DNA, 3941 bp, Homo sapien
  Unsure 3939: Unknown base
ttgggaaacccctacctgtctgtacctgtaggtcttttctctggggtctggaagaagaatccttcaatatcttgccttctggtaatctgagagcagggcgagaaaaggaagatcagagttccacccttaaatctgtaggttttcactcccccactctcctttgcagtcccgtggagtctccatctgagccctttcctagtccaggcatcccgatgttggtggatggcccatctgagcggccagccctgtgcttcttgctgttggctgtggcaatgtctttcttcggctcagctctatccatagatgaaacacgggcgcatctgttgttgaaagaaaagatgatgcggctcggggggcggctggtgctgaacaccaaggaggagctggccaatgagaggctcatgacgctcaaaatcgctgagatgaaggaggccatgaggaccctgatattcccacccagcatgcactttttccaggccaagcatctcattgagagaagtcaagtgtttaatattctaaggatgatgccaaaaggggctgccttgcacctccatgacattggcatcgtgactatggactggctggtgaggaatgtcacctacaggcctcactgccacatctgtttcaccccaagggggatcatgcagttcagatttgctcacccaactccccgtccatcagaaaaatgttccaagtggattctgctggaggattatcggaagcgggtgcagaacgtcactgagtttgatgacagcttgctgaggaatttcactctggtgacccagcacccggaggtgatttacacaaaccaaaatgttgtctggtcgaaatttgaaaccatcttcttcaccatctctggtctcatccattacgcaccagtgttcagagactatgtcttccggagcatgcaggagttctacgaggacaacgtgctctacatggagatcagagccaggctgctgccggtgtatgagctcagtggagagcaccatgacgaagagtggtcagtgaagacttaccaggaagtagctcagaagtttgtggaaactcaccctgagtttattggaatcaaaatcatttattcggatcacagatccaaagatgtggctgtcatcgcagaatccatccgaatggccatggggctccgaatcaagttccccacggtggtggcagggtttgacctggtggggcatgaggacactggccactccttgcgtgactacaaggaagctctgatgatccccgccaaggatggcgttaagctgccttacttcttccacgccggagaaacagactggcagggtacttccatagacaggaacattctggatgctctgatgctgaacactaccagaatcggccatggatttgctttgagcaaacaccccgcagtcaggacttactcctggaaaaaggacatccccatagaagtctgtcccatctctaaccaggtgctgaaactggtgtctgacttgaggaaccaccctgtagccactctgatggccactgggcaccccatggtgatcagctctgatgacccagctatgtttggtgccaaaggcttgtcctatgatttctatgaggtcttcatgggcattggggggatgaaggctgacctgaggaccctcaaacagctggccatgaactctatcaagtacagtaccctgttggagagtgagaaaaatactttcatggaaatctggaagaagagatgggataagttcatagcagatgtggctacaaagtgaggagaagctagccagccctctacaagctgtcttcttgcacacgctgtcacttcctctcactcgttcttgaatcagctccatgtgcccatgaaatcaatggcctctgtatggagcgaccctgtgagaagcacttggctggctgagcaaattcatcctctggaaatattctctctcagccacagtgacattgaccctcttggttttctcctctctctggccatttcttccagtttccctatttcagagtcttctcctctctctgatctctgtgctgtttcctcaggactcagtcctgggctctcttctattctggtctctttatttttttatttttgtattttttcgagatggagttttgctcttgttgcccaggctggagtacaatggtgcgatctcagctcagtgcaacctccgccacccgggttcaggcaattctcttgcatcagcctcccgagtagttggaattataggcatgtgccaccacacccagctgatttttgcatttttagtagagacaggttttcaccatgttggcgagctggtatccaactcttgacctcaggtgatccactcgccccttggctcccaaagtgctggaattacaggcgttagccaccatgcctggcctattctggtctctttaactctctcctctttatttctcttctctctctgtacacttttcctgggtggtctcatccattcctttgctttttcataccatttatttgttaatgattcccacatttatttatgcacttggagagctcacaggaatctcagaaactgatgaggtacaattctgaaccctcagtctcttccctttaaacctttctttttctctactttaatttttctaaagagtgtcttgctatgttgcccaggctggtctccaactcaagtgatcctcctgccgcagtctcccgaagtgctgggattactgacatgagccaccacactcagccctttaaacctttccctggcctttcccatagctggtgaaggacacctccatccattccacgcagttgctcaaagcagaaattttcagtgcaagtcttgatgctgcgccgtcccccactccctacatcagaacgcatccctcatctggactccagcggtggcttcttgatgctgcgcggtcccccactccctacatcagaatgcatcccgcatccagactccagcggtggtgctctacctgcacgctgttgccaagtccaagctaccatactcctgcctgagctatgacaacagcctcctcactgatctcccctttcttccctttgcctcctccagctcatttttcacagtgtagaatgacattttgtttgtttgttttgttttgtttgagatggagtctcgttctgttgcccagggtggagtgcagcggtgcgatctcggctcactgcaacttccactcccgggttcaagcggattctcgtgcctcagcctcctgagtagctgggattacaggcatgcaccaccatgcccggataatttttgtatttttagtagagatggggtttcactatgttggccaggctggtctcgaacacctgacttcgtggtccacccgccttcggcctcccaaagcactgggattacaggcgtgagccacccggcctggcctagaatgacttttaaaagatcaaattaaatcaggtcactcctttgcttacaacgcagtgcgtttagaggtacaccccatgtctccacagggcatacagcatccgatttaatctggatccattccggcgcttcctctcccagtcacccagagggccccaaccccggcggccctttcttcctcaaatgtcctcggctctataccgtgcctgggtcttttctctttctctctgcctggaacattccttctttccccttttgtcttgcccactcctgtttacccttcaagtttcaagttcatgtcactgtctcagagaggttttcctgtgctcgccctgtttctctcaggaagccttgctcttttccatcatgcctctaatcacagcttataatcggatatttatttctgtgtctacagtcttgccctgccagactgtaagccccatgtgggcaggcgctcatgattgtttctgattgtttcacgcatgctgctaacccagagcctgggcccaaagctagttagtactcaataaacaatgcattgaaaaaaaaaaaaaaaaanta

SEQ ID NO: 1288 - protein, 511 aa, Homo sapien [sequence omitted]

SEQ ID NO: 1289 - DNA, 792 bp, Homo sapien
ccaagctccagctgtttgtcaaggcgagtgaggacggggagagcgtgggtcactgcccctcctgccagcggtcttcatggtcctgctcctcaagggcgtacctttcaccctcaccacggtggacacgcgcaggtccccggacgtgctgaaggacttcgcccccggctcgcagctgcccatcctgctctatgacagcgacgccaagacagacacgctgcagatcgaggactttctggaggagacgctggggccgcccgacttccccagcctggcgcctcgttacagggagtccaacaccgccggcaacgacgttttccacaagttctccgcgttcatcaagaacccggtgcccgcgcaggacgaagccctgtaccagcagctgctgcgcgccctcgccaggctggacagctacctgcgcgcgcccctggagcacgagctggcgggggagccgcagctgcgcgagtcccgccgccgcttcctggacggcgacaggctcacgctggccgactgcagcctcctgcccaagctgcacatcgtcgacacggtgtgcgcgcacttccgccaggcgcccatccccgcggagctgcgcggcgtacgccgctacctggacagcgcgatgcaggagaaagagttcaaatacacgtgtccgcacagcgccgagatcctggcggcctaccggcccgccgtgcacccccgctagcgccccaccccgcgtctgtcgcccaataaaggcatctttgtcgggaaaaaaaaaaaaaaaaaaaaaaaaaaaaaaaaaaaaaaaaaaaaaaa

SEQ ID NO: 1290 - protein, 207 aa, Homo sapien
MVLLLKGVPFTLTTVDTRRSPDVLKDFAPGSQLPILLYDSDAKTDTLQIEDFLEETLGPPDFPSLAPRYRESNTAGNDVFHKFSAFIKNPVPAQDEALYQQLLRALARLDSYLRAPLEHELAGEPQLRESRRRFLDGDRLTLADCSLLPKLHIVDTVCAHFRQAPIPAELRGVRRYLDSAMQEKEFKYTCPHSAEILAAYRPAVHPR

SEQ ID NO: 1291 - DNA, 646 bp, Homo sapien
ttgctgagtacccagagttgcgaggagttttttaactgatttagccaggtggcaatcatgagtgaatggatgaagaaaggccccttagaatggcaagattacatttacaaagaggtccgagtgacagccagtgagaagaatgagtataaaggatgggttttaactacagacccagtctctgccaatattgtccttgtgaacttccttgaagatggcagcatgtctgtgaccggaattatgggacatgctgtgcagactgttgaaactatgaatgaaggggaccatagagtgagggagaagctgatgcatttgttcacgtctggagactgcaaagcatacagcccagaggatctggaagagagaaagaacagcctaaagaaatggcttgagaagaaccacatccccatcactgaacagggagacgctccaaggactctctgtgtggctggggtcctgactatagacccaccatatgatccagaaaattgcagcagctctaatgagattattctgtcgcgtgttcaggatcttattgaaggacatcttacagcttcccaatgagaggccaggaagtgtgaacatactgatagaaaaagactatattttatccctcataaaatgttttaaatgtaaaaaaaaaaaaaaa

SEQ ID NO: 1292 - protein, 167 aa, Homo sapien
MSEWMKKGPLEWQDYIYKEVRVTASEKNEYKGWVLTTDPVSANIVLVNFLEDGSMSVTGIMGHAVQTVETMNEGDHRVREKLMHLFTSGDCKAYSPEDLEERKNSLKKWLEKNHIPITEQGDAPRTLCVAGVLTIDPPYDPENCSSSNEIILSRVQDLIEGHLTASQ

SEQ ID NO: 1293 - DNA, 1196 bp, Homo sapien
agccgagggctgcacaaagaccttcctggcctgccccagacagagctgaggacccctggccgtgggcttgggcctcggcttcacaggatggggctgccagtgtcctgggcccctcctgccctctgggttctagggtgctgcgccctgctcctctcgctgtgggcgctgtgcacagcctgccgcaggcccgaggacgctgtagcccccaggaagagggcgcggaggcagcgggcgaggctgcagggcagtgcgacggcggcggaagcgtccctactgaggcggacccacctctgctccctcagcaagtcggacaccagactgcacgagctgcaccggggcccgcgcagcagcagggccctgcggcctgccagcatggatctcctgcgcccacactggctggaggtgtccagggacatcaccggaccgcaggcagccccctctgccttcccacaccaggagctgccccgggctctgccggcagctgcagccaccgcagggtgcgctggcctcgaggccacctattccaacgtggggctggcggcccttcccggggtcagcctggcggccagccctgtggtggccgagtatgcccgcgtccagaagcgcaaagggacccatcgcagtccccaagagccacagcaggggaagactgaggtgaccccggccgctcaggtggacgtcctgtactccagggtctgcaagcctaaaaggagggacccaggacccaccacagacccgctggaccccaagggccagggagcgattctggccctggcgggtgacctggcctaccagaccctcccgctcagggccctggatgtgggcagcggccccctggaaaacgtgtatgagagcatccgggagctgggggaccctgctggcaggagcagcacgtgcggggctgggacgccccctgcttccagctgccccagcctagggaggggctggagacccctccctgcctccctgccctgaacactcaaggacctgtgctccttcctccagagtgaggcccgtcccccgccccgccccgcctcacagctgacagcgccagtcccaggtccccgggctgccagcccgtgaggtccgtgaggtcctggccgctctgacagccgcggcctccccgggctccagagaaggcccgcgtctaaataaagcgccagcgcaggatgaaagcgaaaaaaaaaaaaaaaaaa

SEQ ID NO: 1294 - protein, 295 aa, Homo sapien
MGLPVSWAPPALWVLGCCALLLSLWALCTACRRPEDAVAPRKRARRQRARLQGSATAAEASLLRRTHLCSLSKSDTRLHELHRGPRSSRALRPASMDLLRPHWLEVSRDITGPQAAPSAFPHQELPRALPAAAATAGCAGLEATYSNVGLAALPGVSLAASPVVAEYARVQKRKGTHRSPQEPQQGKTEVTPAAQVDVLYSRVCKPKRRDPGPTTDPLDPKGQGAILALAGDLAYQTLPLRALDVGSGPLENVYESIRELGDPAGRSSTCGAGTPPASSCPSLGRGWRPLPASLP

SEQ ID NO: 1295 - DNA, 1755 bp, Homo sapien
acacacgctatgccttaaattgggccaggctgaggcgctgctgctggagcggccgatccgagacgtggctccctgggcggcagaaccatgttggacttcgcgatcttcgccgttaccttcttgctggcgttggtgggagccgtgctctacctctatccggcttccagacaagctgcaggaattccagggattactccaactgaagaaaaagatggtaatcttccagatattgtgaatagtggaagtttgcatgagttcctggttaatttgcatgagagatatgggcctgtggtctccttctggtttggcaggcgcgtcgtggttagtttgggcactgttgatgtactgaagcagcatatcaatcccaataagacattggacccttttgaaaccatgctgaagtcattattaaggtatcaatctggtggtggcagtgtgagtgaaaaccacatgaggaaaaaattgtatgaaaatggtgtgactgattctctgaagagtaactttgccctcctcctaaagctttcagaagaattattagataaatggctctcctacccagagacccagcacgtgcccctcagccagcatatgcttggttttgctatgaagtctgttacacagatggtaatgggtagtacatttgaagatgatcaggaagtcattcgcttccagaagaatcatggcacaccctcatgcaactggagtctgtttaaggaacatcataaaagaacgaaaaggaaggaacttcagtcaacatatttcattgactccttagtacaagggaaccttaatgaccaacagatcctagaagacagtatgatattttctctggccagttgcataataactgcaaaattgtgtacctgggcaatctgttttttaaccacctctgaagaagttcaaaaaaaattatatgaagagataaaccaagtttttggaaatggtcctgttactccagagaaaattgagcagctcagatattgtcagcatgtgctttgtgaactgttccgaactgccaaactgactccagtttctgcccagtttcaagatattgaaggaaaaattgaccgatttattattcctagagagaccctcgtcctttatgcccttggtgtggtacttcaggatcctaatacttggccatctccacacaagtttgatccagatcggtttgatgatgaattagtaatgaaaactttttcctcacttggattctcaggcacacaggagtgtccagagttgaggtttgcatatatggtgaccacagtacttcttagtgtattggtgaagagactgcacctactttctgtggagggacaggttattgaaacaaagtatgaactggtaacatcatcaagggaagaagcttggatcactgtctcaaagagatattaaaattttatacatttaaaatcattgttaaattgattgaggaaaacaaccatttaaaaaaaatctatgttgaatccttttataaaccagtatcactttgtaatataaacacctatttgtacttaattttgtaaatttggatttttatatatcatattttcttaattcattggacacatttgacttactgcacagtatattgatcattttaatgggaaactttagctttctactttttaattttggtttttcactttctatgccattatttttggattctttttcttagtgtgagctctaaaatcaatgttcttgaaaaagaaattattttgaaaaaaaaaaaaaaaaaaaaaaaaaaaaaaa

SEQ ID NO: 1296 - protein, 435 aa, Homo sapien [sequence omitted]

SEQ ID NO: 1297 - DNA, 6704 bp, Homo sapien
gtgggataaaggaatgaggttcagaaaggggcagggagttgcccgcagccgcaccgcacgtcttcagcccgaccgttgtcctgacctctctgtcccgtcccctgcccagtctcaccatggccttctggacacagctgatgctgctgctctggaagaatttcatgtatcgccggagacagccggtccagctcctggtcgaattgctgtggcctctcttcctcttcttcatcctggtggctgttcgccactcccacccgcccctggagcaccatgaatgccacttcccaaacaagccactgccatcggcgggcaccgtgccctggctccagggtctcatctgtaatgtgaacaacacctgctttccgcagctgacaccgggcgaggagcccgggcgcctgagcaacttcaacgactccctggtctcccggctgctagccgatgcccgcactgtgctgggaggggccagtgcccacaggacgctggctggcctagggaagctgatcgccacgctgagggctgcacgcagcacggcccagcctcaaccaaccaagcagtctccactggaaccacccatgctggatgtcgcggagctgctgacgtcactgctgcgcacggaatccctggggttggcactgggccaagcccaggagcccttgcacagcttgttggaggccgctgaggacctggcccaggagctcctggcgctgcgcagcctggtggagcttcgggcactgctgcagagaccccgagggaccagcggccccctggagttgctgtcagaggccctctgcagtgtcaggggacctagcagcacagtgggcccctccctcaactggtacgaggctagtgacctgatggagctggtggggcaggagccagaatccgccctgccagacagcagcctgagccccgcctgctcggagctgattggagccctggacagccacccgctgtcccgcctgctctggagacgcctgaagcctctgatcctcgggaagctactctttgcaccagatacaccttttacccggaagctcatggcccaggtcaaccggaccttcgaggagctcaccctgctgagggatgtccgggaggtgtgggagatgctgggaccccggatcttcaccttcatgaacgacagttccaatgtggccatgctgcagcggctcctgcagatgcaggatgaaggaagaaggcagcccagacctggaggccgggaccacatggaggccctgcgatcctttctggaccctgggagcggtggctacagctggcaggacgcacacgctgatgtggggcacctggtgggcacgctgggccgagtgacggagtgcctgtccttggacaagctggaggcggcaccctcagaggcagccctggtgtcgcgggccctgcaactgctcgcggaacatcgattctgggccggcgtcgtcttcttgggacctgaggactcttcagaccccacagagcacccaaccccagacctgggccccggccacgtgcgcatcaaaatccgcatggacattgacgtggtcacgaggaccaataagatcagggacaggttttgggaccctggcccagccgcggaccccctgaccgacctgcgctacgtgtggggcggcttcgtgtacctgcaagacctggtggagcgtgcagccgtccgcgtgctcagcggcgccaacccccgggccggcctctacctgcagcagatgccctatccgtgctatgtggacgacgtgttcctgcgtgtgctgagccggtcgctgccgctcttcctgacgctggcctggatctactccgtgacactgacagtgaaggccgtggtgcgggagaaggagacgcggctgcgggacaccatgcgcgccatggggctcagccgcgcggtgctctggctaggctggttcctcagctgcctcgggcccttcctgctcagcgccgcactgctggttctggtgctcaagctgggagacatcctcccctacagccacccgggcgtggtcttcctgttcttggcagccttcgcggtggccacggtgacccagagcttcctgctcagcgccttcttctcccgcgccaacctggctgcggcctgcggcggcctggcctacttctccctctacctgccctacgtgctgtgtgtggcttggcgggaccggctgcccgcgggtggccgcgtggccgcgagcctgctgtcgcccgtggccttcggcttcggctgcgagagcctggctctgctggaggagcagggcgagggcgcgcagtggcacaacgtgggcacccggcctacggcagacgtcttcagcctggcccaggtctctggccttctgctgctggacgcggcgctctacggcctcgccacctggtacctggaagctgtgtgcccaggccagtacgggatccctgaaccatggaattttccttttcggaggagctactggtgcggacctcggccccccaagagtccagccccttgccccaccccgctggacccaaaggtgctggtagaagaggcaccgcccggcctgagtcctggcgtctccgttcgcagcctggagaagcgctttcctggaagcccgcagccagccctgcgggggctcagcctggacttctaccagggccacatcaccgccttcctgggccacaacggggccggcaagaccaccaccctgtccatcttgagtggcctcttcccacccagtggtggctctgccttcatcctgggccacgacgtccgctccagcatggccgccatccggccccacctgggcgtctgtcctcagtacaacgtgctgtttgacatgctgaccgtggacgagcacgtctggttctatgggcggctgaagggtctgagtgccgctgtagtgggccccgagcaggaccgtctgctgcaggatgtggggctggtctccaagcagagtgtgcagactcgccacctctctggtgggatgcaacggaagctgtccgtggccattgcctttgtgggcggctcccaagttgttatcctggacgagcctacggctggcgtggatcctgcttcccgccgcggtatttgggagctgctgctcaaataccgagaaggtcgcacgctgatcctctccacccaccacctggatgaggcagagctgctgggagaccgtgtggctgtggtggcaggtggccgcttgtgctgctgtggctccccactcttcctgcgccgtcacctgggctccggctactacctgacgctggtgaaggcccgcctgcccctgaccaccaatgagaaggctgacactgacatggagggcagtgtggacaccaggcaggaaaagaagaatggcagccagggcagcagagtcggcactcctcagctgctggccctggtacagcactgggtgcccggggcacggctggtggaggagctgccacacgagctggtgctggtgctgccctacacgggtgcccatgacggcagcttcgccacactcttccgagagctagacacgcggctggcggagctgaggctcactggctacgggatctccgacaccagcctcgaggagatcttcctgaaggtggtggaggagtgtgctgcggacacagatatggaggatggcagctgcgggcagcacctatgcacaggcattgctggcctagacgtaaccctgcggctcaagatgccgccacaggagacagcgctggagaacggggaaccagctgggtcagccccagagactgaccagggctctgggccagacgccgtgggccgggtacagggctgggcactgacccgccagcagctccaggccctgcttctcaagcgctttctgcttgcccgccgcagccgccgcggcctgttcgcccagatcgtgctgcctgccctctttgtgggcctggccctcgtgttcagcctcatcgtgcctcctttcgggcactacccggctctgcggctcagtcccaccatgtacggtgctcaggtgtccttcttcagtgaggacgccccaggggaccctggacgtgcccggctgctcgaggcgctgctgcaggaggcaggactggaggagcccccagtgcagcatagctcccacaggttctcggcaccagaagttcctgctgaagtggccaaggtcttggccagtggcaactggaccccagagtctccatccccagcctgccagtgtagccagcccggtgcccggcgcctgctgcccgactgcccggctgcagctggtggtccccctccgccccaggcagtgaccggctctggggaagtggttcagaacctgacaggccggaacctgtctgacttcctggtcaagacctacccgcgcctggtgcgccagggcctgaagactaagaagtgggtgaatgaggtcaggtacggaggcttctcgctggggggccgagacccaggcctgccctcgggccaagagttgggccgctcagtggaggagttgtgggcgctgctgagtcccctgcctggcggggccctcgaccgtgtcctgaaaaacctcacagcctgggctcacagcctggacgctcaggacagtctcaagatctggttcaacaacaaaggctggcactccatggtggcctttgtcaaccgagccagcaacgcaatcctccgtgctcacctgcccccaggccgggcccgccacgcccacagcatcaccacactcaaccaccccttgaacctcaccaaggagcagctgtttgaggctgcattgatggcctcctcggtggacgtcctcgtctccatctgtgtggtctttgccatgtcctttgtcccggccagcttcactcttgtcctcattgaggagcgagtcacccgagccaagcacctgcagctcatggggggcctgtcccccaccctctactggcttggcaactttctctgggacatgtgtaactacttggtgccagcatgcatcgtggtgctcatctttctggccttccagcagagggcatatgtggcccctgccaacctgcctgctctcctgctgttgctactactgtatggctggtcgatcacaccgctcatgtacccagcctccttcttcttctccgtgcccagcacagcctatgtggtgctcacctgcataaacctctttattggcatcaatggaagcatggccacctttgtgcttgagctcttctctgatcagaagctgcaggaggtgagccggatcttgaaacaggtcttccttatcttcccccacttctgcttgggccgggggcttattgacatggtgcggaaccaggccatggctgatgcctttgagcgcttgggagacaggcagttccagtcacccctgcgctgggaggtggtcggcaagaacctcttggccatggtgatacaggggcccctcttccttctcttcacactactgctgcagcaccgaagccaactcctgccacagcccagggtgaggtctctgccactcctgggagaggaggacgaggatgtagcccgtgaacgggagcgggtggtccaaggagccacccagggggatgtgttggtgctgaggaacttgaccaaggtataccgtgggcagaggatgccagctgttgaccgcttgtgcctggggattccccctggtgagtgttttgggctgctgggtgtgaatggagcagggaagacgtccacgtttcgcatggtgacgggggacacattggccagcaggggcgaggctgtgctggcaggccacagcgtggcccgggaacccagtgctgcgcacctcagcatgggatactgccctcaatccgatgccatctttgagctgctgacgggccgcgagcacctggagctgcttgcgcgcctgcgcggtgtcccggaggcccaggttgcccagaccgctggctcgggcctggcgcgtctgggactctcatggtacgcagaccggcctgcaggcacctacagcggagggaacaaacgcaagctggcgacggccctggcgctggttggggacccagccgtggtgtttctggacgagccgaccacaggcatggaccccagcgcgcggcgcttcctttggaacagccttttggccgtggtgcgggagggccgttcagtgatgctcacctcccatagcatggaggagtgtgaagcgctctgctcgcgcctagccatcatggtgaatgggcggttccgctgcctgggcagcccgcaacatctcaagggcagattcgcggcgggtcacacactgaccctgcgggtgcccgccgcaaggtcccagccggcagcggccttcgtggcggccgagttccctgggtcggagctgcgcgaggcacatggaggccgcctgcgcttccagctgccgccgggagggcgctgcgccctggcgcgcgtctttggagagctggcggtgcacggcgcagagcacggcgtggaggacttttccgtgagccagacgatgctggaggaggtattcttgtacttctccaaggaccaggggaaggacgaggacaccgaagagcagaaggaggcaggagtgggagtggaccccgcgccaggcctgcagcaccccaaacgcgtcagccagttcctcgatgaccctagcactgccgagactgtgctctgagcctccctcccctgcggggccgcggggaggccctgggaatggcaagggcaaggtagagtgcctaggagccctggactcaggctggcagaggggctggtgccctggagaaaataaagagaaggctggagagaagccgtggtggtgaaa

SEQ ID NO: 1298 - protein, 2000 aa, Homo sapien
MAFWTQLMLLLWKNFMYRRRQPVQLLVELLWPLFLFFILVAVRHSHPPLEHHECHFPNKPLPSAGTVPWLQGLICNVNNTCFPQLTPGEEPGRLSNFNDSLVSRLLADARTVLGGASAHRTLAGLGKLIATLRAARSTAQPQPTKQSPLEPPMLDVAELLTSLLRTESLGLALGQAQEPLHSLLEAAEDLAQELLALRSLVELRALLQRPRGTSGPLELLSEALCSVRGPSSTVGPSLNWYEASDLMELVGQEPESALPDSSLSPACSELIGALDSHPLSRLLWRRLKPLILGKLLFAPDTPFTRKLMAQVNRTFEELTLLRDVREVWEMLGPRIFTFMNDSSNVAMLQRLLQMQDEGRRQPRPGGRDHMEALRSFLDPGSGGYSWQDAHADVGHLVGTLGRVTECLSLDKLEAAPSEAALVSRALQLLAEHRFWAGVVFLGPEDSSDPTEHPTPDLGPGHVRIKIRMDIDVVTRTNKIRDRFWDPGPAADPLTDLRYVWGGFVYLQDLVERAAVRVLSGANPRAGLYLQQMPYPCYVDDVFLRVLSRSLPLFLTLAWIYSVTLTVKAVVREKETRLRDTMRAMGLSRAVLWLGWFLSCLGPFLLSAALLVLVLKLGDILPYSHPGVVFLFLAAFAVATVTQSFLLSAFFSRANLAAACGGLAYFSLYLPYVLCVAWRDRLPAGGRVAASLLSPVAFGFGCESLALLEEQGEGAQWHNVGTRPTADVFSLAQVSGLLLLDAALYGLATWYLEAVCPGQYGIPEPWNFPFRRSYWCGPRPPKSPAPCPTPLDPKVLVEEAPPGLSPGVSVRSLEKRFPGSPQPALRGLSLDFYQGHITAFLGHNGAGKTTTLSILSGLFPPSGGSAFILGHDVRSSMAAIRPHLGVCPQYNVLFDMLTVDEHVWFYGRLKGLSAAVVGPEQDRLLQDVGLVSKQSVQTRHLSGGMQRKLSVAIAFVGGSQVVILDEPTAGVDPASRRGIWELLLKYREGRTLILSTHHLDEAELLGDRVAVVAGGRLCCCGSPLFLRRHLGSGYYLTLVKARLPLTTNEKADTDMEGSVDTRQEKKNGSQGSRVGTPQLLALVQHWVPGARLVEELPHELVLVLPYTGAHDGSFATLFRELDTRLAELRLTGYGISDTSLEEIFLKVVEECAADTDMEDGSCGQHLCTGIAGLDVTLRLKMPPQETALENGEPAGSAPETDQGSGPDAVGRVQGWALTRQQLQALLLKRFLLARRSRRGLFAQIVLPALFVGLALVFSLIVPPFGHYPALRLSPTMYGAQVSFFSEDAPGDPGRARLLEALLQEAGLEEPPVQHSSHRFSAPEVPAEVAKVLASGNWTPESPSPACQCSQPGARRLLPDCPAAAGGPPPPQAVTGSGEVVQNLTGRNLSDFLVKTYPRLVRQGLKTKKWVNEVRYGGFSLGGRDPGLPSGQELGRSVEELWALLSPLPGGALDRVLKNLTAWAHSLDAQDSLKIWFNNKGWHSMVAFVNRASNAILRAHLPPGRARHAHSITTLNHPLNLTKEQLFEAALMASSVDVLVSICVVFAMSFVPASFTLVLIEERVTRAKHLQLMGGLSPTLYWLGNFLWDMCNYLVPACIVVLIFLAFQQRAYVAPANLPALLLLLLLYGWSITPLMYPASFFFSVPSTAYVVLTCINLFIGINGSMATFVLELFSDQKLQEVSRILKQVFLIFPHFCLGRGLIDMVRNQAMADAFERLGDRQFQSPLRWEVVGKNLLAMVIQGPLFLLFTLLLQHRSQLLPQPRVRSLPLLGEEDEDVARERERVVQGATQGDVLVLRNLTKVYRGQRMPAVDRLCLGIPPGECFGLLGVNGAGKTSTFRMVTGDTLASRGEAVLAGHSVAREPSAAHLSMGYCPQSDAIFELLTGREHLELLARLRGVPEAQVAQTAGSGLARLGLSWYADRPAGTYSGGNKRKLATALALVGDPAVVFLDEPTTGMDPSARRFLWNSLLAVVREGRSVMLTSHSMEECEALCSRLAIMVN

SEQ ID NO: 1299 - DNA, 1026 bp, Homo sapien
gagagctggctgcgccgagccccctgcgcgctgcacatggggcgcctgacggaagcggcggcagcgggcagcggctctcgggctgcaggctgggcagggtcccctcccacgctcctgccgctgtctcccacgtcccccaggtgcgcggccaccatggcgtccagcgacgaggacggcaccaacggcggcgcctcggaggccggcgaggaccgggaggctcccggcaagcggaggcgcctggggttcttggccaccgcctggctcaccttctacgacatcgccatgaccgcggggtggttggttctagctattgccatggtacgtttttatatggaaaaaggaacacacagaggtttatataaaagtattcagaagacacttaaatttttccagacatttgccttgcttgagatagttcactgtttaattggaattgtacctacttctgtgattgtgactggggtccaagtgagttcaagaatctttatggtgtggctcattactcacagtataaaaccaatccagaatgaagagagtgtggtgctttttctggtcgcgtggactgtgacagagatcactcgctattccttctacacattcagccttcttgaccacttgccatacttcattaaatgggccagatataatttttttatcatcttatatcctgttggagttgctggtgaacttcttacaatatacgctgccttgccgcatgtgaagaaaacaggaatgttttcaataagacttcctaacaaatacaatgtctcttttgactactattattttcttcttataaccatggcatcatatatacctttgtttccacaactctattttcatatgttacgtcaaagaagaaaggtgcttcatggagaggtgattgtagaaaaggatgattaaatgatctctgcaaacaaggtgctttttccagaataaccaagattacctgagtccaagttttaataacaagaataaacaactttgtgaaatatcaaaaaaaaaaaaaaaaaaaaaaaaaaaaaa

SEQ ID NO: 1300 - protein, 288 aa, Homo sapien
MGRLTEAAAAGSGSRAAGWAGSPPTLLPLSPTSPRCAATMASSDEDGTNGGASEAGEDREAPGKRRRLGFLATAWLTFYDIAMTAGWLVLAIAMVRFYMEKGTHRGLYKSIQKTLKFFQTFALLEIVHCLIGIVPTSVIVTGVQVSSRIFMVWLITHSIKPIQNEESVVLFLVAWTVTEITRYSFYTFSLLDHLPYFIKWARYNFFIILYPVGVAGELLTIYAALPHVKKTGMFSIRLPNKYNVSFDYYYFLLITMASYIPLFPQLYFHMLRQRRKVLHGEVIVEKDD

SEQ ID NO: 1301 - DNA, 4285 bp, Homo sapien
ggcggctccggcgcagaccttggagagcacagctgccggcccgcgagccagcctcggttcccgcggcccgccgaggctcggagccatccagcgacccggcgaccggcctcaggccccgccatggggaagaccaacagcaagctggcccccgaggtgctggaggaccttgttcagaacactgagttcagcgagcaggagctgaagcagtggtacaagggcttcctgaaggactgccccagcggcatcctcaacctggaggagtttcagcagctctacatcaagttcttcccctacggcgacgcctccaagttcgcgcagcacgctttccgcaccttcgacaagaacggcgacggcaccatcgacttccgggagttcatctgcgccctgtcggtcacctcccgcggcagcttcgagcagaagctcaactgggcctttgagatgtacgacctggacggcgacgggcgaatcacgcgcctggagatgctggagatcatcgaggcaatctacaagatggtgggcaccgtgatcatgatgcgcatgaaccaggacgggctcacgccccagcagcgtgtggacaagatcttcaagaagatggaccaggataaggacgaccagattacattggaggagttcaaggaggcagccaagagtgacccatccattgtgttgctgctgcagtgtgacatgcagaagtagaagctggtgaggggcagggtccctggccagaaggggcatggccacctcccaacctgatgacctctctggctggcctcccaggaggagggacactccagcccccctctctggcccacccagtcctctgcccaagcccttcctcccctccatcaagatctttgagggaccacctcaccctgcaaaagagacaggtcctccagtaccctgtcttctagccccacctcccacttggccagaaccaatgtccattgggcataggggagttggcttttgccccaggaggtgaggttaaggagttgggggcctggggttctggttaggaattctcttgatcctgggattatgctttataggatgtggtcccacaggcctgtcacagggccaaattgggtctgtccattcctgaggctccagatcccataaagggggtctcttccccatcccttctactctacctggcccttccagccccagcctttggagcgttcattcagtcctttcttcagctaatgattactgagcacctgtttggtgctaaggatatggtcatttacaagacacatcttgtgccctctggaagctcatagggttgtgaggcaaacttccagccgtcagggtctcagctaagcagaaggtgctggaaggctggttagtctgggaggagctatttcatcttccagctcagctccacacaaagctgcagaaggacgaaatgaaaagcatttggaagtttaggagccacgtgagtgaaagttttaagaaaaatgaaatttatgtcatacttatttttttagtaccctttaaaggagctacagtcattttattatttcaggaggttaaaatatactctatattacttggtttattataaaatgattaaatgaatagagaaaatattaattttcaaggggaaaaaacctgagaagaaagggagaaaagaccatgaaatttaccagataacactttttaagactaagtcctgagctgccactctcagcagtttttgctgcttcagctcttcctttttattacctttttcaattcaacaagcaactttctgctacatacttactccggttgggtgctgacttcagggacaggaaaaagcaaggtttgcaaagagtgaaactagtgtatattccgtatcttggtagttcgtttctggattgggtttagtttcagaactggacttgttccttcactgccacagaatcagaaagagctagaagaaaaggctcacctggccactgtttaggcacccagacataatttatggacgaaatgcctaaaaatgtgccaggcatgctctgtttgagaggctttttctaaccccaaatcttagatctgccaggtagttcaacatcttccaagtgtgctggttctgctttccaatgcctgcttcccaattttggatccatgagctatacagctgcatgctttgactgccggaaaaattaatcttgcttcttcatcaggtctttctcctgtacttgtgatcagaaattacctttgacgtgcagtgacagttgatttcctcttgaactgccggtgaaaacagtctagtacacaggtgctgtcagcccagggtgggagcaggaaatgattgctgagcccggggcaggggaattgcatctgcaggaaagagatgcagcatgctcctcactcctgagtgcccacctgtcctgcttctctgcaggtgaaaactctgggggatgctgatcaatagagcttggtcccaagctctactgggcccttggaggtagcaaggccactgggttgctatcctcttgatggggatagcaaccactggtttgcaaccactgggttgctatccttttgctatcctcttgctcatgaccagccatatggtgaggctggggagttcacatcctcaggcaggaactagcagttgtttatccagcaatgcctcaaggatgttgcattgctcccaggagctggctattaggtatgtcttgtgcggtcagtcagcatcacagacacatagatgctcaccagcctggcttagctgggacctaaatcttctggtgaaaagcttttcactaagtgaggttccttccctgcaaatgctgaatctagcctaattcgcaaccacacagaatttcatggctttcaaaggcttgccatgtgccccatctcattctatactcacatcccatggaggtgaggattttcacttcttttctctagacttggaagctgagattcagagaggaagcatcccttgtgcaagatcacatagtcaggaggtgacacagggctaagacttgaaccaaggctctaagaggatttcttcttttcagagtctcttccctgtccatttctgtgactaagctgtgcagaggttgacagcagggcaagttacattgatattcatcctttataggcttcctgctaaaaagcttctgagattgtggtcttccaaaaaaaataggagcttggttgaagtccccacattttcaagcactcagtgttctgcctctggcagctgtgctaacagctcagtgctgtcctgggagtcctctgactcagaaccctcgaagcatcctgcattgtctttacccaccatcatcgtcactaagagaaacatgcctacccatgaaggcgtgtttgattactccaggcttctggacacacatacccatgggtgatttttgctcctcaggcccaatattctcagacagcccagcagtgtgaacacacaatgccaggccaggaactgggaccaccatcttgctgatggaaggaacaacaggtggcccaggacatgctcctgcatactcctgggtgtcccagggactgtgtgctcaggagcactgtggtagagcactggccctgccttgagaagagacacaggtctcccgtccctgcaccagctgagagagacttgccacaaagcacaaggctggcagagatttatgtatgacttgcacagacacaaaaatatacagacaatcaaaacattgatatattcaaactctcctttaaattccaatcttattgcaacaactctgtgaattgcaaggtcccagaatctgccttctcacatactctaccctcattcatccttttgggctaattgatgagcatcttatttcttatctctaaaaattatcagcaaaggctacttcagatggccactttagtcctttcagctgtagtcaggattatttaacttacctgtatatcaaaagtgaagaaaaagttagttcataagtaaaggcactaaatcctttcctgacaatggcagagtctctagaggtagaaatttgccttgctgcagagagagaaggaatggcgtgggatgggggaaagaaaagaaagagaagaagagaagaagctggggtctccaggcagggtagtaagctgacactaaatattttttacacaaaaatgtattgaagcaacaaatatttcctgaagatccaccctgggtgaggctttgagctgactttagagatcactgtggggtcaagaatgtcttacatgttttattcatcattcttgaaaaaagaaataattcaaaccttggaattaaaaagtcagaaaaacaaaaaaaaaaaaaaaaaaa

SEQ ID NO: 1302 - protein, 191 aa, Homo sapien
MGKTNSKLAPEVLEDLVQNTEFSEQELKQWYKGFLKDCPSGILNLEEFQQLYIKFFPYGDASKFAQHAFRTFDKNGDGTIDFREFICALSVTSRGSFEQKLNWAFEMYDLDGDGRITRLEMLEIIEAIYKMVGTVIMMRMNQDGLTPQQRVDKIFKKMDQDKDDQITLEEFKEAAKSDPSIVLLLQCDMQK

SEQ ID NO: 1303 - DNA, 724 bp, Homo sapien
caaaggtcagaggtaaagaagtcatggcggcgctgtgtcggacccgtgctgtggctgccgagagccattttctgcgagtgtttctcttcttcaggccctttcggggtgtaggcactgagagtggatccgaaagtggtagttccaatgccaaggagcctaagacgcgcgcaggcggtttcgcgagcgcgttggagcggcactcggagcttctacagaaggtggagcccctacagaagggttctccaaaaaatgtggaatcctttgcatctatgctgagacattctcctcttacacagatgggacctgcaaaggataaactggtcattggacggatctttcatattgtggagaatgatctgtacatagattttggtggaaagtttcattgtgtatgtagaagaccagaagtggatggagagaaataccagaaaggaaccagggtccggttgcggctattagatcttgaacttacgtctaggttcctgggagcaacaacagatacaactgtactagaggctaatgcagttctcttgggaatccaggagagtaaagactcaagatcgaaagaagaacatcatgaaaaataaatgaactttgcttagtggattgactcctttgctgaagtcagttattcatcaagaatgcaattagactaattgtgaataaatgattgaatgaagatataataaataaaagctataattataaaaaaaaaaaaaaaaaa

SEQ ID NO: 1304 - protein, 187 aa, Homo sapien
MAALCRTRAVAAESHFLRVFLFFRPFRGVGTESGSESGSSNAKEPKTRAGGFASALERHSELLQKVEPLQKGSPKNVESFASMLRHSPLTQMGPAKDKLVIGRIFHIVENDLYIDFGGKFHCVCRRPEVDGEKYQKGTRVRLRLLDLELTSRFLGATTDTTVLEANAVLLGIQESKDSRSKEEHHEK

SEQ ID NO: 1305 - DNA, 1420 bp, Homo sapien
cccaaatatatatttaatcttgtggttcaaataagcttttggctcacatctaagcacatcataaagaacgctgtagaagaggtgacatgatgaggcgggaagacgaggaagaggagggaacaatgatgaaggcaaaaggggacttagagatgaaggaggaggaagagattagtgagacaggagaactggttggcccttttgtgagtgctatgcccactccaatgccccacaacaagggcacccggttctctgaggcatgggaatatttccacctagctcctgctcgtgctgggcaccatcccaaccagtatgccacctgccgcctgtgtggcaggcaggtgagccgtggccctggggtcaacgtgggcaccactgcactgtggaagcatctgaaaagcatgcacagagaggagctggagaagagtggccatggtcaggctgggcagcgccaggatccaaggccccacgggccccagctccccacaggcattgagggtaactggggtaggctcctggagcaggtgggcaccatggctttgtgggccagccaaagggaaaaggaggtgcttaggagggaaagggcagtggaatggcgggagagggctgtggaaaaaagggagcgagccctggaggaggtggaaagggccatcctggagatgaagtggaaggtgagggctgagaaggaggcatgccagcgggagaaagagctgcctgcagcagtacatcccttccattttgtttaaattgggcttggagaatctattctgaaaacattgactctagacttgtagaaaagagccattttagtttcaactcaaatgtaaagcaaagtagtttggtgacattttgcttttatgtgaaatagtgcacagtatgagttaatctgagcaggtctgaattgaccaaatgcttatctacgaggttcctagagctctgctgacccttggccgaaactctaaaatgtacctattaaagataaatgcttctaccaaagtaaaactctgtgagttgtttcagggcagaatgtaccagccagtcagcgttgtttaacaaaataatcagatttttgcctagcactcggttttggtggagctgacgattttgagggctgaggctggttaggtagctggaatgtgcctatgtgaccagctcacttgcagacaccctgccggaagcagagcttaatcttcctaggactgaggtcttagcacatgtactggtggagtttccagaccaccagtatgaataaaagcttgttctgtgtgacccagcaagtggaaggacaaagaactgtgagcctcagatctttggacctttccaatgcgtctctttctcctgttattgctgcaatgtattttcttgcttatattaaagttgtttcatcagtaaaaaaaaaaaaaaaaaaaaaaaaaaaaaaaaa

SEQ ID NO: 1306 - protein, 217 aa, Homo sapien
MRREDEEEEGTMMKAKGDLEMKEEEEISETGELVGPFVSAMPTPMPHNKGTRFSEAWEYFHLAPARAGHHPNQYATCRLCGRQVSRGPGVNVGTTALWKHLKSMHREELEKSGHGQAGQRQDPRPHGPQLPTGIEGNWGRLLEQVGTMALWASQREKEVLRRERAVEWRERAVEKRERALEEVERAILEMKWKVRAEKEACQREKELPAAVHPFHFV

SEQ ID NO: 1307 - DNA, 1773 bp, Homo sapien
cacattccagaaaaaaataccgctttcacaaaactcgctccgcatgacccacagaacacccaaggtcaaaaagagtccaaagttcagaaagaaaagttatctgagtagactgatgctcgcaaacaggcctccgttctctgcagcgaagagcctcataaattccccttcacaaggggctttttcatccttaggagacctgagtcctcaagaaaacccttttctggaagtatctgctccttcagaacattttatagaaaccactaatataaaagacacaactgcaagaaatgccttggaagaaaatgtttttatggaaaacactaacatgccagaagtcaccatctctgaaaacacaaactacaatcatcctcctgaggcagattccgctgggactgcattcaacttagggccaactgttaaacaaactgagacaaaatgggaatacaacaacgtgggcactgacctgtcccccgagcccaaaagcttcaattacccattgctcagtttgaaattcagctaacccagcagctacagtcccttatccccaacaacaatgtgagaaggctcatttctcatgttatccggaccttgaagatggactgctctggggcccatgtgcaagtgacctgtgccaagctcatctccaggacaggccacctgatgaagcttctcagtgggcagcaggaagtaaaggcatctgagatagaatgggatacggaccaatggaagactgagaactacattaatgagagcacggaagcccagagtgaacagaaagagaagtcgcttgagctcacaaaagaagttccaggatacggctatactgacaaactcatcttggcattaattgtgactgaaatactaatgattttgattatacttttctgcctcattgtggtttaggattgggtgtgtgtgtctcctctctgaatggcactcaaatgtttgctgactcctactctgcgtgactggggtgtacagctatggactgatgcatcccatcccatcatctttcacgagcaaagcagtctcttttttgacagctgaagaagaacctgtagggaatccagaaggagcattcatgaaggtgttacaagcccggaagaattacacaagcactgagctgactgttgagccggaggagccctcagacagcagtggcatcaacttgtcaggctttgggagtgagcagctagacaccaatgacgagagtgatgttatcagtgcactaagttacatttgccatatttctcagcagtaaacctagatgtggaatcaatgttactaccgttcattaaactgccaaccacaggaaacagcctggcaaagattcaaactgtaggccaaaaccggcaaaaagtgaatagagtcctcatgggcccaatgagcatccagaaaaggcacttcaaagaggtgggaaggcagagcatcaggagggaacagggtgcccaggcatctgtggagaacgctgccgaagaaaaaaggctcgggagtccagccccaagggagctggaacagcctcacacacagcaggggcctgagaagttagcgggaaacgccatctacaccaagccttcgttcagccaagagcataaggcagcagtctctgtgctgacacccttctccaagggcgcgccttctacctccagccctgcaaaagccctaccacaggtgagagacagattgaaagacaacacacactatttccattttagaaagtgcaaaggctagagttacaaatatgaaggcttctaaaccaatttcacattccag

SEQ ID NO: 1308 - protein, 158 aa, Homo sapien
MTHRTPKVKKSPKFRKKSYLSRLMLANRPPFSAAKSLINSPSQGAFSSLGDLSPQENPFLEVSAPSEHFIETTNIKDTTARNALEENVFMENTNMPEVTISENTNYNHPPEADSAGTAFNLGPTVKQTETKWEYNNVGTDLSPEPKSFNYPLLSLKFS

SEQ ID NO: 1309 - DNA, 2216 bp, Homo sapien
ggaagctcagcagtgtccactgtcgccattccttggccatagaaaacaatgtatttgaattttgatgtaagcatagcaaattgaagatgaagatgacacgttgatttcttgtttgaaattaaccaagtcccgagaaaagaaagtgaatagtgttagcacgaggaggaaggaagaaatggagattagattggatactctttctgcatcactgggtagatccagcactttaaatgactgcaacttggaagataaattagcttggtatgaaggtgaagcttacatgtggcatcactggaagccttttcctgaaaaccctctctggacatgtcttgatttccaaatagcacaagttggaccctgggactactgctcctcttgtattcgccacacacgtctcaagtcttcctgctcagatatggatctcctacattcatggcgaagcagcagttttgggaatttcgatcgttttcggaataattctttatcaaaaccagatgattcaactgaggcacatgaaggagatcccacaaatggaagtggagaacaaagtaaaacttcaaataatggaggcggtttgggtaaaaaaatgagagctatttcatggacaatgaagaaaaaagtgggtaaaaagtacatcaaagccctttctgaggaaaaggatgaggaagatggagagaatgcccacccatatagaaacagtgaccctgtgattgggacccacacagagaaggtgtccctcaaagccagtgactccatggatagtctctacagtggacagagctcatcaagtggcataacaagctgttcagatggtacaagtaaccgggacagctttcgactggatgacgatggcccctattcaggaccattctgtggccgtgccagagtgcatacggatttcacgccaagtccctatgacactgactccctcaaaatcaagaaaggagacatcatagacattatttgcaaaacaccaatggggatgtggacaggaatgttgaacaataaagtgggaaacttcaaattcatttatgtggatgtcatctcagaagaggaagcagcccccaagaaaataaaggcaaaccgaaggagtaacagcaaaaaatccaagactctgcaggagttcctagagaggattcatctgcaggaatacacctcaacacttttgctcaatggttatgagactctagaagatttaaaagatataaaagagagtcacctcattgaattaaatattgaaaacccagatgacagaagaaggttactatcagctgctgaaaacttccttgaagaagaaattattcaagagcaagaaaatgaacctgagcccctatccttgagctcagacatctccttaaataagtcacagttagatgactgcccaagggactctggttgctatatctcatcaggaaattcagataatggcaaagaggatctggagtctgaaaatctgtctgacatggtacataagattattatcacagagccaagtgactgaacacgcattcccaactatatatctacagatgcattccattttaactcttcttgagctaaaacgtcaaataggagaggaagataagataaatatttgtaaataaaacctaaagtttaaatgttttaatctgaataattgtacataaaattttgtatctctaacattccaaattactgtcaataaaatatatatttattattttaaatgctatgtgttaatatttcacttgcttgtattagaaaggcaaaatgtaagactttggtatgtgtgacatatgctttatttggctttattttacaagtacagtatctgcaaaaaacaaagtaaccttttttcatacctgccagttttgaatttatatatgttattgaacaaatagtaatagaggattcgctgttgaaacaagttgtccaagcaatgttatattcatttttatacttattgggaaagtgtgagttaatattggacacattttatcctgatccacagtggagttttagtaattatattttgttgatttcttcattttgttttctggtataaaagtagagataatgtgtagtcacttctgatttagtgaaaccaattgtaataattgtggaaatgttttgtctttaagtgtaaatattttaaaatttgacataccctaatgttaataataaaaagaactatttgcataaaaaaaaaaaaaaaaaaaaaaaaaaaaaaaaaaaaa

SEQ ID NO: 1310 - protein, 441 aa, Homo sapien
MEIRLDTLSASLGRSSTLNDCNLEDKLAWYEGEAYMWHHWKPFPENPLWTCLDFQIAQVGPWDYCSSCIRHTRLKSSCSDMDLLHSWRSSSFGNFDRFRNNSLSKPDDSTEAHEGDPTNGSGEQSKTSNNGGGLGKKMRAISWTMKKKVGKKYIKALSEEKDEEDGENAHPYRNSDPVIGTHTEKVSLKASDSMDSLYSGQSSSSGITSCSDGTSNRDSFRLDDDGPYSGPFCGRARVHTDFTPSPYDTDSLKIKKGDIIDIICKTPMGMWTGMLNNKVGNFKFIYVDVISEEEAAPKKIKANRRSNSKKSKTLQEFLERIHLQEYTSTLLLNGYETLEDLKDIKESHLIELNIENPDDRRRLLSAAENFLEEEIIQEQENEPEPLSLSSDISLNKSQLDDCPRDSGCYISSGNSDNGKEDLESENLSDMVHKIIITEPSD

SEQ ID NO: 1311 - DNA, 980 bp, Homo sapien
ggggcagacgtgggacgggaaggacggctgccgggactggcgcgcggggacactgggccgacgcgtggagtagcggggagagcgggaagcctgagggggcggggccggcgcgaggccgtgggtgcggcacgaggatgccggcggcgggacagcgcccgtaggcagccccacgggcagggcgcgcgggcggggcggggcgggccgggccagaggagctcccggcatgtcgcaagggctcccggccgccggcagcgtcctgcagaggagcgtcgcggcgcccgggaaccagccgcagccgcagccgcagcagcagagccctgaggatgatgacaggaaggtccgaaggagagaaaaaaaccgagttgctgctcagagaagtcggaagaagcagacccagaaggctgacaagctccatgaggaatatgagagcctggagcaagaaaacaccatgctgcggagagagatcgggaagctgacagaggagctgaagcacctgacagaggcactgaaggagcacgagaagatgtgcccgctgctgctctgccctatgaactttgtgccagtgcctccccggccggaccctgtggccggctgcttgccccgatgaagccggggacactcctctgcccagcaaggagccttggtcattttcatacctgggaggaaggcttttccttcacaattgtatacagggggcacctgtggccaggcctcctcctgggagctccaggaccagccagctgtgttccctgcagactgggctcagcccgacatccaacaggcgccaaactcacagagcccttgtgcagatccagcatggaggccaccctcaggagtgacttctcatccaccctggcagctagtaggttctgctgttatgcagagccatttcctctagaatttggataataaagatgcttattgtctctcccttctccagttctgggaatttacaggcacaatacacttccttttcctgg

SEQ ID NO: 1312 - protein, 127 aa, Homo sapien
MSQGLPAAGSVLQRSVAAPGNQPQPQPQQQSPEDDDRKVRRREKNRVAAQRSRKKQTQKADKLHEEYESLEQENTMLRREIGKLTEELKHLTEALKEHEKMCPLLLCPMNFVPVPPRPDPVAGCLPR

SEQ ID NO: 1313 - DNA, 1656 bp, Homo sapien
cacaaggacatggacgtggacatcctggccctggtcaatgacaccgtggggaccatgatgacctgtgcctatgacgacccctactgcgaagttggtgtcatcatcggaactggcaccaatgcgtgttacatggaggacatgagcaacattgacctggtggagggcgacgagggcaggatgtgcatcaacacagagtggggggccttcggggacgacggggccctggaggacattcgcactgagttcgacagggagctggacctcggctctctcaacccaggaaagcaactgttcgagaagatgatcagtggcctgtacctgggggagcttgtcaggcttatcttgctgaagatggccaaggctggcctcctgtttggtggtgagaaatcttcagctctccacactaagggcaagatcgaaacacggcacgtggctgccatggagaagtaaagaaggccttgctaatacaagagagatcctggtggacctgggtctggaaccgtctgaggctgactgcattgccgtccagcatgtctgtaccatcgtctccttccgctcggccaatctctgtgcagcagctctggcggccatcctgacacgcctccgggagaacaagaaggtggaacggctccggaccacagtgggcatggacggcaccctctacaagatacaccctcagtacccaaaacgcctgcacaaggtggtgaggaaactggtcccaagctgtgatgtccgcttcctcctgtcagagagtggcagcaccaagggggccgccatggtgaccgcggtggcctcccgcgtgcaggcccagcggaagcagatcgacagggtgctggctttgttccagctgacccgagagcagctcgtggacgtgcaggccaagatgcgggctgagctggagtatgggctgaagaagaagagccacgggctggccacggtcaggatgctgcccacctacgtctgcgggctgccggacggcacagagaaaggaaagtttctcgccctggatcttgggggaaccaacttccgggtcctcctggtgaagatcagaagtggacggaggtcagtgcgaatgtacaacaagatcttcgccatccccctggagatcatgcagggcactggtgaggagctctttgatcacattgtgcagtgcatcgccgacttcctggactacatgggcctcaagggagcctccctacctttgggcttcacattctcatttccctgcaggcagatgagcattgacaagggaacactcatagggtggaccaaaggtttcaaggccactgactgtgaaggggaggacgtggtggacatgctcagggaagccatcaagaggagaaacgagtttgacctggacattgttgcagtcgtgaatgatacagtggggaccatgatgacctgtggctatgaagatcctaattgtgagattggcctgattgcaggaacaggcagcaacatgtgctacatggaggacatgaggaacatcgagatggtggaggggggtgaagggaagatgtgcatctgtttttcattttgcctgtggtttgtgttgcaggtgttgatagttgttttaaggattgttaggtataggaaatccagtaaattaataaaaaaattttgattttccaataaaaaaaaaaaaaaaaaaaaaaa

SEQ ID NO: 1314 - protein, 325 aa, Homo sapien
MDGTLYKIHPQYPKRLHKVVRKLVPSCDVRFLLSESGSTKGAAMVTAVASRVQAQRKQIDRVLALFQLTREQLVDVQAKMRAELEYGLKKKSHGLATVRMLPTYVCGLPDGTEKGKFLALDLGGTNFRVLLVKIRSGRRSVRMYNKIFAIPLEIMQGTGEELFDHIVQCIADFLDYMGLKGASLPLGFTFSFPCRQMSIDKGTLIGWTKGFKATDCEGEDVVDMLREAIKRRNEFDLDIVAVVNDTVGTMMTCGYEDPNCEIGLIAGTGSNMCYMEDMRNIEMVEGGEGKMCICFSFCLWFVLQVLIVVLRIVRYRKSSKLIKKF

SEQ ID NO: 1315 - DNA, 2426 bp, Homo sapien
acgcggggattctgtgtaattcctatccacagtcacttctgttcatttttaatgaaaacctattgctgttattttctattatgagttaacggtgatgtgtgttttttaaattttgtatacttgctctcaccctaaaatataccttaagagacttttcccctgtttttctttctgctttccaagactccaggaaaaacagcttccatggcacattttgtacagggcacatctagaatgattgccgcagaaagttctacggagcataaagagtgtgctgaaccatcaacaagaaagaacttgatgaattctcttgaacaaaagataaggtgtttggaaaaacaaagaaaagagctcctggaagttaaccagcaatgggatcagcaatttagaagtatgaaagagttatatgaaagaaaggtagcagagctgaagacgaaactggacgccgcggaaagattcctcagcacgcgggagaaggatccgcatcagaggcagagaaaggacgacaggcagagagaggacgacaggcagcgcgacctgacccgggaccggctgcagcgggaggagaaggaaaaggaacgcctaaatgaagaattacatgaattgaaagaagagaataaacttttaaagggaaaaaatactcttgcgaacaaggaaaaggaacattacgaatgtgaaataaaacgcctcaataaggctcttcaggatgccttgaatatcaagtgttcattttccgaggactgtttgaggaagtctcgagtggaattctgccatgaggagatgagaacagaaatggaagttctgaagcagcaggtgcaaatatacgaagaagacttcaaaaaggaacgatcggatcgagagagacttaatcaagagaaagaggagctacagcaaattaatgaaacttcccaatcccagttgaacaggctgaattcccagataaaagcttgtcagatggagaaagaaaaactagaaaagcaattaaaacagatgtattgcccaccctgtaactgcggcttggttttccacctgcaagatccatgggtaccaacaggccctggagctgtgcagaagcaacgggagcacccaccagactgtcagtggtatgctcttgaccagcttccgccagatgtacaacacaaggcaaatggtttatcctcagtaaagaaagtccatccgtagaagtacacactaacagagagagacaacaggcaacgagggagcgtggctgaggaccctcttctttgtttatactgaggcttgtttctgccacaaaggcacatcatctaccctgttatttgtgcctggtcatgttttcctttggtatgaatacaggaaaaggcttctgacagctaagatcctgatcaaattggaggagccagttattatacaaccaaatacaacttccagtttccttgaaatgagacttggcagatggatgatgcacgactccctgaaaatctcttcagcatattgctgttggatgcacaaaaatgattctatgatttaggcaactcagtgtttgctgcagggatattgtatgttgatttaaagtgcatatgtgtgtgtgtgtgtgtgtgtgtgtgtgtgtttcctggggtaaaaatttctgcagttgtaaacgtttaacattgctcccattcttcttccacagggccttagttctttagctatttgactacatattgttgacctcagtgatcctaaacgtagaattgaagaggtgtatatacctcgttaaattaaataagtggttcaatctgaataagatggttaattggaagctattccttagacagatcatttctttaagatggtgagaaattgtgcgcctgcatcacaagacttgattatgaaagataaagtcttgggctgggtgcagtggctcatgcctataatcccagcactttgggaggctgaggcaggtggattgctttgaggccaggagttctagaccagcctggccagcatggtgaaaccccatctctactataaatacaaaaattagccaggctcgtggcacacacctataaacccagctactcaggaggcttgaggcgggaggatcacttgagcccagggaggcagaggttgctgtaagttgagatcgccactgcactccagcctgggaaatagagtgagcaagactcagtgccccctacccacccactccacaccaccaaaaaaaaaaaaaaaaaaaaaaggaagacaaagtcctgatgggatgatgatggctatatggctatgctgtgtccatatatacttacagaaatatttcagacatatggatttatagttaaatctgtgtttttccttcctatggatttgattaattttaatgaaaaacttaattctgactcctcaagccaattaaaatgaaaatggaatttatttaaaaaaaaaaaaaaaaaaaaaaaaaaaaaaaa

SEQ ID NO: 1316 - protein, 325 aa, Homo sapien
MAHFVQGTSRMIAAESSTEHKECAEPSTRKNLMNSLEQKIRCLEKQRKELLEVNQQWDQQFRSMKELYERKVAELKTKLDAAERFLSTREKDPHQRQRKDDRQREDDRQRDLTRDRLQREEKEKERLNEELHELKEENKLLKGKNTLANKEKEHYECEIKRLNKALQDALNIKCSFSEDCLRKSRVEFCHEEMRTEMEVLKQQVQIYEEDFKKERSDRERLNQEKEELQQINETSQSQLNRLNSQIKACQMEKEKLEKQLKQMYCPPCNCGLVFHLQDPWVPTGPGAVQKQREHPPDCQWYALDQLPPDVQHKANGLSSVKKVHP

SEQ ID NO: 1317 - DNA, 2589 bp, Homo sapien
cggcccgctggagaggaagcccgagagctgccgcgcgcctgccggacgagggcgtagaagccaggcgtcagagcccgggctccggtggggtcccccacccggccctcgggtcccccgccccctgctccctgcccatcccagcccacgcgaccctctcgcgcgcggaggggcgggtcctcgacggctacgggaaggtgccagcccgccccggatgggcatcgtggagccgggttgcggagacatgctgacgggcaccgagccgatgccggggagcgacgagggccgggcgcctggcgccgacccgcagcaccgctacttctacccggagccgggcgcgcaggacgcggacgagcgtcgcgggggcggcagcctggggtctccctacccggggggcgccttggtgcccgccccgccgagccgcttccttggagcctacgcctacccgccgcgaccccaggcggccggcttccccggcgcgggcgagtccttcccgccgcccgcggacgccgagggctaccagccgggcgagggctacgccgccccggacccgcgcgccgggctctacccggggccgcgtgaggactacgcgctacccgcgggactggaggtgtcggggaaactgagggtcgcgctcaacaaccacctgttgtggtccaagtttaatcagcaccagacagagatgatcatcaccaagcagggacggcggatgttcccattcctgtcatttactgtggccgggctggagcccaccagccactacaggatgtttgtggacgtggtcttggtggaccagcaccactggcggtaccagagcggcaagtgggtgcagtgtggaaaggccgagggcagcatgccaggaaaccgcctgtacgtccacccggactcccccaacacaggagcgcactggatgcgccaggaagtttcatttgggaaactaaagctcacaaacaacaagggggcgtccaacaatgtgacccagatgattgtgctccagtccctccataagtaccagccccggctgcatatcgttgaggtgaacgacggagagccagaggcagcctgcaacgcttccaacacgcatatctttactttccaagaaacccagttcattgccgtgactgcctaccagaatgccgagattactcagctgaaaattgataataacccctttgccaaaggattccgggagaactttgagtccatgtacacatctgttgacaccagcatcccctccccgcctggacccaactgtcaattccttgggggagatcactactctcctctcctacccaaccagtatcctgttcccagccgcttctaccccgaccttcctggccaggcgaaggatgtggttccccaggcttactggctgggggccccccgggaccacagctatgaggctgagtttcgagcagtcagcatgaagcctgcattcttgccctctgcccctgggcccaccatgtcctactaccgaggccaggaggtcctggcacctggagctggctggcctgtggcaccccagtaccctcccaagatgggcccggccagctggttccgccctatgcggactctgcccatggaacccggccctggaggctcagagggacggggaccagaggaccagggtccccccttggtgtggactgagattgcccccatccggccggaatccagtgattcaggactgggcgaaggagactctaagaggaggcgcgtgtccccctatccttccagtggtgacagctcctcccctgctggggccccttctccttttgataaggaagctgaaggacagttttataactattttcccaactgagcagatgacatgatgaaaggaacagaaacagtgttattaggttggaggacaccgactaatttgggaaacggatgaaggactgagaaggcccccgctccctctggcccttctctgtttagtagttggttggggaagtggggctcaagaaggattttggggttcaccagatgcttcctggcccacgatgaaacctgagaggggtgtccccttgccccatcctctgccctaactacagtcgtttacctggtgctgcgtcttgcttttggtttccagctggagaaaagaagacaagaaagtcttgggcatgaaggagctttttgcatctagtgggtgggaggggtcaggtgtgggacatgggagcaggagactccactttcttcctttgtacagtaactttcaaccttttcgttggcatgtgtgttaatccctgatccaaaaagaacaaatacacgtatgttataaccatcagcccgccagggtcagggaaaggactcacctgactttggacagctggcctgggctccccctgctcaaacacagtggggatcagagaaaaggggctggaaaggggggaatggcccacatctcaagaagcaagatattgtttgtggtggttgtgtgtgggtgtgtgttttttctttttctttctttttattttttttgaatgggggaggctatttattgtactgagagtggtgtctggatatattccttttgtcttcatcactttctgaaaataaacataaaactgttaaaaaaaaaaaaaaaaa

SEQ ID NO: 1318 - protein, 535 aa, Homo sapien
MGIVEPGCGDMLTGTEPMPGSDEGRAPGADPQHRYFYPEPGAQDADERRGGGSLGSPYPGGALVPAPPSRFLGAYAYPPRPQAAGFPGAGESFPPPADAEGYQPGEGYAAPDPRAGLYPGPREDYALPAGLEVSGKLRVALNNHLLWSKFNQHQTEMIITKQGRRMFPFLSFTVAGLEPTSHYRMFVDVVLVDQHHWRYQSGKWVQCGKAEGSMPGNRLYVHPDSPNTGAHWMRQEVSFGKLKLTNNKGASNNVTQMIVLQSLHKYQPRLHIVEVNDGEPEAACNASNTHIFTFQETQFIAVTAYQNAEITQLKIDNNPFAKGFRENFESMYTSVDTSIPSPPGPNCQFLGGDHYSPLLPNQYPVPSRFYPDLPGQAKDVVPQAYWLGAPRDHSYEAEFRAVSMKPAFLPSAPGPTMSYYRGQEVLAPGAGWPVAPQYPPKMGPASWFRPMRTLPMEPGPGGSEGRGPEDQGPPLVWTEIAPIRPESSDSGLGEGDSKRRRVSPYPSSGDSSSPAGAPSPFDKEAEGQFYNYFPN

SEQ ID NO: 1319 - DNA, 1185 bp, Homo sapien
accgtcttccgccgcacgtggattcagcgcgatgcccaaatccaagcgcgacaagaaagtctccttaaccaaaactgccaagaaaggcttggaattgaaacaaaacctgatagaagagcttcggaaatgtgtggacacctacaagtaccttttcatcttctctgtggccaacatgaggaacagcaagctgaaggacatccggaacgcctggaagcacagccggatgttctttggcaaaaacaaggtgatgatggtggccttgggtcggagcccatctgatgaatacaaagacaacctgcaccaggtcagcaaaaggttgaggggtgaggtgggtctcctgttcaccaaccgcacaaaggaagaggtgaatgagtggttcacgaaatacacagaaatggactacgcccgagctggtaacaaagcagctttcactgtgagcctggatccagggcccctggagcagttcccccactccatggagccacagctcaggcagctgggcctgcccaccgccctcaagagaggtgtggtgactctgctgtctgactacgaggtgtgcaaggagggcgatgtgctgaccccagagcaggctcgcgtcctgaagctttttgggtatgagatggctgaattcaaggtgaccatcaaatacatgtgggattcacagtcgggaaggttccagcagatgggagacgacttgccagagagcgcatctgagtccacagaagagtcagactcagaagatgatgactgaaagggactcgggactgaaggtctcctggaagcttctgggtctcactggaccatcaggactgctgccgcccctctggagagagcagctttttatttgtctgtagacagggaacatgatgggcactgacctcctgtaaagaataaaactgtgggccgggcgcggtggctcacgcctggaatcccagcactttgggaagccgaggtgggcagatcataaggtcaggagattaagaccatcctggctaacacggtgaaaccccgtctctactaaaaatagaaaaaaaaactagttgggcatagtggcatgtgcctgtagtcccagctactcaggaggctgaggcaggagaatcacttgaacccgggaggtggaggttgccgtgagttgagattggaccactgctctccagcctgggcaacagagtaaaactctgtccc

SEQ ID NO: 1320 - protein, 239 aa, Homo sapien
MPKSKRDKKVSLTKTAKKGLELKQNLIEELRKCVDTYKYLFIFSVANMRNSKLKDIRNAWKHSRMFFGKNKVMMVALGRSPSDEYKDNLHQVSKRLRGEVGLLFTNRTKEEVNEWFTKYTEMDYARAGNKAAFTVSLDPGPLEQFPHSMEPQLRQLGLPTALKRGVVTLLSDYEVCKEGDVLTPEQARVLKLFGYEMAEFKVTIKYMWDSQSGRFQQMGDDLPESASESTEESDSEDDD

SEQ ID NO: 1321 - DNA, 4826 bp, Homo sapien
gggtcgaggtcgacggtatcgataagttttttttttttttttttttttttttttcctttcccctccccctccctctccaagccggaggggtcctgaggtgacagcgcctgcaactgaaatttcagcagcgggagaagatggacaagagaaagctcgggcgacggccatcttcatccgaaatcatcacagaaggaaaaaggaaaaagtcatcttctgatttatcggagataagaaagatgttaaatgcaaaaccagaggatgtccatgttcaatcaccactgtccaaattcagaagctcagaacgctggactctccctttgcagtgggaaagaagcctaaggaataaagtcatctctctagaccataaaaataaaaaacatatccgagggtgtcctgttacttccaggtcatcaccagaaaggatacccagagttatattgacgaatgtcctgggaacggagttaggaagaaaatacataaggaccccacctgtaactgagggaagtttgagtgatacagacaacttgcaatcagagcaactttcttcatcatctgatggcagcctagaatcttatcaaaatctaaaccctcacaagagctgttatttatctgaaaggggctcacaacgaagtaagacagtagatgacaattctgcaaagcagactgcgcacaataaagaaaaacgaagaaaggatgatggcatttctcttttaatatctgatactcagcctgaagaccttaacagtggaagtagaggttgtgatcatctcgaacaggaaagcagaaacaaggatgttaaatattctgattcaaaagtggaactcactctgatttccaggaagacaaagagaaggcttagaaataatttacctgattctcaatattgtacttctttggataagtcaacagaacagacaaaaaaacaagaagatgactcaacaatatccactgagtttgaaaggccaagtgaaaactatcatcaggatccaaaactgcctgaagaaattacaactaaacctacaaaaagtgattttactaagctatcctcacttaacagtcaggagttgactttgagtaatgccaccaaaagtgcctctgccggttcaaccactgaaaccgttgagtactctaattccattgatattgtggggatttcttccctggttgagaaggatgagaatgagttgaataccatagaaaagcctattctaagaggacataatgaagggaaccaatcactgatctcagctgaaccaattgttgtttccagtgatgaagaaggacctgttgaacataaaagttcagaaattcttaagttacaatctaagcaagaccgtgagacaactaatgaaaatgagagtacttctgaatcagcattgttagaactaccattgattacatgtgaatctgtacagatgtcatctgaattatgcccatataatcctgtcatggagaacatttccagtattatgcctagtaatgagatggatctacaactggattttatatttacttctgtttatattggtaaaataaaaggagcttctaaaggttgtgttacaatcacaaaaaaatatattaagatcccatttcaagtgtccctgaatgagatttcattgctagtggataccacacatttaaagcggtttgggttatggaaaagtaaggatgataatcacagtaaaaggagtcatgctattcttttcttctgggtctcttcagattatcttcaagagattcagacccaattagaacactctgtattaagccagcaatcaaaatctagtgaattcattttccttgaactacacaatcctgtttcacagagagaagaattgaagctgaaagatattatgacggaaataagtataatcagtggagaattagagctttcttacccgttgtcttgggttcaggcatttcctttgtttcagaacctctcttcaaaagaaagttcttttattcattattactgtgtttcaacttgttctttccctgctggtgttgctgttgctgaagaaatgaagctgaaatcagtatctcagccctcaaacacagatgcggccaagcctacttacaccttcctgcagaagcaaagtagcggttgctactccctttctattacatctaatccagatgaagaatggcgggaagtcaggcacactggacttgttcagaagttgattgtatatcctccaccacctactaaggggggattgggagtaactaatgaagatctggagtgtttagaagaaggagagtttcttaatgatgtaatcattgatttttaccttaagtatcttatattggagaaggcatcagatgaacttgttgaacgaagtcacatttttagtagctttttctataaatgcttgacaagaaaggaaaataatttaacagaagataatccaaatctttcaatggcacagagaagacataaaagagtaagaacatggactcgtcacataaacatttttaataaagattacatctttgtacctgtaaatgagtcgtctcactggtatctcgcagtcatttgttttccatggttagaagaagctgtgtatgaagattttccacaaactgtatcccagcagtcccaggctcagcagtcccaaagtgacaacaaaacaatagataatgatctacgtactacttcgacactgtctttgagtgcagaggattcccaaagtaccgagtcgaatatgtcagtaccaaagaaaatgtgtaaaaggccatgtattcttatactagactccttgaaagctgcttctgtacgaaacacagttcagaatttacgagagtatttagaggtagagtgggaagttaaactaaaaactcatcgtcaattcagcaaaacaaacatggtggatctatgccctaaagttcctaaacaggacaatagcagtgattgtggagtatatttattgcagtatgtggaaagcttcttcaaggatcctattgttaactttgaacttccaattcatttggagaagtggtttcctcgtcatgtaataaagaccaaacgggaagatattcgagagctcatcttgaaacttcatttacagcaacagaagggcagcagtagctagttaatctgtacaaacatgacacagatgttctctaagattactggaaagccccttaccagcatttgtgttagccagctcacagagaagaaaataacttgcagtagttttataataagtcattggaacattatttaaaatatgtaggacacattattagaattgttgggatctcatagatggaatgggaatgggggtgatatagataaacttactagatataaattaaaattttataaatatttcatatttttctgagtaaatatgattggattatgcaacagcatatgtaatatgggaatgttttgtagataataaaacttacatgatctgtacttccacgtgactgggtgctgaggggagttaaagcctccctggtgccagccccagtgcttgtcaaatttgctgacaggtcacatcatattgtaattctattctttgcagctcaagcatgcagtatgaatactgtgtattttttaaaaaaataatttagtatcaaggcttcagaaaatgccatttacggcatcccttctgtatgtaacaaaaagacattcataatgttaggaagatgataaaaattcgctcttttaaagtgcagcttattattctcaattgctaaatacgattactctgctttttttttttcatttcttttgatgtcatatgtgagtatcttataatttagttcatttgttcagggtaaaatttgaaacaaaaaattttacctgtgcaaaatagttttttaaaaattatacatgtagctcaacttgaggtactgctatataaatattcactcacattatcacggaatttatgtatagtttctctaatatagaagataaaattggtgtcctcataactttaacaaagaaaaccctcagtcctatttattaatgggtagaattaaatatataattttatagctcagtttacccagtattcatctgcaaagccagattgctctcattgcttttatatttttaaattgtagcttttagagacctatgatcctcatggaacttaattttttattaaatattcaggtaacagttctgaattcatgtgataatggtggcattatatatgattaaacacttcagaactttctaatgttatcaggagtattttgagggagatatgattatattgtattttctcagataagaaaaatgttttttaacaatattattttaatctgttttaagcatctcttagatttacattataactacataaagcagtgaagcaaaggcaaattaagataaagctagaaagtctgaacattttatttcaaaatcatacgaatcggggtcagttaagcctcagtattcttagcttttgttgattttggcactatctttatattattaaatatatttgttgtttggatatttcatataaagatggctataattacatatttcattcccaatttgtgtgtgttggggggtacttttaaaggtgactattgttttgtacatctaattttgggaaaccaagtctataagacatcttgtgatttcttaatgtttttgtttgtatgtttttcaaagatatcactgtcctttatcatgttttgaagattgtttaaaattcattttcctaaattaatgtgcaagtaatgttttgaggatatcggtgttttatattaaacatatttccaattcaaaaaaaaaaaaaaaaaaacttatcgataccgtcgacctcgatgatgatgatgatgatgatgatgtcgac

SEQ ID NO: 1322 - protein, 984 aa, Homo sapien
MDKRKLGRRPSSSEIITEGKRKKSSSDLSEIRKMLNAKPEDVHVQSPLSKFRSSERWTLPLQWERSLRNKVISLDHKNKKHIRGCPVTSRSSPERIPRVILTNVLGTELGRKYIRTPPVTEGSLSDTDNLQSEQLSSSSDGSLESYQNLNPHKSCYLSERGSQRSKTVDDNSAKQTAHNKEKRRKDDGISLLISDTQPEDLNSGSRGCDHLEQESRNKDVKYSDSKVELTLISRKTKRRLRNNLPDSQYCTSLDKSTEQTKKQEDDSTISTEFERPSENYHQDPKLPEEITTKPTKSDFTKLSSLNSQELTLSNATKSASAGSTTETVEYSNSIDIVGISSLVEKDENELNTIEKPILRGHNEGNQSLISAEPIVVSSDEEGPVEHKSSEILKLQSKQDRETTNENESTSESALLELPLITCESVQMSSELCPYNPVMENISSIMPSNEMDLQLDFIFTSVYIGKIKGASKGCVTITKKYIKIPFQVSLNEISLLVDTTHLKRFGLWKSKDDNHSKRSHAILFFWVSSDYLQEIQTQLEHSVLSQQSKSSEFIFLELHNPVSQREELKLKDIMTEISIISGELELSYPLSWVQAFPLFQNLSSKESSFIHYYCVSTCSFPAGVAVAEEMKLKSVSQPSNTDAAKPTYTFLQKQSSGCYSLSITSNPDEEWREVRHTGLVQKLIVYPPPPTKGGLGVTNEDLECLEEGEFLNDVIIDFYLKYLILEKASDELVERSHIFSSFFYKCLTRKENNLTEDNPNLSMAQRRHKRVRTWTRHINIFNKDYIFVPVNESSHWYLAVICFPWLEEAVYEDFPQTVSQQSQAQQSQSDNKTIDNDLRTTSTLSLSAEDSQSTESNMSVPKKMCKRPCILILDSLKAASVRNTVQNLREYLEVEWEVKLKTHRQFSKTNMVDLCPKVPKQDNSSDCGVYLLQYVESFFKDPIVNFELPIHLEKWFPRHVIKTKREDIRELILKLHLQQQKGSSS

SEQ ID NO: 1323 - DNA, 1840 bp, Homo sapien
ggggacttccggagacctcacacaagatggcggcacccgaggaacacgattctccgaccgaagcgtcccagccgattgtggaagaggaggaaactaaaacatttaaagacctgggtgtgacagatgtgttgtgtgaagcttgtgaccagttgggatggacaaaacccaccaagattcagattgaagctattcctttggccttacaaggtcgtgatatcattgggcttgcagaaactggctctggaaagacaggcgcctttgctttgcccattctaaacgcactgctggagaccccgcagcgtttgtttgccctagttcttaccccgactcgggagctggcctttcagatctcagagcagtttgaagccctggggtcctctattggagtgcagagtgctgtgattgtaggtggaattgattcaatgtctcaatctttggcccttgcaaaaaaaccacatataataatagcaactcctggtcgactgattgaccacttggaaaatacgaaaggtttcaacttgagagctctcaaatacttggtcatggatgaagccgaccgaatactgaatatggattttgagacagaggttgacaagatcctcaaagtgattcctcgagatcggaaaacattcctcttctctgccaccatgaccaagaaggttcaaaaacttcagcgagcagctctgaagaatcctgtgaaatgtgccgtttcctctaaataccagacagttgaaaaattacagcaatattatatttttattccctctaaattcaaggatacctacctggtttatattctaaatgaattggctggaaactcctttatgatattctgcagcacctgtaataatacccagagaacagctttgctactgcgaaatcttggcttcactgccatccccctccatggacaaatgagtcagagtaagcgcctaggatcccttaataagtttaaggccaaggcccgttccattcttctagcaactgacgttgccagccgaggtttggacatacctcatgtagatgtggttgtcaactttgacattcctacccattccaaggattacatccatcgagtaggtcgaacagctagagctgggcgctccggaaaggctattacttttgtcacacagtatgatgtggaactcttccagcgcatagaacacttaattgggaagaaactaccaggttttccaacacaggatgatgaggttatgatgctgacagaacgcgtcgctgaagcccaaaggtttgcccgaatggagttaagggagcatggagaaaagaagaaacgctcgcgagaggatgctggagataatgatgacacagagggtgctattggtgtcaggaacaaggtggctggaggaaaaatgaagaagcggaaaggccgttaatcacttttatgaaggctcgagttctgctgttctgtaaaagaaaattggagaatgaaacctgctccaacagagatcatgagactgaaattggtcagaattgtgtccagaatgtgctcagctaattcagtattcttccccattctgggttggagtttactgcagagtaattcttacagtgctgatgtcaagactgttactgttcttcgactttgattccttgctcatgacatgagtagggtgtgctcttctgtcacttcacacagaccttttgccttttttagctgcaagtcaaggactaggttgatgatgcccatgacctgtaattgtaaagaagcttggacatctgcaaatgatatttaaaccatcttggcttgtgctttattcaaactaatgtgaaacaataaatttaaatattatttttaaaagaaaaaaaaaaaaaaaaaaaa

SEQ ID NO: 1324 - protein, 455 aa, Homo sapien
MAAPEEHDSPTEASQPIVEEEETKTFKDLGVTDVLCEACDQLGWTKPTKIQIEAIPLALQGRDIIGLAETGSGKTGAFALPILNALLETPQRLFALVLTPTRELAFQISEQFEALGSSIGVQSAVIVGGIDSMSQSLALAKKPHIIIATPGRLIDHLENTKGFNLRALKYLVMDEADRILNMDFETEVDKILKVIPRDRKTFLFSATMTKKVQKLQRAALKNPVKCAVSSKYQTVEKLQQYYIFIPSKFKDTYLVYILNELAGNSFMIFCSTCNNTQRTALLLRNLGFTAIPLHGQMSQSKRLGSLNKFKAKARSILLATDVASRGLDIPHVDVVVNFDIPTHSKDYIHRVGRTARAGRSGKAITFVTQYDVELFQRIEHLIGKKLPGFPTQDDEVMMLTERVAEAQRFARMELREHGEKKKRSREDAGDNDDTEGAIGVRNKVAGGKMKKRKGR

(The sequence listing continues in the following parts.)

What is claimed:

1. Isolated nucleic acid having at least 80% nucleic acid sequence identity to a nucleotide sequence encoding the polypeptide shown in FIG. 2 (SEQ ID NO:2), FIG. 4 (SEQ ID NO:4), FIG. 6 (SEQ ID NO:6), FIG. 8 (SEQ ID NO:8), FIG. 10 (SEQ ID NO:10), FIG. 12 (SEQ ID NO:12), FIG. 14 (SEQ ID NO:14), FIG. 16 (SEQ ID NO:16), FIG. 18 (SEQ ID NO:18), FIG. 20 (SEQ ID NO:20), FIG. 22 (SEQ ID NO:22), FIG. 24 (SEQ ID NO:24), FIG. 26 (SEQ ID NO:26), FIG. 28 (SEQ ID NO:28), FIG. 30 (SEQ ID NO:30), FIG. 32 (SEQ ID NO:32), FIG. 34 (SEQ ID NO:34), FIG. 36 (SEQ ID NO:36), FIG. 38 (SEQ ID NO:38), FIG. 40 (SEQ ID NO:40), FIG. 42 (SEQ ID NO:42), FIG. 44 (SEQ ID NO:44), FIG. 46 (SEQ ID NO:46), FIG. 48 (SEQ ID NO:48), FIG. 50 (SEQ ID NO:50), FIG. 52 (SEQ ID NO:52), FIG. 54 (SEQ ID NO:54), FIG. 56 (SEQ ID NO:56), FIG. 58 (SEQ ID NO:58), FIG. 60 (SEQ ID NO:60), FIG. 62 (SEQ ID NO:62), FIG. 64 (SEQ ID NO:64), FIG. 66 (SEQ ID NO:66), FIG. 68 (SEQ ID NO:68), FIG. 70 (SEQ ID NO:70), FIG. 72 (SEQ ID NO:72), FIG. 74 (SEQ ID NO:74), FIG. 76 (SEQ ID NO:76), FIG. 78 (SEQ ID NO:78), FIG. 80 (SEQ ID NO:80), FIG. 82 (SEQ ID NO:82), FIG. 84 (SEQ ID NO:84), FIG. 86 (SEQ ID NO:86), FIG. 88 (SEQ ID NO:88), FIG. 90 (SEQ ID NO:90), FIG. 92 (SEQ ID NO:92), FIG. 94 (SEQ ID NO:94), FIG. 96 (SEQ ID NO:96), FIG. 98 (SEQ ID NO:98), FIG. 100 (SEQ ID NO:100), FIG. 102 (SEQ ID NO:102), FIG. 104 (SEQ ID NO:104), FIG. 106 (SEQ ID NO:106), FIG. 108 (SEQ ID NO:108), FIG. 110 (SEQ ID NO:110), FIG. 112 (SEQ ID NO:112), FIG. 114 (SEQ ID NO:114), FIG. 116 (SEQ ID NO:116), FIG. 118 (SEQ ID NO:118), FIG. 121 (SEQ ID NO:121), FIG. 123 (SEQ ID NO:123), FIG. 125 (SEQ ID NO:125), FIG. 127 (SEQ ID NO:127), FIG. 129 (SEQ ID NO:129), FIG. 131 (SEQ ID NO:131), FIG. 133 (SEQ ID NO:133), FIG. 135 (SEQ ID NO:135), FIG. 137 (SEQ ID NO:137), FIG. 139 (SEQ ID NO:139), FIG. 141 (SEQ ID NO:141), FIG. 143 (SEQ ID NO:143), FIG. 145 (SEQ ID NO:145), FIG. 147 (SEQ ID NO:147), FIG. 149 (SEQ ID NO:149), FIG. 151 (SEQ ID NO:151), FIG. 153 (SEQ ID NO:153), FIG. 155 (SEQ ID NO:155), FIG. 157 (SEQ ID NO:157), FIG. 159 (SEQ ID NO:159), FIG. 161 (SEQ ID NO:161), FIG. 163 (SEQ ID NO:163), FIG. 165 (SEQ ID NO:165), FIG. 167 (SEQ ID NO:167), FIG. 169 (SEQ ID NO:169), FIG. 171 (SEQ ID NO:171), FIG. 173 (SEQ ID NO:173), FIG. 175 (SEQ ID NO:175), FIG. 177 (SEQ ID NO:177), FIG. 179 (SEQ ID NO:179), FIG. 181 (SEQ ID NO:181), FIG. 183 (SEQ ID NO:183), FIG. 185 (SEQ ID NO:185), FIG. 187 (SEQ ID NO:187), FIG. 189 (SEQ ID NO:189), FIG. 191 (SEQ ID NO:191), FIG. 193 (SEQ ID NO:193), FIG. 195 (SEQ ID NO:195), FIG. 197 (SEQ ID NO:197), FIG. 199 (SEQ ID NO:199), FIG. 201 (SEQ ID NO:201), FIG. 203 (SEQ ID NO:203), FIG. 205 (SEQ ID NO:205), FIG. 207 (SEQ ID NO:207), FIG. 209 (SEQ ID NO:209), FIG. 211 (SEQ ID NO:211), FIG. 213 (SEQ ID NO:213), FIG. 215 (SEQ ID NO:215), FIG. 217 (SEQ ID NO:217), FIG. 219 (SEQ ID NO:219), FIG. 221 (SEQ ID NO:221), FIG. 223 (SEQ ID NO:223), FIG. 225 (SEQ ID NO:225), FIG. 227 (SEQ ID NO:227), FIG. 229 (SEQ ID NO:229), FIG. 231 (SEQ ID NO:231), FIG. 233 (SEQ ID NO:233), FIG. 235 (SEQ ID NO:235), FIG. 237 (SEQ ID NO:237), FIG. 239 (SEQ ID NO:239), FIG. 241 (SEQ ID NO:241), FIG. 243 (SEQ ID NO:243), FIG. 245 (SEQ ID NO:245), FIG. 247 (SEQ ID NO:247), FIG. 249 (SEQ ID NO:249), FIG. 251 (SEQ ID NO:251), FIG. 254 (SEQ ID NO:254), FIG. 256 (SEQ ID NO:256), FIG. 258 (SEQ ID NO:258), FIG. 260 (SEQ ID NO:260), FIG. 262 (SEQ ID NO:262), FIG. 264 (SEQ ID NO:264), FIG. 266 (SEQ ID NO:266), FIG. 268 (SEQ ID NO:268), FIG. 270 (SEQ ID NO:270), FIG. 272 (SEQ ID NO:272), FIG. 274 (SEQ ID NO:274), FIG. 276 (SEQ ID NO:276), FIG. 278 (SEQ ID NO:278), FIG. 280 (SEQ ID NO:280), FIG. 282 (SEQ ID NO:282), FIG. 284 (SEQ ID NO:284), FIG. 286 (SEQ ID NO:286), FIG. 288 (SEQ ID NO:288), FIG. 290 (SEQ ID NO:290), FIG. 292 (SEQ ID NO:292), FIG. 294 (SEQ ID NO:294), FIG. 296 (SEQ ID NO:296), FIG. 298 (SEQ ID NO:298), FIG. 300 (SEQ ID NO:300), FIG. 302 (SEQ ID NO:302), FIG. 304 (SEQ ID NO:304), FIG. 306 (SEQ ID NO:306), FIG. 308 (SEQ ID NO:308), FIG. 310 (SEQ ID NO:310), FIG. 312 (SEQ ID NO:312), FIG. 314 (SEQ ID NO:314), FIG. 316 (SEQ ID NO:316), FIG. 318 (SEQ ID NO:318), FIG. 320 (SEQ ID NO:320), FIG. 322 (SEQ ID NO:322), FIG. 324 (SEQ ID NO:324), FIG. 326 (SEQ ID NO:326), FIG. 328 (SEQ ID NO:328), FIG. 330 (SEQ ID NO:330), FIG. 332 (SEQ ID NO:332), FIG. 334 (SEQ ID NO:334), FIG. 336 (SEQ ID NO:336), FIG. 338 (SEQ ID NO:338), FIG. 340 (SEQ ID NO:340), FIG. 342 (SEQ ID NO:342), FIG. 344 (SEQ ID NO:344), FIG. 346 (SEQ ID NO:346), FIG. 348 (SEQ ID NO:348), FIG. 350 (SEQ ID NO:350), FIG. 352 (SEQ ID NO:352), FIG. 354 (SEQ ID NO:354), FIG. 356 (SEQ ID NO:356), FIG. 358 (SEQ ID NO:358), FIG. 360 (SEQ ID NO:360), FIG. 362 (SEQ ID NO:362), FIG. 364 (SEQ ID NO:364), FIG. 366 (SEQ ID NO:366), FIG. 368 (SEQ ID NO:368), FIG. 370 (SEQ ID NO:370), FIG. 372 (SEQ ID NO:372), FIG. 374 (SEQ ID NO:374), FIG. 376 (SEQ ID NO:376), FIG. 378 (SEQ ID NO:378), FIG. 380 (SEQ ID NO:380), FIG. 382 (SEQ ID NO:382), FIG. 384 (SEQ ID NO:384), FIG. 386 (SEQ ID NO:386), FIG. 388 (SEQ ID NO:388), FIG. 390 (SEQ ID NO:390), FIG. 392 (SEQ ID NO:392), FIG. 394 (SEQ ID NO:394), FIG. 396 (SEQ ID NO:396), FIG. 398 (SEQ ID NO:398), FIG. 400 (SEQ ID NO:400), FIG. 402 (SEQ ID NO:402), FIG. 404 (SEQ ID NO:404), FIG. 406 (SEQ ID NO:406), FIG. 408 (SEQ ID NO:408), FIG. 410 (SEQ ID NO:410), FIG. 412 (SEQ ID NO:412), FIG. 414 (SEQ ID NO:414), FIG. 416 (SEQ ID NO:416), FIG. 418 (SEQ ID NO:418), FIG. 420 (SEQ ID NO:420), FIG. 422 (SEQ ID NO:422), FIG. 424 (SEQ ID NO:424), FIG. 426 (SEQ ID NO:426), FIG. 428 (SEQ ID NO:428), FIG. 430 (SEQ ID NO:430), FIG. 432 (SEQ ID NO:432), FIG. 434 (SEQ ID NO:434), FIG. 436 (SEQ ID NO:436), FIG. 438 (SEQ ID NO:438), FIG. 440 (SEQ ID NO:440), FIG. 442 (SEQ ID NO:442), FIG. 444 (SEQ ID NO:444), FIG. 446 (SEQ ID NO:446), FIG. 448 (SEQ ID NO:448), FIG. 450 (SEQ ID NO:450), FIG. 452 (SEQ ID NO:452), FIG. 454 (SEQ ID NO:454), FIG. 456 (SEQ ID NO:456), FIG. 458 (SEQ ID NO:458), FIG. 460 (SEQ ID NO:460), FIG. 462 (SEQ ID NO:462), FIG. 464 (SEQ ID NO:464), FIG. 466 (SEQ ID NO:466), FIG. 468 (SEQ ID NO:468), FIG. 470 (SEQ ID NO:470), FIG. 472 (SEQ ID NO:472), FIG. 474 (SEQ ID NO:474), FIG. 476 (SEQ ID NO:476), FIG. 478 (SEQ ID NO:478), FIG. 480 (SEQ ID NO:480), FIG. 482 (SEQ ID NO:482), FIG. 484 (SEQ ID NO:484), FIG. 486 (SEQ ID NO:486), FIG. 488 (SEQ ID NO:488), FIG. 490 (SEQ ID NO:490), FIG. 492 (SEQ ID NO:492), FIG. 494 (SEQ ID NO:494), FIG. 496 (SEQ ID NO:496), FIG. 498 (SEQ ID NO:498), FIG. 500 (SEQ ID NO:500), FIG. 502 (SEQ ID NO:502), FIG. 504 (SEQ ID NO:504), FIG. 506 (SEQ ID NO:506), FIG. 508 (SEQ ID NO:508), FIG. 510 (SEQ ID NO:510), FIG. 512 (SEQ ID NO:512), FIG. 514 (SEQ ID NO:514), FIG. 516 (SEQ ID NO:516), FIG. 518 (SEQ ID NO:518), FIG. 520 (SEQ ID NO:520), FIG. 522 (SEQ ID NO:522), FIG. 524 (SEQ ID NO:524), FIG. 526 (SEQ ID NO:526), FIG. 528 (SEQ ID NO:528), FIG. 530 (SEQ ID NO:530), FIG. 532 (SEQ ID NO:532), FIG. 534 (SEQ ID NO:534), FIG. 536 (SEQ ID NO:536), FIG. 538 (SEQ ID NO:538), FIG. 540 (SEQ ID NO:540), FIG. 542 (SEQ ID NO:542), FIG. 544 (SEQ ID NO:544), FIG. 546 (SEQ ID NO:546), FIG. 549 (SEQ ID NO:549), FIG. 551 (SEQ ID NO:551), FIG. 553 (SEQ ID NO:553), FIG. 555 (SEQ ID NO:555), FIG. 557 (SEQ ID NO:557), FIG. 559 (SEQ ID NO:559), FIG. 561 (SEQ ID NO:561), FIG. 563 (SEQ ID NO:563), FIG. 565 (SEQ ID NO:565), FIG. 567 (SEQ ID NO:567), FIG. 569 (SEQ ID NO:569), FIG. 571 (SEQ ID NO:571), FIG. 573 (SEQ ID NO:573), FIG. 575 (SEQ ID NO:575), FIG. 577 (SEQ ID NO:577), FIG. 579 (SEQ ID NO:579), FIG. 581 (SEQ ID NO:581), FIG. 583 (SEQ ID NO:583), FIG. 585 (SEQ ID NO:585), FIG. 587 (SEQ ID NO:587), FIG. 589 (SEQ ID NO:589), FIG. 591 (SEQ ID NO:591), FIG. 593 (SEQ ID NO:593), FIG. 595 (SEQ ID NO:595), FIG. 597 (SEQ ID NO:597), FIG. 599 (SEQ ID NO:599), FIG. 601 (SEQ ID NO:601), FIG. 603 (SEQ ID NO:603), FIG. 605 (SEQ ID NO:605), FIG. 607 (SEQ ID NO:607), FIG. 609 (SEQ ID NO:609), FIG. 611 (SEQ ID NO:611), FIG. 613 (SEQ ID NO:613), FIG. 615 (SEQ ID NO:615), FIG. 617 (SEQ ID NO:617), FIG. 619 (SEQ ID NO:619), FIG. 621 (SEQ ID NO:621), FIG. 623 (SEQ ID NO:623), FIG. 625 (SEQ ID NO:625), FIG. 627 (SEQ ID NO:627), FIG. 629 (SEQ ID NO:629), FIG. 631 (SEQ ID NO:631), FIG. 633 (SEQ ID NO:633), FIG. 635 (SEQ ID NO:635), FIG. 637 (SEQ ID NO:637), FIG. 639 (SEQ ID NO:639), FIG. 641 (SEQ ID NO:641), FIG. 643 (SEQ ID NO:643), FIG. 645 (SEQ ID NO:645), FIG. 647 (SEQ ID NO:647), FIG. 649 (SEQ ID NO:649), FIG. 651 (SEQ ID NO:651), FIG. 653 (SEQ ID NO:653), FIG. 655 (SEQ ID NO:655), FIG. 657 (SEQ ID NO:657), FIG. 659 (SEQ ID NO:659), FIG. 661 (SEQ ID NO:661), FIG. 663 (SEQ ID NO:663), FIG. 665 (SEQ ID NO:665), FIG. 667 (SEQ ID NO:667), FIG. 669 (SEQ ID NO:669), FIG. 671 (SEQ ID NO:671), FIG. 673 (SEQ ID NO:673), FIG. 675 (SEQ ID NO:675), FIG. 677 (SEQ ID NO:377), FIG. 679 (SEQ ID NO:679), FIG. 681 (SEQ ID NO:681), FIG. 683 (SEQ ID NO:683), FIG. 685 (SEQ ID NO:685), FIG. 687 (SEQ ID NO:687), FIG. 689 (SEQ ID NO:689), FIG. 691 (SEQ ID NO:691), FIG. 693 (SEQ ID NO:693), FIG. 695 (SEQ ID NO:695), FIG. 697 (SEQ ID NO:697), FIG. 699 (SEQ ID NO:699), FIG. 701 (SEQ ID NO:701), FIG. 703 (SEQ ID NO:703), FIG. 705 (SEQ ID NO:705), FIG. 707 (SEQ ID NO:707), FIG. 709 (SEQ ID NO:709), FIG. 711 (SEQ ID NO:711), FIG. 713 (SEQ ID NO:713), FIG. 715 (SEQ ID NO:715), FIG. 717 (SEQ ID NO:717), FIG. 719 (SEQ ID NO:719), FIG. 721 (SEQ ID NO:721), FIG. 723 (SEQ ID NO:723), FIG. 725 (SEQ ID NO:725), FIG. 727 (SEQ ID NO:727), FIG. 729 (SEQ ID NO:729), FIG. 731 (SEQ ID NO:731), FIG. 733 (SEQ ID NO:733), FIG. 735 (SEQ ID NO:735), FIG. 737 (SEQ ID NO:737), FIG. 739 (SEQ ID NO:739), FIG. 741 (SEQ ID NO:741), FIG. 743 (SEQ ID NO:743), FIG. 745 (SEQ ID NO:745), FIG. 747 (SEQ ID NO:747), FIG. 749 (SEQ ID NO:749), FIG. 751 (SEQ ID NO:751), FIG. 753 (SEQ ID NO:753), FIG. 755 (SEQ ID NO:755), FIG. 757 (SEQ ID NO:757), FIG. 759 (SEQ ID NO:759), FIG. 761 (SEQ ID NO:761), FIG. 763 (SEQ ID NO:763), FIG. 765 (SEQ ID NO:765), FIG. 767 (SEQ ID NO:767), FIG. 769 (SEQ ID NO:769), FIG. 771 (SEQ ID NO:771), FIG. 773 (SEQ ID NO:773), FIG. 775 (SEQ ID NO:775), FIG. 777 (SEQ ID NO:777), FIG. 779 (SEQ ID NO:779), FIG. 781 (SEQ ID NO:781), FIG. 783 (SEQ ID NO:783), FIG. 785 (SEQ ID NO:785), FIG. 787 (SEQ ID NO:787), FIG. 789 (SEQ ID NO:789), FIG. 791 (SEQ ID NO:791), FIG. 793 (SEQ ID NO:793), FIG. 795 (SEQ ID NO:795), FIG. 797 (SEQ ID NO:797), FIG. 799 (SEQ ID NO:799), FIG. 801 (SEQ ID NO:801), FIG. 803 (SEQ ID NO:803), FIG. 805 (SEQ ID NO:805), FIG. 807 (SEQ ID NO:807), FIG. 809 (SEQ ID NO:809), FIG. 811 (SEQ ID NO:811), FIG. 813 (SEQ ID NO:813), FIG. 815 (SEQ ID NO:815), FIG. 817 (SEQ ID NO:817), FIG. 819 (SEQ ID NO:819), FIG. 821 (SEQ ID NO:821), FIG. 823 (SEQ ID NO:823), FIG. 825 (SEQ ID NO:825), FIG. 827 (SEQ ID NO:827), FIG. 829 (SEQ ID NO:829), FIG. 831 (SEQ ID NO:831), FIG. 833 (SEQ ID NO:833), FIG. 835 (SEQ ID NO:835), FIG. 837 (SEQ ID NO:837), FIG. 839 (SEQ ID NO:839), FIG. 841 (SEQ ID NO:841), FIG. 843 (SEQ ID NO:843), FIG. 845 (SEQ ID NO:845), FIG. 847 (SEQ ID NO:847), FIG. 849 (SEQ ID NO:849), FIG. 851 (SEQ ID NO:851), FIG. 853 (SEQ ID NO:853), FIG. 855 (SEQ ID NO:855), FIG. 858 (SEQ ID NO:858), FIG. 860 (SEQ ID NO:860), FIG. 862 (SEQ ID NO:862), FIG. 864 (SEQ ID NO:864), FIG. 866 (SEQ ID NO:866), FIG. 868 (SEQ ID NO:868), FIG. 870 (SEQ ID NO:870), FIG. 872 (SEQ ID NO:872), FIG. 874 (SEQ ID NO:874), FIG. 876 (SEQ ID NO:876), FIG. 878 (SEQ ID NO:878), FIG. 880 (SEQ ID NO:880), FIG. 882 (SEQ ID NO:882), FIG. 884 (SEQ ID NO:884), FIG. 886 (SEQ ID NO:886), FIG. 888 (SEQ ID NO:888), FIG. 890 (SEQ ID NO:890), FIG. 892 (SEQ ID NO:892), FIG. 894 (SEQ ID NO:894), FIG. 896 (SEQ ID NO:896), FIG. 898 (SEQ ID NO:898), FIG. 900 (SEQ ID NO:900), FIG. 902 (SEQ ID NO:902), FIG. 904 (SEQ ID NO:904), FIG. 906 (SEQ ID NO:906), FIG. 908 (SEQ ID NO:908), FIG. 910 (SEQ ID NO:910), FIG. 912 (SEQ ID NO:912), FIG. 914 (SEQ ID NO:914), FIG. 916 (SEQ ID NO:916), FIG. 918 (SEQ ID NO:918), FIG. 920 (SEQ ID NO:920), FIG. 922 (SEQ ID NO:922), FIG. 924 (SEQ ID NO:924), FIG. 926 (SEQ ID NO:926), FIG. 928 (SEQ ID NO:928), FIG. 930 (SEQ ID NO:930), FIG. 932 (SEQ ID NO:932), FIG. 934 (SEQ ID NO:934), FIG. 936 (SEQ ID NO:936), FIG. 938 (SEQ ID NO:938), FIG. 940 (SEQ ID NO:940), FIG. 943 (SEQ ID NO:943), FIG. 945 (SEQ ID NO:945), FIG. 947 (SEQ ID NO:947), FIG. 949 (SEQ ID NO:949), FIG. 951 (SEQ ID NO:951), FIG. 953 (SEQ ID NO:953), FIG. 955 (SEQ ID NO:955), FIG. 958 (SEQ ID NO:958), FIG. 960 (SEQ ID NO:960), FIG. 963 (SEQ ID NO:963), FIG. 965 (SEQ ID NO:965), FIG. 968 (SEQ ID NO:968), FIG. 970 (SEQ ID NO:970), FIG. 972 (SEQ ID NO:972), FIG. 974 (SEQ ID NO:974), FIG. 976 (SEQ ID NO:976), FIG. 978 (SEQ ID NO:978), FIG. 980 (SEQ ID NO:980), FIG. 983 (SEQ ID NO:983), FIG. 985 (SEQ ID NO:985), FIG. 987 (SEQ ID NO:987), FIG. 990 (SEQ ID NO:990), FIG. 992 (SEQ ID NO:992), FIG. 994 (SEQ ID NO:994), FIG. 996 (SEQ ID NO:996), FIG. 998 (SEQ ID NO:998), FIG. 1000 (SEQ ID NO:1000), FIG. 1002 (SEQ ID NO:1002), FIG. 1007 (SEQ ID NO:1007), FIG. 1009 (SEQ ID NO:1009), FIG. 1011 (SEQ ID NO:1011), FIG. 1013 (SEQ ID NO:1013), FIG. 1015 (SEQ ID NO:1015), FIG. 1017 (SEQ ID NO:1017), FIG. 1019 (SEQ ID NO:1019), FIG. 1021 (SEQ ID NO:1021), FIG. 1023 (SEQ ID NO:1023), FIG. 1025 (SEQ ID NO:1025), FIG. 1030 (SEQ ID NO:1030), FIG. 1033 (SEQ ID NO:1033), FIG. 1035 (SEQ ID NO:1035), FIG. 1037 (SEQ ID NO:1037), FIG. 1039 (SEQ ID NO:1039), FIG. 1041 (SEQ ID NO:1041), FIG. 1043 (SEQ ID NO:1043), FIG. 1046 (SEQ ID NO:1046), FIG. 1048 (SEQ ID NO:1048), FIG. 1050 (SEQ ID NO:1050), FIG. 1053 (SEQ ID NO:1053), FIG. 1055 (SEQ ID NO:1055), FIG. 1057 (SEQ ID NO:1057), FIG. 1060 (SEQ ID NO:1060), FIG. 1062 (SEQ ID NO:1062), FIG. 1064 (SEQ ID NO:1064), FIG. 1066 (SEQ ID NO:1066), FIG. 1068 (SEQ ID NO:1068), FIG. 1070 (SEQ ID NO:1070), FIG. 1072 (SEQ ID NO:1072), FIG. 1074 (SEQ ID NO:1074), FIG. 1076 (SEQ ID NO:1076), FIG. 1078 (SEQ ID NO:1078), FIG. 1080 (SEQ ID NO:1080), FIG. 1082 (SEQ ID NO:1082), FIG. 1084 (SEQ ID NO:1084), FIG. 1086 (SEQ ID NO:1086), FIG. 1088 (SEQ ID NO:1088), FIG. 1090 (SEQ ID NO:1090), FIG. 1092 (SEQ ID NO:1092), FIG. 1094 (SEQ ID NO:1094), FIG. 1096 (SEQ ID NO:1096), FIG. 1098 (SEQ ID NO:1098), FIG. 1101 (SEQ ID NO:1101), FIG. 1103 (SEQ ID NO:1103), FIG. 1105 (SEQ ID NO:1105), FIG. 1107 (SEQ ID NO:1107), FIG. 1109 (SEQ ID NO:1109), FIG. 1111 (SEQ ID NO:1111), FIG. 1113 (SEQ ID NO:1113), FIG. 1116 (SEQ ID NO:1116), FIG. 1118 (SEQ ID NO:1118), FIG. 1120 (SEQ ID NO:1120), FIG. 1123 (SEQ ID NO:1123), FIG. 1125 (SEQ ID NO:1125), FIG. 1128 (SEQ ID NO:1128), FIG. 1130 (SEQ ID NO:1130), FIG. 1132 (SEQ ID NO:1132), FIG. 1134 (SEQ ID NO:1134), FIG. 1136 (SEQ ID NO:1136), FIG. 1138 (SEQ ID NO:1138), FIG. 1142 (SEQ ID NO:1142), FIG. 1144 (SEQ ID NO:1144), FIG. 1146 (SEQ ID NO:1146), FIG. 1148 (SEQ ID NO:1148), FIG. 1150 (SEQ ID NO:1150), FIG. 1152 (SEQ ID NO:1152), FIG. 1154 (SEQ ID NO:1154), FIG. 1156 (SEQ ID NO:1156), FIG. 1158 (SEQ ID NO:1158), FIG. 1160 (SEQ ID NO:1160), FIG. 1162 (SEQ ID NO:1162), FIG. 1164 (SEQ ID NO:1164), FIG. 1166 (SEQ ID NO:1166), FIG. 1168 (SEQ ID NO:1168), FIG. 1170 (SEQ ID NO:1170), FIG. 1172 (SEQ ID NO:1172), FIG. 1174 (SEQ ID NO:1174), FIG. 1176 (SEQ ID NO:1176), FIG. 1178 (SEQ ID NO:1178), FIG. 1180 (SEQ ID NO:1180), FIG. 1182 (SEQ ID NO:1182), FIG. 1184 (SEQ ID NO:1184), FIG. 1186 (SEQ ID NO:1186), FIG. 1188 (SEQ ID NO:1188), FIG. 1190 (SEQ ID NO:1190), FIG. 1192 (SEQ ID NO:1192), FIG. 1194 (SEQ ID NO:1194), FIG. 1196 (SEQ ID NO:1196), FIG. 1198 (SEQ ID NO:1198), FIG. 1200 (SEQ ID NO:1200), FIG. 1202 (SEQ ID NO:1202), FIG. 1204 (SEQ ID NO:1204), FIG. 1206 (SEQ ID NO:1206), FIG. 1208 (SEQ ID NO:1208), FIG. 1210 (SEQ ID NO:1210), FIG. 1212 (SEQ ID NO:1212), FIG. 1214 (SEQ ID NO:1214), FIG. 1216 (SEQ ID NO:1216), FIG. 1218 (SEQ ID NO:1218), FIG. 1220 (SEQ ID NO:1220), FIG. 1222 (SEQ ID NO:1222), FIG. 1224 (SEQ ID NO:1224), FIG. 1226 (SEQ ID NO:1226), FIG. 1228 (SEQ ID NO:1228), FIG. 1230 (SEQ ID NO:1230), FIG. 1232 (SEQ ID NO:1232), FIG. 1234 (SEQ ID NO:1234), FIG. 1236 (SEQ ID NO:1236), FIG. 1238 (SEQ ID NO:1238), FIG. 1240 (SEQ ID NO:1240), FIG. 1242 (SEQ ID NO:1242), FIG. 1244 (SEQ ID NO:1244), FIG. 1246 (SEQ ID NO:1246), FIG. 1248 (SEQ ID NO:1248), FIG. 1250 (SEQ ID NO:1250), FIG. 1252 (SEQ ID NO:1252), FIG. 1254 (SEQ ID NO:1254), FIG. 1256 (SEQ ID NO:1256), FIG. 1258 (SEQ ID NO:1258), FIG. 1260 (SEQ ID NO:1260), FIG. 1262 (SEQ ID NO:1262), FIG. 1264 (SEQ ID NO:1264), FIG. 1266 (SEQ ID NO:1266), FIG. 1268 (SEQ ID NO:1268), FIG. 1270 (SEQ ID NO:1270), FIG. 1272 (SEQ ID NO:1272), FIG. 1274 (SEQ ID NO:1274), FIG. 1276 (SEQ ID NO:1276), FIG. 1278 (SEQ ID NO:1278), FIG. 1280 (SEQ ID NO:1280), FIG. 1282 (SEQ ID NO:1282), FIG. 1284 (SEQ ID NO:1284), FIG. 1286 (SEQ ID NO:1286), FIG. 1288 (SEQ ID NO:1288), FIG. 1290 (SEQ ID NO:1290), FIG. 1292 (SEQ ID NO:1292), FIG. 1294 (SEQ ID NO:1294), FIG. 1296 (SEQ ID NO:1296), FIG. 1298 (SEQ ID NO:1298), FIG. 1300 (SEQ ID NO:1300), FIG. 1302 (SEQ ID NO:1302), FIG. 1304 (SEQ ID NO:1304), FIG. 1306 (SEQ ID NO:1306), FIG. 1308 (SEQ ID NO:1308), FIG. 1310 (SEQ ID NO:1310), FIG. 1312 (SEQ ID NO:1312), FIG. 1314 (SEQ ID NO:1314), FIG. 1316 (SEQ ID NO:1316), FIG. 1318 (SEQ ID NO:1318), FIG. 1320 (SEQ ID NO:1320), FIG. 1322 (SEQ ID NO:1322), FIG. 1324 (SEQ ID NO:1324), FIG. 1326 (SEQ ID NO:1326), FIG. 1328 (SEQ ID NO:1328), FIG. 1330 (SEQ ID NO:1330), FIG. 1332 (SEQ ID NO:1332), FIG. 1334 (SEQ ID NO:1334), FIG. 1336 (SEQ ID NO:1336), FIG. 1338 (SEQ ID NO:1338), FIG. 1340 (SEQ ID NO:1340), FIG. 1342 (SEQ ID NO:1342), FIG. 1344 (SEQ ID NO:1344), FIG. 1346 (SEQ ID NO:1346), FIG. 1348 (SEQ ID NO:1348), FIG. 1350 (SEQ ID NO:1350), FIG. 1352 (SEQ ID NO:1352), FIG. 1354 (SEQ ID NO:1354), FIG. 1356 (SEQ ID NO:1356), FIG. 1358 (SEQ ID NO:1358), FIG. 1361 (SEQ ID NO:1361), FIG. 1363 (SEQ ID NO:1363), FIG. 1365 (SEQ ID NO:1365), FIG. 1367 (SEQ ID NO:1367), FIG. 1369 (SEQ ID NO:1369), FIG. 1371 (SEQ ID NO:1371), FIG. 1373 (SEQ ID NO:1373), FIG. 1375 (SEQ ID NO:1375), FIG. 1377 (SEQ ID NO:1377), FIG. 1379 (SEQ ID NO:1379), FIG. 1381 (SEQ ID NO:1381), FIG. 1383 (SEQ ID NO:1383), FIG. 1385 (SEQ ID NO:1385), FIG. 1387 (SEQ ID NO:1387), FIG. 1389 (SEQ ID NO:1389), FIG. 1391 (SEQ ID NO:1391), FIG. 1393 (SEQ ID NO:1393), FIG. 1395 (SEQ ID NO:1395), FIG. 1397 (SEQ ID NO:1397), FIG. 1399 (SEQ ID NO:1399), FIG. 1401 (SEQ ID NO:1401), FIG. 1403 (SEQ ID NO:1403), FIG. 1405 (SEQ ID NO:1405), FIG. 1407 (SEQ ID NO:1407), FIG. 1409 (SEQ ID NO:1409), FIG. 1411 (SEQ ID NO:1411), FIG. 1413 (SEQ ID NO:1413), FIG. 1415 (SEQ ID NO:1415), FIG. 1417 (SEQ ID NO:1417), FIG. 1419 (SEQ ID NO:1419), FIG. 1421 (SEQ ID NO:1421), FIG. 1423 (SEQ ID NO:1423), FIG. 1425 (SEQ ID NO:1425), FIG. 1427 (SEQ ID NO:1427), FIG. 1429 (SEQ ID NO:1429), FIG. 1431 (SEQ ID NO:1431), FIG. 1433 (SEQ ID NO:1433), FIG. 1435 (SEQ ID NO:1435), FIG. 1437 (SEQ ID NO:1437), FIG. 1439 (SEQ ID NO:1439), FIG. 1441 (SEQ ID NO:1441), FIG. 1443 (SEQ ID NO:1443), FIG. 1445 (SEQ ID NO:1445), FIG. 1447 (SEQ ID NO:1447), FIG. 1449 (SEQ ID NO:1449), FIG. 1451 (SEQ ID NO:1451), FIG. 1453 (SEQ ID NO:1453), FIG. 1455 (SEQ ID NO:1455), FIG. 1457 (SEQ ID NO:1457), FIG. 1459 (SEQ ID NO:1459), FIG. 1461 (SEQ ID NO:1461), FIG. 1463 (SEQ ID NO:1463), FIG. 1465 (SEQ ID NO:1465), FIG. 1467 (SEQ ID NO:1467), FIG. 1469 (SEQ ID NO:1469), FIG. 1471 (SEQ ID NO:1471), FIG. 1473 (SEQ ID NO:1473), FIG. 1475 (SEQ ID NO:1475), FIG. 1477 (SEQ ID NO:1477), FIG. 1479 (SEQ ID NO:1479), FIG. 1481 (SEQ ID NO:1481), FIG. 1483 (SEQ ID NO:1483), FIG. 1485 (SEQ ID NO:1485), FIG. 1487 (SEQ ID NO:1487), FIG. 1489 (SEQ ID NO:1489), FIG. 1491 (SEQ ID NO:1491), FIG. 1493 (SEQ ID NO:1493), FIG. 1495 (SEQ ID NO:1495), FIG. 1497 (SEQ ID NO:1497), FIG. 1499 (SEQ ID NO:1499), FIG. 1501 (SEQ ID NO:1501), FIG. 1503 (SEQ ID NO:1503), FIG. 1505 (SEQ ID NO:1505), FIG. 1507 (SEQ ID NO:1507), FIG. 1509 (SEQ ID NO:1509), FIG. 1511 (SEQ ID NO:1511), FIG. 1513 (SEQ ID NO:1513), FIG. 1515 (SEQ ID NO:1515), FIG. 1517 (SEQ ID NO:1517), FIG. 1519 (SEQ ID NO:1519), FIG. 1521 (SEQ ID NO:1521), FIG. 1523 (SEQ ID NO:1523), FIG. 1525 (SEQ ID NO:1525), FIG. 1527 (SEQ ID NO:1527), FIG. 1529 (SEQ ID NO:1529), FIG. 1531 (SEQ ID NO:1531), FIG. 1533 (SEQ ID NO:1533), FIG. 1535 (SEQ ID NO:1535), FIG. 1537 (SEQ ID NO:1537), FIG. 1539 (SEQ ID NO:1539), FIG. 1541 (SEQ ID NO:1541), FIG. 1543 (SEQ ID NO:1543), FIG. 1545 (SEQ ID NO:1545), FIG. 1547 (SEQ ID NO:1547), FIG. 1549 (SEQ ID NO:1549), FIG. 1551 (SEQ ID NO:1551), FIG. 1553 (SEQ ID NO:1553), FIG. 1555 (SEQ ID NO:1555), FIG. 1557 (SEQ ID NO:1557), FIG. 1559 (SEQ ID NO:1559), FIG. 1561 (SEQ ID NO:1561), FIG. 1563 (SEQ ID NO:1563), FIG. 1565 (SEQ ID NO:1565), FIG. 1567 (SEQ ID NO:1567), FIG. 1569 (SEQ ID NO:1569), FIG. 1571 (SEQ ID NO:1571), FIG. 1573 (SEQ ID NO:1573), FIG. 1575 (SEQ ID NO:1575), FIG. 1578 (SEQ ID NO:1578), FIG. 1581 (SEQ ID NO:1581), FIG. 1583 (SEQ ID NO:1583), FIG. 1585 (SEQ ID NO:1585), FIG. 1587 (SEQ ID NO:1587), FIG. 1589 (SEQ ID NO:1589), FIG. 1592 (SEQ ID NO:1592), FIG. 1594 (SEQ ID NO:1594), FIG. 1596 (SEQ ID NO:1596), FIG. 1598 (SEQ ID NO:1598), FIG. 1600 (SEQ ID NO:1600), FIG. 1602 (SEQ ID NO:1602), FIG. 1604 (SEQ ID NO:1604), FIG. 1606 (SEQ ID NO:1606), FIG. 1609 (SEQ ID NO:1609), FIG. 1611 (SEQ ID NO:1611), FIG. 1614 (SEQ ID NO:1614), FIG. 1617 (SEQ ID NO:1617), FIG. 1619 (SEQ ID NO:1619), FIG. 1621 (SEQ ID NO:1621), FIG. 1623 (SEQ ID NO:1623), FIG. 1626 (SEQ ID NO:1626), FIG. 1628 (SEQ ID NO:1628), FIG. 1630 (SEQ ID NO:1630), FIG. 1632 (SEQ ID NO:1632), FIG. 1636 (SEQ ID NO:1636), FIG. 1639 (SEQ ID NO:1639), FIG. 1644 (SEQ ID NO:1644), FIG. 1646 (SEQ ID NO:1646); FIG. 1648 (SEQ ID NO:1648), FIG. 1650 (SEQ ID NO:1650), FIG. 1652 (SEQ ID NO:1652), FIG. 1654 (SEQ ID NO:1654), FIG. 1656 (SEQ ID NO:1656), FIG. 1658 (SEQ ID NO:1658), FIG. 1660 (SEQ ID NO:1660), FIG. 1662 (SEQ ID NO:1662), FIG. 1664 (SEQ ID NO:1664), FIG. 1666 (SEQ ID NO:1666), FIG. 1668 (SEQ ID NO:1668), FIG. 1670 (SEQ ID NO:1670), FIG. 1672 (SEQ ID NO:1672), FIG. 1674 (SEQ ID NO:1674), FIG. 1676 (SEQ ID NO:1676), FIG. 1678 (SEQ ID NO:1678), FIG. 1680 (SEQ ID NO:1680), FIG. 1683 (SEQ ID NO:1683), FIG. 1685 (SEQ ID NO:1685), FIG. 1687 (SEQ ID NO:1687), FIG. 1689 (SEQ ID NO:1689), FIG. 1692 (SEQ ID NO:1692), FIG. 1694 (SEQ ID NO:1694), FIG. 1696 (SEQ ID NO:1696), FIG. 1698 (SEQ ID NO:1698), FIG. 1701 (SEQ ID NO:1701), FIG. 1703 (SEQ ID NO:1703), FIG. 1705 (SEQ ID NO:1705), FIG. 1707 (SEQ ID NO:1707), FIG. 1709 (SEQ ID NO:1709), FIG. 1711 (SEQ ID NO:1711), FIG. 1713 (SEQ ID NO:1713), FIG. 1715 (SEQ ID NO:1715), FIG. 1717 (SEQ ID NO:1717), FIG. 1719 (SEQ ID NO:1719), FIG. 1721 (SEQ ID NO:1721), FIG. 1723 (SEQ ID NO:1723), FIG. 1725 (SEQ ID NO:1725), FIG. 1727 (SEQ ID NO:1727), FIG. 1729 (SEQ ID NO:1729), FIG. 1732 (SEQ ID NO:1732), FIG. 1734 (SEQ ID NO:1734), FIG. 1736 (SEQ ID NO:1736), FIG. 1738 (SEQ ID NO:1738), FIG. 1741 (SEQ ID NO:1741), FIG. 1743 (SEQ ID NO:1743), FIG. 1745 (SEQ ID NO:1745), FIG. 1747 (SEQ ID NO:1747), FIG. 1749 (SEQ ID NO:1749), FIG. 1751 (SEQ ID NO:1751), FIG. 1753 (SEQ ID NO:1753), FIG. 1755 (SEQ ID NO:1755), FIG. 1757 (SEQ ID NO:1757), FIG. 1760 (SEQ ID NO:1760), FIG. 1762 (SEQ ID NO:1762), FIG. 1764 (SEQ ID NO:1764), FIG. 1766 (SEQ ID NO:1766), FIG. 1769 (SEQ ID NO:1769), FIG. 1771 (SEQ ID NO:1771), FIG. 1773 (SEQ ID NO:1773), FIG. 1775 (SEQ ID NO:1775), FIG. 1777 (SEQ ID NO:1777), FIG. 1779 (SEQ ID NO:1779), FIG. 1781 (SEQ ID NO:1781), FIG. 1783 (SEQ ID NO:1783), FIG. 1785 (SEQ ID NO:1785), FIG. 1787 (SEQ ID NO:1787), FIG. 1789 (SEQ ID NO:1789), FIG. 1792 (SEQ ID NO:1792), FIG. 1795 (SEQ ID NO:1795), FIG. 1797 (SEQ ID NO:1797), FIG. 1799 (SEQ ID NO:1799), FIG. 1802 (SEQ ID NO:1802), FIG. 1805 (SEQ ID NO:1805), FIG. 1807 (SEQ ID NO:1807), FIG. 1809 (SEQ ID NO:1809), FIG. 1811 (SEQ ID NO:1811), FIG. 1813 (SEQ ID NO:1813), FIG. 1815 (SEQ ID NO:1815), FIG. 1817 (SEQ ID NO:1817), FIG. 1819 (SEQ ID NO:1819), FIG. 1821 (SEQ ID NO:1821), FIG. 1823 (SEQ ID NO:1823), FIG. 1825 (SEQ ID NO:1825), FIG. 1827 (SEQ ID NO:1827), FIG. 1829 (SEQ ID NO:1829), FIG. 1831 (SEQ ID NO:1831), FIG. 1833 (SEQ ID NO:1833), FIG. 1836 (SEQ ID NO:1836), FIG. 1838 (SEQ ID NO:1838), FIG. 1841 (SEQ ID NO:1841), FIG. 1843 (SEQ ID NO:1843), FIG. 1845 (SEQ ID NO:1845), FIG. 1847 (SEQ ID NO:1847), FIG. 1849 (SEQ ID NO:1849), FIG. 1851 (SEQ ID NO:1851), FIG. 1854 (SEQ ID NO:1854), FIG. 1856 (SEQ ID NO:1856), FIG. 1858 (SEQ ID NO:1858), FIG. 1860 (SEQ ID NO:1860), FIG. 1863 (SEQ ID NO:1863), FIG. 1865 (SEQ ID NO:1865), FIG. 1867 (SEQ ID NO:1867), FIG. 1869 (SEQ ID NO:1869), FIG. 1871 (SEQ ID NO:1871), FIG. 1873 (SEQ ID NO:1873), FIG. 1875 (SEQ ID NO:1875), FIG. 1877 (SEQ ID NO:1877), FIG. 1881 (SEQ ID NO:1881), FIG. 1883 (SEQ ID NO:1883), FIG. 1885 (SEQ ID NO:1885), FIG. 1887 (SEQ ID NO:1887), FIG. 1889 (SEQ ID NO:1889), FIG. 1891 (SEQ ID NO:1891), FIG. 1893 (SEQ ID NO:1893), FIG. 1895 (SEQ ID NO:1895), FIG. 1897 (SEQ ID NO:1897), FIG. 1899 (SEQ ID NO:1899), FIG. 1901 (SEQ ID NO:1901), FIG. 1903 (SEQ ID NO:1903), FIG. 1905 (SEQ ID NO:1905), FIG. 1908 (SEQ ID NO:1908), FIG. 1910 (SEQ ID NO:1910), FIG. 1913 (SEQ ID NO:1913), FIG. 1915 (SEQ ID NO:1915), FIG. 1917 (SEQ ID NO:1917), FIG. 1919 (SEQ ID NO:1919), FIG. 1922 (SEQ ID NO:1922), FIG. 1924 (SEQ ID NO:1924), FIG. 1926 (SEQ ID NO:1926), FIG. 1928 (SEQ ID NO:1928), FIG. 1930 (SEQ ID NO:1930), FIG. 1932 (SEQ ID NO:1932), FIG. 1934 (SEQ ID NO:1934), FIG. 1936 (SEQ ID NO:1936), FIG. 1938 (SEQ ID NO:1938), FIG. 1940 (SEQ ID NO:1940), FIG. 1942 (SEQ ID NO:1942), FIG. 1944 (SEQ ID NO:1944), FIG. 1946 (SEQ ID NO:1946), FIG. 1948 (SEQ ID NO:1948), FIG. 1950 (SEQ ID NO:1950), FIG. 1952 (SEQ ID NO:1952), FIG. 1954 (SEQ ID NO:1954), FIG. 1956 (SEQ ID NO:1956), FIG. 1958 (SEQ ID NO:1958), FIG. 1960 (SEQ ID NO:1960), FIG. 1962 (SEQ ID NO:1962), FIG. 1964 (SEQ ID NO:1964), FIG. 1966 (SEQ ID NO:1966), FIG. 1968 (SEQ ID NO:1968), FIG. 1970 (SEQ ID NO:1970), FIG. 1972 (SEQ ID NO:1972), FIG. 1974 (SEQ ID NO:1974), FIG. 1976 (SEQ ID NO:1976), FIG. 1978 (SEQ ID NO:1978), FIG. 1980 (SEQ ID NO:1980), FIG. 1982 (SEQ ID NO:1982), FIG. 1984 (SEQ ID NO:1984), FIG. 1986 (SEQ ID NO:1986), FIG. 1988 (SEQ ID NO:1988), FIG. 1990 (SEQ ID NO:1990), FIG. 1992 (SEQ ID NO:1992), FIG. 1994 (SEQ ID NO:1994), FIG. 1996 (SEQ ID NO:1996), FIG. 1998 (SEQ ID NO:1998), FIG. 2000 (SEQ ID NO:2000), FIG. 2002 (SEQ ID NO:2002), FIG. 2004 (SEQ ID NO:2004), FIG. 2006 (SEQ ID NO:2006), FIG. 2008 (SEQ ID NO:2008), FIG. 2010 (SEQ ID NO:2010), FIG. 2012 (SEQ ID NO:2012), FIG. 2014 (SEQ ID NO:2014), FIG. 2016 (SEQ ID NO:2016), FIG. 2018 (SEQ ID NO:2018), FIG. 2020 (SEQ ID NO:2020), FIG. 2022 (SEQ ID NO:2022), FIG. 2024 (SEQ ID NO:2024), FIG. 2026 (SEQ ID NO:2026), FIG. 2028 (SEQ ID NO:2028), FIG. 2030 (SEQ ID NO:2030), FIG. 2032 (SEQ ID NO:2032), FIG. 2034 (SEQ ID NO:2034), FIG. 2036 (SEQ ID NO:2036), FIG. 2038 (SEQ ID NO:2038), FIG. 2040 (SEQ ID NO:2040), FIG. 2042 (SEQ ID NO:2042), FIG. 2044 (SEQ ID NO:2044), FIG. 2046 (SEQ ID NO:2046), FIG. 2048 (SEQ ID NO:2048), FIG. 2050 (SEQ ID NO:2050), FIG. 2052 (SEQ ID NO:2052), FIG. 2054 (SEQ ID NO:2054), FIG. 2056 (SEQ ID NO:2056), FIG. 2058 (SEQ ID NO:2058), FIG. 2060 (SEQ ID NO:2060), FIG. 2062 (SEQ ID NO:2062), FIG. 2064 (SEQ ID NO:2064), FIG. 2066 (SEQ ID NO:2066), FIG. 2068 (SEQ ID NO:2068), FIG. 2070 (SEQ ID NO:2070), FIG. 2072 (SEQ ID NO:2072), FIG. 2074 (SEQ ID NO:2074), FIG. 2076 (SEQ ID NO:2076), FIG. 2078 (SEQ ID NO:2078), FIG. 2080 (SEQ ID NO:2080), FIG. 2082 (SEQ ID NO:2082), FIG. 2084 (SEQ ID NO:2084), FIG. 2086 (SEQ ID NO:2086), FIG. 2088 (SEQ ID NO:2088), FIG. 2090 (SEQ ID NO:2090), FIG. 2092 (SEQ ID NO:2092), FIG. 2094 (SEQ ID NO:2094), FIG. 2096 (SEQ ID NO:2096), FIG. 2098 (SEQ ID NO:2098), FIG. 2100 (SEQ ID NO:2100), FIG. 2102 (SEQ ID NO:2102), FIG. 2104 (SEQ ID NO:2104), FIG. 2106 (SEQ ID NO:2106), FIG. 2108 (SEQ ID NO:2108), FIG. 2110 (SEQ ID NO:2110), FIG. 2112 (SEQ ID NO:2112), FIG. 2114 (SEQ ID NO:2114), FIG. 2116 (SEQ ID NO:2116), FIG. 2118 (SEQ ID NO:2118), FIG. 2120 (SEQ ID NO:2120), FIG. 2122 (SEQ ID NO:2122), FIG. 2124 (SEQ ID NO:2124), FIG. 2126 (SEQ ID NO:2126), FIG. 2128 (SEQ ID NO:2128), FIG. 2130 (SEQ ID NO:2130), FIG. 2132 (SEQ ID NO:2132), FIG. 2134 (SEQ ID NO:2134), FIG. 2136 (SEQ ID NO:2136), FIG. 2138 (SEQ ID NO:2138), FIG. 2140 (SEQ ID NO:2140), FIG. 2142 (SEQ ID NO:2142), FIG. 2144 (SEQ ID NO:2144), FIG. 2146 (SEQ ID NO:2146), FIG. 2148 (SEQ ID NO:2148), FIG. 2150 (SEQ ID NO:2150), FIG. 2152 (SEQ ID NO:2152), FIG. 2154 (SEQ ID NO:2154), FIG. 2156 (SEQ ID NO:2156), FIG. 2158 (SEQ ID NO:2158), FIG. 2160 (SEQ ID NO:2160), FIG. 2163 (SEQ ID NO:2163), FIG. 2165 (SEQ ID NO:2165), FIG. 2167 (SEQ ID NO:2167), FIG. 2170 (SEQ ID NO:2170), FIG. 2172 (SEQ ID NO:2172), FIG. 2174 (SEQ ID NO:2174), FIG. 2176 (SEQ ID NO:2176), FIG. 2178 (SEQ ID NO:2178), FIG. 2180 (SEQ ID NO:2180), FIG. 2182 (SEQ ID NO:2182), FIG. 2184 (SEQ ID NO:2184), FIG. 2186 (SEQ ID NO:2186), FIG. 2188 (SEQ ID NO:2188), FIG. 2191 (SEQ ID NO:2191), FIG. 2193 (SEQ ID NO:2193), FIG. 2195 (SEQ ID NO:2195), FIG. 2197 (SEQ ID NO:2197), FIG. 2199 (SEQ ID NO:2199), FIG. 2201 (SEQ ID NO:2201), FIG. 2204 (SEQ ID NO:2204), FIG. 2207 (SEQ ID NO:2207), FIG. 2209 (SEQ ID NO:2209), FIG. 2212 (SEQ ID NO:2212), FIG. 2214 (SEQ ID NO:2214), FIG. 2216 (SEQ ID NO:2216), FIG. 2218 (SEQ ID NO:2218), FIG. 2220 (SEQ ID NO:2220), FIG. 2222 (SEQ ID NO:2222), FIG. 2224 (SEQ ID NO:2224), FIG. 2226 (SEQ ID NO:2226), FIG. 2228 (SEQ ID NO:2228), FIG. 2230 (SEQ ID NO:2230), FIG. 2232 (SEQ ID NO:2232), FIG. 2234 (SEQ ID NO:2234), FIG. 2236 (SEQ ID NO:2236), FIG. 2238 (SEQ ID NO:2238), FIG. 2240 (SEQ ID NO:2240), FIG. 2242 (SEQ ID NO:2242), FIG. 2244 (SEQ ID NO:2244), FIG. 2246 (SEQ ID NO:2246), FIG. 2248 (SEQ ID NO:2248), FIG. 2250 (SEQ ID NO:2250), FIG. 2252 (SEQ ID NO:2252), FIG. 2254 (SEQ ID NO:2254), FIG. 2256 (SEQ ID NO:2256), FIG. 2258 (SEQ ID NO:2258), FIG. 2260 (SEQ ID NO:2260), FIG. 2262 (SEQ ID NO:2262), FIG. 2264 (SEQ ID NO:2264), FIG. 2266 (SEQ ID NO:2266), FIG. 2268 (SEQ ID NO:2268), FIG. 2270 (SEQ ID NO:2270), FIG. 2272 (SEQ ID NO:2272), FIG. 2274 (SEQ ID NO:2274), FIG. 2276 (SEQ ID NO:2276), FIG. 2278 (SEQ ID NO:2278), FIG. 2280 (SEQ ID NO:2280), FIG. 2282 (SEQ ID NO:2282), FIG. 2284 (SEQ ID NO:2284), FIG. 2286 (SEQ ID NO:2286), FIG. 2288 (SEQ ID NO:2288), FIG. 2290 (SEQ ID NO:2290), FIG. 2292 (SEQ ID NO:2292), FIG. 2294 (SEQ ID NO:2294), FIG. 2296 (SEQ ID NO:2296), FIG. 2298 (SEQ ID NO:2298), FIG. 2301 (SEQ ID NO:2301), FIG. 2303 (SEQ ID NO:2303), FIG. 2305 (SEQ ID NO:2305), FIG. 2307 (SEQ ID NO:2307), FIG. 2310 (SEQ ID NO:2310), FIG. 2312 (SEQ ID NO:2312), FIG. 2314 (SEQ ID NO:2314), FIG. 2316 (SEQ ID NO:2316), FIG. 2319 (SEQ ID NO:2319), FIG. 2321 (SEQ ID NO:2321), FIG. 2323 (SEQ ID NO:2323), FIG. 2325 (SEQ ID NO:2325), FIG. 2327 (SEQ ID NO:2327), FIG. 2329 (SEQ ID NO:2329), FIG. 2331 (SEQ ID NO:2331), FIG. 2333 (SEQ ID NO:2333), FIG. 2335 (SEQ ID NO:2335), FIG. 2337 (SEQ ID NO:2337), FIG. 2339 (SEQ ID NO:2339), FIG. 2341 (SEQ ID NO:2341), FIG. 2343 (SEQ ID NO:2343), FIG. 2345 (SEQ ID NO:2345), FIG. 2347 (SEQ ID NO:2347), FIG. 2349 (SEQ ID NO:2349), FIG. 2351 (SEQ ID NO:2351), FIG. 2353 (SEQ ID NO:2353), FIG. 2355 (SEQ ID NO:2355), FIG. 2357 (SEQ ID NO:2357), FIG. 2359 (SEQ ID NO:2359), FIG. 2361 (SEQ ID NO:2361), FIG. 2363 (SEQ ID NO:2363), FIG. 2365 (SEQ ID NO:2365), FIG. 2367 (SEQ ID NO:2367), FIG. 2369 (SEQ ID NO:2369), FIG. 2371 (SEQ ID NO:2371), FIG. 2373 (SEQ ID NO:2373), FIG. 2375 (SEQ ID NO:2375), FIG. 2378 (SEQ ID NO:2378), FIG. 2380 (SEQ ID NO:2380), FIG. 2383 (SEQ ID NO:2383), FIG. 2386 (SEQ ID NO:2386), FIG. 2388 (SEQ ID NO:2388), FIG. 2391 (SEQ ID NO:2391), FIG. 2393 (SEQ ID NO:2393), FIG. 2396 (SEQ ID NO:2396), FIG. 2398 (SEQ ID NO:2398), FIG. 2402 (SEQ ID NO:2402), FIG. 2404 (SEQ ID NO:2404), FIG. 2408 (SEQ ID NO:2408), FIG. 2410 (SEQ ID NO:2410), FIG. 2412 (SEQ ID NO:2412), FIG. 2415 (SEQ ID NO:2415), FIG. 2418 (SEQ ID NO:2418), FIG. 2420 (SEQ ID NO:2420), FIG. 2422 (SEQ ID NO:2422), FIG. 2424 (SEQ ID NO:2424), FIG. 2426 (SEQ ID NO:2426), FIG. 2430 (SEQ ID NO:2430), FIG. 2432 (SEQ ID NO:2432), FIG. 2434 (SEQ ID NO:2434), FIG. 2436 (SEQ ID NO:2436), FIG. 2438 (SEQ ID NO:2438), FIG. 2440 (SEQ ID NO:2440), or FIG. 2442 (SEQ ID NO:2442).

2. Isolated nucleic acid having at least 80% nucleic acid sequence identity to a nucleotide sequence selected from the group consisting of the nucleotide sequence shown in FIG. 1 (SEQ ID NO:1), FIG. 3 (SEQ ID NO:3), FIG. 5 (SEQ ID NO:5), FIG. 7 (SEQ ID NO:7), FIG. 9 (SEQ ID NO:9), FIG. 11 (SEQ ID NO:11), FIG. 13 (SEQ ID NO:13), FIG. 15 (SEQ ID NO:15), FIG. 17 (SEQ ID NO:17), FIG. 19 (SEQ ID NO:19), FIG. 21 (SEQ ID NO:21), FIG. 23 (SEQ ID NO:23), FIG. 25 (SEQ ID NO:25), FIG. 27 (SEQ ID NO:27), FIG. 29 (SEQ ID NO:29), FIG. 31 (SEQ ID NO:31), FIG. 33 (SEQ ID NO:33), FIG. 35 (SEQ ID NO:35), FIG. 37 (SEQ ID NO:37), FIG. 39 (SEQ ID NO:39), FIG. 41 (SEQ ID NO:41), FIG. 43 (SEQ ID NO:43), FIG. 45 (SEQ ID NO:45), FIG. 47 (SEQ ID NO:47), FIG. 49 (SEQ ID NO:49), FIG. 51 (SEQ ID NO:51), FIG. 53 (SEQ ID NO:53), FIG. 55 (SEQ ID NO:55), FIG. 57 (SEQ ID NO:57), FIG. 59 (SEQ ID NO:59), FIG. 61 (SEQ ID NO:61), FIG. 63 (SEQ ID NO:63), FIG. 65 (SEQ ID NO:65), FIG. 67 (SEQ ID NO:67), FIG. 69 (SEQ ID NO:69), FIG. 71 (SEQ ID NO:71), FIG. 73 (SEQ ID NO:73), FIG. 75 (SEQ ID NO:75), FIG. 77 (SEQ ID NO:77), FIG. 79 (SEQ ID NO:79), FIG. 81 (SEQ ID NO:81), FIG. 83 (SEQ ID NO:83), FIG. 85 (SEQ ID NO:85), FIG. 87 (SEQ ID NO:87), FIG. 89 (SEQ ID NO:89), FIG. 91 (SEQ ID NO:91), FIG. 93 (SEQ ID NO:93), FIG. 95 (SEQ ID NO:95), FIG. 97 (SEQ ID NO:97), FIG. 99 (SEQ ID NO:99), FIG. 101 (SEQ ID NO:101), FIG. 103 (SEQ ID NO:103), FIG. 105 (SEQ ID NO:105), FIG. 107 (SEQ ID NO:107), FIG. 109 (SEQ ID NO:109), FIG. 111 (SEQ ID NO:11), FIG. 113 (SEQ ID NO:113), FIG. 115 (SEQ ID NO:115), FIG. 117 (SEQ ID NO:117), FIG. 119 (SEQ ID NO:119), FIG. 120 (SEQ ID NO:120), FIG. 122 (SEQ ID NO:122), FIG. 124 (SEQ ID NO:124), FIG. 126 (SEQ ID NO:126), FIG. 128 (SEQ ID NO:128), FIG. 130 (SEQ ID NO:130), FIG. 132 (SEQ ID NO:132), FIG. 134 (SEQ ID NO:134), FIG. 136 (SEQ ID NO:136), FIG. 138 (SEQ ID NO:138), FIG. 140 (SEQ ID NO:140), FIG. 142 (SEQ ID NO:142), FIG. 144 (SEQ ID NO:144), FIG. 146 (SEQ ID NO:146), FIG. 148 (SEQ ID NO:148), FIG. 150 (SEQ ID NO:150), FIG. 152 (SEQ ID NO:152), FIG. 154 (SEQ ID NO:154), FIG. 156 (SEQ ID NO:156), FIG. 158 (SEQ ID NO:158), FIG. 160 (SEQ ID NO:160), FIG. 162 (SEQ ID NO:162), FIG. 164 (SEQ ID NO:164), FIG. 166 (SEQ ID NO:166), FIG. 168 (SEQ ID NO:168), FIG. 170 (SEQ ID NO:170), FIG. 172 (SEQ ID NO:172), FIG. 174 (SEQ ID NO:174), FIG. 176 (SEQ ID NO:176), FIG. 178 (SEQ ID NO:178), FIG. 180 (SEQ ID NO:180), FIG. 182 (SEQ ID NO:182), FIG. 184 (SEQ ID NO:184), FIG. 186 (SEQ ID NO:186), FIG. 188 (SEQ ID NO:188), FIG. 190 (SEQ ID NO:190), FIG. 192 (SEQ ID NO:192), FIG. 194 (SEQ ID NO:194), FIG. 196 (SEQ ID NO:196), FIG. 198 (SEQ ID NO:198), FIG. 200 (SEQ ID NO:200), FIG. 202 (SEQ ID NO:202), FIG. 204 (SEQ ID NO:204), FIG. 206 (SEQ ID NO:206), FIG. 208 (SEQ ID NO:208), FIG. 210 (SEQ ID NO:210), FIG. 212 (SEQ ID NO:212), FIG. 214 (SEQ ID NO:214), FIG. 216 (SEQ ID NO:216), FIG. 218 (SEQ ID NO:218), FIG. 220 (SEQ ID NO:220), FIG. 222 (SEQ ID NO:222), FIG. 224 (SEQ ID NO:224), FIG. 226 (SEQ ID NO:226), FIG. 228 (SEQ ID NO:228), FIG. 230 (SEQ ID NO:231), FIG. 232 (SEQ ID NO:232), FIG. 234 (SEQ ID NO:234), FIG. 236 (SEQ ID NO:236), FIG. 238 (SEQ ID NO:238), FIG. 240 (SEQ ID NO:240), FIG. 242 (SEQ ID NO:242), FIG. 244 (SEQ ID NO:244), FIG. 246 (SEQ ID NO:246), FIG. 248 (SEQ ID NO:248), FIG. 250 (SEQ ID NO:250), FIG. 252 (SEQ ID NO:252), FIG. 253 (SEQ ID NO:253), FIG. 255 (SEQ ID NO:255), FIG. 257 (SEQ ID NO:257), FIG. 259 (SEQ ID NO:259), FIG. 261 (SEQ ID NO:261), FIG. 263 (SEQ ID NO:263), FIG. 265 (SEQ ID NO:265), FIG. 267 (SEQ ID NO:267), FIG. 269 (SEQ ID NO:269), FIG. 271 (SEQ ID NO:271), FIG. 273 (SEQ ID NO:273), FIG. 275 (SEQ ID NO:275), FIG. 277 (SEQ ID NO:277), FIG. 279 (SEQ ID NO:279), FIG. 281 (SEQ ID NO:281), FIG. 283 (SEQ ID NO:283), FIG. 285 (SEQ ID NO:285), FIG. 287 (SEQ ID NO:287), FIG. 289 (SEQ ID NO:289), FIG. 291 (SEQ ID NO:291), FIG. 293 (SEQ ID NO:293), FIG. 295 (SEQ ID NO:295), FIG. 297 (SEQ ID NO:297), FIG. 299 (SEQ ID NO:299), FIG. 301 (SEQ ID NO:301), FIG. 303 (SEQ ID NO:303), FIG. 305 (SEQ ID NO:305), FIG. 307 (SEQ ID NO:307), FIG. 309 (SEQ ID NO:309), FIG. 311 (SEQ ID NO:311), FIG. 313 (SEQ ID NO:313), FIG. 315 (SEQ ID NO:315), FIG. 317 (SEQ ID NO:317), FIG. 319 (SEQ ID NO:319), FIG. 321 (SEQ ID NO:321), FIG. 323 (SEQ ID NO:323), FIG. 325 (SEQ ID NO:325), FIG. 327 (SEQ ID NO:327), FIG. 329 (SEQ ID NO:329), FIG. 331 (SEQ ID NO:331), FIG. 333 (SEQ ID NO:333), FIG. 335 (SEQ ID NO:335), FIG. 337 (SEQ ID NO:337), FIG. 339 (SEQ ID NO:339), FIG. 341 (SEQ ID NO:341), FIG. 343 (SEQ ID NO:343), FIG. 345 (SEQ ID NO:345), FIG. 347 (SEQ ID NO:347), FIG. 349 (SEQ ID NO:349), FIG. 351 (SEQ ID NO:351), FIG. 353 (SEQ ID NO:353), FIG. 355 (SEQ ID NO:355), FIG. 357 (SEQ ID NO:357), FIG. 359 (SEQ ID NO:359), FIG. 361 (SEQ ID NO:361), FIG. 363 (SEQ ID NO:363), FIG. 365 (SEQ ID NO:365), FIG. 367 (SEQ ID NO:367), FIG. 369 (SEQ ID NO:369), FIG. 371 (SEQ ID NO:371), FIG. 373 (SEQ ID NO:373), FIG. 375 (SEQ ID NO:375), FIG. 377 (SEQ ID NO:377), FIG. 379 (SEQ ID NO:379), FIG. 381 (SEQ ID NO:381), FIG. 383 (SEQ ID NO:383), FIG. 385 (SEQ ID NO:385), FIG. 387 (SEQ ID NO:387), FIG. 389 (SEQ ID NO:389), FIG. 391 (SEQ ID NO:391), FIG. 393 (SEQ ID NO:393), FIG. 395 (SEQ ID NO:395), FIG. 397 (SEQ ID NO:397), FIG. 399 (SEQ ID NO:399), FIG. 401 (SEQ ID NO:401), FIG. 403 (SEQ ID NO:403), FIG. 405 (SEQ ID NO:405), FIG. 407 (SEQ ID NO:407), FIG. 409 (SEQ ID NO:409), FIG. 411 (SEQ ID NO:411), FIG. 413 (SEQ ID NO:413), FIG. 415 (SEQ ID NO:415), FIG. 417 (SEQ ID NO:417), FIG. 419 (SEQ ID NO:419), FIG. 421 (SEQ ID NO:421), FIG. 423 (SEQ ID NO:423), FIG. 425 (SEQ ID NO:425), FIG. 427 (SEQ ID NO:427), FIG. 429 (SEQ ID NO:429), FIG. 431 (SEQ ID NO:431), FIG. 433 (SEQ ID NO:433), FIG. 435 (SEQ ID NO:435), FIG. 437 (SEQ ID NO:437), FIG. 439 (SEQ ID NO:439), FIG. 441 (SEQ ID NO:441), FIG. 443 (SEQ ID NO:443), FIG. 445 (SEQ ID NO:445), FIG. 447 (SEQ ID NO:447), FIG. 449 (SEQ ID NO:449), FIG. 451 (SEQ ID NO:451), FIG. 453 (SEQ ID NO:453), FIG. 455 (SEQ ID NO:455), FIG. 457 (SEQ ID NO:457), FIG. 459 (SEQ ID NO:459), FIG. 461 (SEQ ID NO:461), FIG. 463 (SEQ ID NO:463), FIG. 465 (SEQ ID NO:465), FIG. 467 (SEQ ID NO:467), FIG. 469 (SEQ ID NO:469), FIG. 471 (SEQ ID NO:471), FIG. 473 (SEQ ID NO:473), FIG. 475 (SEQ ID NO:475), FIG. 477 (SEQ ID NO:477), FIG. 479 (SEQ ID NO:479), FIG. 481 (SEQ ID NO:481), FIG. 483 (SEQ ID NO:483), FIG. 485 (SEQ ID NO:485), FIG. 487 (SEQ ID NO:487), FIG. 489 (SEQ ID NO:489), FIG. 491 (SEQ ID NO:491), FIG. 493 (SEQ ID NO:493), FIG. 495 (SEQ ID NO:495), FIG. 497 (SEQ ID NO:497), FIG. 499 (SEQ ID NO:499), FIG. 501 (SEQ ID NO:501), FIG. 503 (SEQ ID NO:503), FIG. 505 (SEQ ID NO:505), FIG. 507 (SEQ ID NO:507), FIG. 509 (SEQ ID NO:509), FIG. 511 (SEQ ID NO:511), FIG. 513 (SEQ ID NO:513), FIG. 515 (SEQ ID NO:515), FIG. 517 (SEQ ID NO:517), FIG. 519 (SEQ ID NO:519), FIG. 521 (SEQ ID NO:521), FIG. 523 (SEQ ID NO:523), FIG. 525 (SEQ ID NO:525), FIG. 527 (SEQ ID NO:527), FIG. 529 (SEQ ID NO:529), FIG. 531 (SEQ ID NO:531), FIG. 533 (SEQ ID NO:533), FIG. 535 (SEQ ID NO:535), FIG. 537 (SEQ ID NO:537), FIG. 539 (SEQ ID NO:539), FIG. 541 (SEQ ID NO:541), FIG. 543 (SEQ ID NO:543), FIG. 545 (SEQ ID NO:545), FIG. 547 (SEQ ID NO:547), FIG. 548 (SEQ ID NO:548), FIG. 550 (SEQ ID NO:550), FIG. 552 (SEQ ID NO:552), FIG. 554 (SEQ ID NO:554), FIG. 556 (SEQ ID NO:556), FIG. 558 (SEQ ID NO:558), FIG. 560 (SEQ ID NO:560), FIG. 562 (SEQ ID NO:562), FIG. 564 (SEQ ID NO:564), FIG. 566 (SEQ ID NO:566), FIG. 568 (SEQ ID NO:568), FIG. 570 (SEQ ID NO:570), FIG. 572 (SEQ ID NO:572), FIG. 574 (SEQ ID NO:574), FIG. 576 (SEQ ID NO:576), FIG. 578 (SEQ ID NO:578), FIG. 580 (SEQ ID NO:580), FIG. 582 (SEQ ID NO:582), FIG. 584 (SEQ ID NO:584), FIG. 586 (SEQ ID NO:586), FIG. 588 (SEQ ID NO:588), FIG. 590 (SEQ ID NO:590), FIG. 592 (SEQ ID NO:592), FIG. 594 (SEQ ID NO:594), FIG. 596 (SEQ ID NO:596), FIG. 598 (SEQ ID NO:598), FIG. 600 (SEQ ID NO:600), FIG. 602 (SEQ ID NO:602), FIG. 604 (SEQ ID NO:604), FIG. 606 (SEQ ID NO:606), FIG. 608 (SEQ ID NO:608), FIG. 610 (SEQ ID NO:610), FIG. 612 (SEQ ID NO:612), FIG. 614 (SEQ ID NO:614), FIG. 616 (SEQ ID NO:616), FIG. 618 (SEQ ID NO:618), FIG. 620 (SEQ ID NO:620), FIG. 622 (SEQ ID NO:622), FIG. 624 (SEQ ID NO:624), FIG. 626 (SEQ ID NO:626), FIG. 628 (SEQ ID NO:628), FIG. 630 (SEQ ID NO:630), FIG. 632 (SEQ ID NO:632), FIG. 634 (SEQ ID NO:634), FIG. 636 (SEQ ID NO:636), FIG. 638 (SEQ ID NO:638), FIG. 640 (SEQ ID NO:640), FIG. 642 (SEQ ID NO:642), FIG. 644 (SEQ ID NO:644), FIG. 646 (SEQ ID NO:646), FIG. 648 (SEQ ID NO:648), FIG. 650 (SEQ ID NO:650), FIG. 652 (SEQ ID NO:652), FIG. 654 (SEQ ID NO:654), FIG. 656 (SEQ ID NO:656), FIG. 658 (SEQ ID NO:658), FIG. 660 (SEQ ID NO:660), FIG. 662 (SEQ ID NO:662), FIG. 664 (SEQ ID NO:664), FIG. 666 (SEQ ID NO:666), FIG. 668 (SEQ ID NO:668), FIG. 670 (SEQ ID NO:670), FIG. 672 (SEQ ID NO:672), FIG. 674 (SEQ ID NO:674), FIG. 676 (SEQ ID NO:676), FIG. 678 (SEQ ID NO:678), FIG. 680 (SEQ ID NO:680), FIG. 682 (SEQ ID NO:682), FIG. 684 (SEQ ID NO:684), FIG. 686 (SEQ ID NO:686), FIG. 688 (SEQ ID NO:688), FIG. 690 (SEQ ID NO:690), FIG. 692 (SEQ ID NO:692), FIG. 694 (SEQ ID NO:694), FIG. 696 (SEQ ID NO:696), FIG. 698 (SEQ ID NO:698), FIG. 700 (SEQ ID NO:700), FIG. 702 (SEQ ID NO:702), FIG. 704 (SEQ ID NO:704), FIG. 706 (SEQ ID NO:706), FIG. 708 (SEQ ID NO:708), FIG. 710 (SEQ ID NO:710), FIG. 712 (SEQ ID NO:712), FIG. 714 (SEQ ID NO:714), FIG. 716 (SEQ ID NO:716), FIG. 718 (SEQ ID NO:718), FIG. 720 (SEQ ID NO:720), FIG. 722 (SEQ ID NO:722), FIG. 724 (SEQ ID NO:724), FIG. 726 (SEQ ID NO:726), FIG. 728 (SEQ ID NO:728), FIG. 730 (SEQ ID NO:730), FIG. 732 (SEQ ID NO:732), FIG. 734 (SEQ ID NO:734), FIG. 736 (SEQ ID NO:736), FIG. 738 (SEQ ID NO:738), FIG. 740 (SEQ ID NO:740), FIG. 742 (SEQ ID NO:742), FIG. 744 (SEQ ID NO:744), FIG. 746 (SEQ ID NO:746), FIG. 748 (SEQ ID NO:748), FIG. 750 (SEQ ID NO:750), FIG. 752 (SEQ ID NO:752), FIG. 754 (SEQ ID NO:754), FIG. 756 (SEQ ID NO:756), FIG. 758 (SEQ ID NO:758), FIG. 760 (SEQ ID NO:760), FIG. 762 (SEQ ID NO:762), FIG. 764 (SEQ ID NO:764), FIG. 766 (SEQ ID NO:766), FIG. 768 (SEQ ID NO:768), FIG. 770 (SEQ ID NO:770), FIG. 772 (SEQ ID NO:772), FIG. 774 (SEQ ID NO:774), FIG. 776 (SEQ ID NO:776), FIG. 778 (SEQ ID NO:778), FIG. 780 (SEQ ID NO:780), FIG. 782 (SEQ ID NO:782), FIG. 784 (SEQ ID NO:784), FIG. 786 (SEQ ID NO:786), FIG. 788 (SEQ ID NO:788), FIG. 790 (SEQ ID NO:790), FIG. 792 (SEQ ID NO:792), FIG. 794 (SEQ ID NO:794), FIG. 796 (SEQ ID NO:796), FIG. 798 (SEQ ID NO:798), FIG. 800 (SEQ ID NO:800), FIG. 802 (SEQ ID NO:802), FIG. 804 (SEQ ID NO:804), FIG. 806 (SEQ ID NO:806), FIG. 808 (SEQ ID NO:808), FIG. 810A-B (SEQ ID NO:810), FIG. 812 (SEQ ID NO:812), FIG. 814 (SEQ ID NO:814), FIG. 816 (SEQ ID NO:816), FIG. 818 (SEQ ID NO:818), FIG. 820 (SEQ ID NO:820), FIG. 822 (SEQ ID NO:822), FIG. 824 (SEQ ID NO:824), FIG. 826 (SEQ ID NO:826), FIG. 828 (SEQ ID NO:828), FIG. 830 (SEQ ID NO:830), FIG. 832 (SEQ ID NO:832), FIG. 834 (SEQ ID NO:834), FIG. 836 (SEQ ID NO:836), FIG. 838 (SEQ ID NO:838), FIG. 840 (SEQ ID NO:840), FIG. 842 (SEQ ID NO:842), FIG. 844 (SEQ ID NO:844), FIG. 846 (SEQ ID NO:846), FIG. 848 (SEQ ID NO:848), FIG. 850 (SEQ ID NO:850), FIG. 852 (SEQ ID NO:852), FIG. 854 (SEQ ID NO:854), FIG. 856 (SEQ ID NO:856), FIG. 857A-B (SEQ ID NO:857), FIG. 859A-B (SEQ ID NO:859), FIG. 861 (SEQ ID NO:861), FIG. 863 (SEQ ID NO:863), FIG. 865 (SEQ ID NO:865), FIG. 867 (SEQ ID NO:867), FIG. 869 (SEQ ID NO:869), FIG. 871 (SEQ ID NO:871), FIG. 873 (SEQ ID NO:873), FIG. 875 (SEQ ID NO:875), FIG. 877 (SEQ ID NO:877), FIG. 879 (SEQ ID NO:879), FIG. 881A-B (SEQ ID NO:881), FIG. 883 (SEQ ID NO:883), FIG. 885 (SEQ ID NO:885), FIG. 887 (SEQ ID NO:887), FIG. 889 (SEQ ID NO:889), FIG. 891 (SEQ ID NO:891), FIG. 893 (SEQ ID NO:893), FIG. 895 (SEQ ID NO:895), FIG. 897 (SEQ ID NO:897), FIG. 899 (SEQ ID NO:899), FIG. 901 (SEQ ID NO:901), FIG. 903 (SEQ ID NO:903), FIG. 905A-C (SEQ ID NO:905), FIG. 907 (SEQ ID NO:907), FIG. 909 (SEQ ID NO:909), FIG. 911 (SEQ ID NO:911), FIG. 913 (SEQ ID NO:913), FIG. 915 (SEQ ID NO:915), FIG. 917 (SEQ ID NO:917), FIG. 919A-B (SEQ ID NO:919), FIG. 921 (SEQ ID NO:921), FIG. 923 (SEQ ID NO:923), FIG. 925 (SEQ ID NO:925), FIG. 927 (SEQ ID NO:927), FIG. 929 (SEQ ID NO:929), FIG. 931 (SEQ ID NO:931), FIG. 933A-B (SEQ ID NO:933), FIG. 935 (SEQ ID NO:935), FIG. 937A-B (SEQ ID NO:937), FIG. 939A-B (SEQ ID NO:939), FIG. 941A-B (SEQ ID NO:941), FIG. 942A-B (SEQ ID NO:942), FIG. 944 (SEQ ID NO:944), FIG. 946 (SEQ ID NO:946), FIG. 948A-C (SEQ ID NO:948), FIG. 950 (SEQ ID NO:950), FIG. 952 (SEQ ID NO:952), FIG. 954A-B (SEQ ID NO:954), FIG. 956A-B (SEQ ID NO:956), FIG. 957A-B (SEQ ID NO:957), FIG. 959 (SEQ ID NO:959), FIG. 961 (SEQ ID NO:961), FIG. 962 (SEQ ID NO:962), FIG. 964 (SEQ ID NO:964), FIG. 966 (SEQ ID NO:966), FIG. 967 (SEQ ID NO:967), FIG. 969A-B (SEQ ID NO:969), FIG. 971A-B (SEQ ID NO:971), FIG. 973 (SEQ ID NO:973), FIG. 975 (SEQ ID NO:975), FIG. 977A-B (SEQ ID NO:977), FIG. 979 (SEQ ID NO:979), FIG. 981 (SEQ ID NO:981), FIG. 982 (SEQ ID NO:982), FIG. 984 (SEQ ID NO:984), FIG. 986 (SEQ ID NO:986), FIG. 988 (SEQ ID NO:988), FIG. 989A-D (SEQ ID NO:989), FIG. 991 (SEQ ID NO:991), FIG. 993A-C (SEQ ID NO:993), FIG. 995 (SEQ ID NO:995), FIG. 997 (SEQ ID NO:997), FIG. 999A-B (SEQ ID NO:999), FIG. 1001 (SEQ ID NO:1001), FIG. 1003A-B (SEQ ID NO:1003), FIG. 1004A-B (SEQ ID NO:1004), FIG. 1005A-B (SEQ ID NO:1005), FIG. 1006A-B (SEQ ID NO:1006), FIG. 1008 (SEQ ID NO:1008), FIG. 1010A-B (SEQ ID NO:1010), FIG. 1012 (SEQ ID NO:1012), FIG. 1014 (SEQ ID NO:1014), FIG. 1016A-B (SEQ ID NO:1016), FIG. 1018 (SEQ ID NO:1018), FIG. 1020A-B (SEQ ID NO:1020), FIG. 1022 (SEQ ID NO:1022), FIG. 1024A-C (SEQ ID NO:1024), FIG. 1026A-B (SEQ ID NO:1026), FIG. 1027 (SEQ ID NO:1027), FIG. 1028A-B (SEQ ID NO:1028), FIG. 1029 (SEQ ID NO:1029), FIG. 1031 (SEQ ID NO:1031), FIG. 1032 (SEQ ID NO:1032), FIG. 1034A-C (SEQ ID NO:1034), FIG. 1036A-B (SEQ ID NO:1036), FIG. A-B 1038 (SEQ ID NO:1038), FIG. 1040 (SEQ ID NO:1040), FIG. 1042A-B (SEQ ID NO:1042), FIG. 1044 A-B (SEQ ID NO:1044), FIG. 1045 (SEQ ID NO:1045), FIG. 1047 (SEQ ID NO:1047), FIG. 1049 (SEQ ID NO:1049), FIG. 1051 (SEQ ID NO:1051), FIG. 1052A-B (SEQ ID NO:1052), FIG. 1054 (SEQ ID NO:1054), FIG. 1056 (SEQ ID NO:1056), FIG. 1058 (SEQ ID NO:1058), FIG. 1059 (SEQ ID NO:1059), FIG. 1061 (SEQ ID NO:1061), FIG. 1063 (SEQ ID NO:1063), FIG. 1065 (SEQ ID NO:1065), FIG. 1067 (SEQ ID NO:1067), FIG. 1069A-B (SEQ ID NO:1069), FIG. 1071 (SEQ ID NO:1071), FIG. 1073A-B (SEQ ID NO:1073), FIG. 1075 (SEQ ID NO:1075), FIG. 1077 (SEQ ID NO:1077), FIG. 1079 (SEQ ID NO:1079), FIG. 1081 (SEQ ID NO:1081), FIG. 1083A-B (SEQ ID NO:1083), FIG. 1085 (SEQ ID NO:1085), FIG. 1087 (SEQ ID NO:1087), FIG. 1089 (SEQ ID NO:1089), FIG. 1091 (SEQ ID NO:1091), FIG. 1093A-B (SEQ ID NO:1093), FIG. 1095 (SEQ ID NO:1095), FIG. 1097 (SEQ ID NO:1097), FIG. 1099 (SEQ ID NO:1099), FIG. 1100 (SEQ ID NO:100), FIG. 1102A-B (SEQ ID NO:1102), FIG. 1104A-B (SEQ ID NO:1104), FIG. 1106 (SEQ ID NO:1106), FIG. 1108 (SEQ ID NO:1108), FIG. 1110 (SEQ ID NO:1110), FIG. 1112 (SEQ ID NO:1112), FIG. 1114A-B (SEQ ID NO:1114), FIG. 1115 (SEQ ID NO:1115), FIG. 1117A-B (SEQ ID NO:1117), FIG. 1119 (SEQ ID NO:1119), FIG. 1121 (SEQ ID NO:1121), FIG. 1122 (SEQ ID NO:1122), FIG. 1124 (SEQ ID NO:1124), FIG. 1126 (SEQ ID NO:1126), FIG. 1127 (SEQ ID NO:1127), FIG. 1129 (SEQ ID NO:1129), FIG. 1131 (SEQ ID NO:1131), FIG. 1133 (SEQ ID NO:1133), FIG. 1135 (SEQ ID NO:1135), FIG. 1137A-B (SEQ ID NO:1137), FIG. 1139 (SEQ ID NO:1139), FIG. 1140 (SEQ ID NO:1140), FIG. 1141 (SEQ ID NO:1141), FIG. 1143A-C (SEQ ID NO:1143), FIG. 1145A-B (SEQ ID NO:1145), FIG. 1147 (SEQ ID NO:1147), FIG. 1149 (SEQ ID NO:1149), FIG. 1151 (SEQ ID NO:1151), FIG. 1153 (SEQ ID NO:1153), FIG. 1155A-B (SEQ ID NO:1155), FIG. 1157 (SEQ ID NO:1157), FIG. 1159 (SEQ ID NO:1159), FIG. 1161 (SEQ ID NO:1161), FIG. 1163 (SEQ ID NO:1163), FIG. 1165 (SEQ ID NO:1165), FIG. 1167 (SEQ ID NO:1167), FIG. 1169 (SEQ ID NO:1169), FIG. 1171 (SEQ ID NO:1171), FIG. 1173 (SEQ ID NO:1173), FIG. 1175 (SEQ ID NO:1175), FIG. 1177 (SEQ ID NO:1177), FIG. 1179 (SEQ ID NO:1179), FIG. 1181 (SEQ ID NO:1181), FIG. 1183 (SEQ ID NO:1183), FIG. 1185 (SEQ ID NO:1185), FIG. 1187 (SEQ ID NO:), FIG. 1189 (SEQ ID NO:1189), FIG. 1191 (SEQ ID NO:1191), FIG. 1193 (SEQ ID NO:1193), FIG. 1195 (SEQ ID NO:1195), FIG. 1197 (SEQ ID NO:1197), FIG. 1199 (SEQ ID NO:1199), FIG. 1201 (SEQ ID NO:1201), FIG. 1203 (SEQ ID NO:1203), FIG. 1205 (SEQ ID NO:1205), FIG. 1207 (SEQ ID NO:1207), FIG. 1209 (SEQ ID NO:1209), FIG. 1211 (SEQ ID NO:1211), FIG. 1213 (SEQ ID NO:1213), FIG. 1215 (SEQ ID NO:1215), FIG. 1217 (SEQ ID NO:1217), FIG. 1219 (SEQ ID NO:1219), FIG. 1221 (SEQ ID NO:1221), FIG. 1223A-B (SEQ ID NO:1223), FIG. 1225 (SEQ ID NO:1225), FIG. 1227 (SEQ ID NO:1227), FIG. 1229 (SEQ ID NO:1229), FIG. 1231 (SEQ ID NO:1231), FIG. 1233 (SEQ ID NO:1233), FIG. 1235 (SEQ ID NO:1235), FIG. 1237 (SEQ ID NO:1237), FIG. 1239 (SEQ ID NO:1239), FIG. 1241 (SEQ ID NO:1241), FIG. 1243 (SEQ ID NO:1243), FIG. 1245 (SEQ ID NO:1245), FIG. 1247 (SEQ ID NO:1247), FIG. 1249 (SEQ ID NO:1249), FIG. 1251 (SEQ ID NO:1251), FIG. 1253 (SEQ ID NO:1253), FIG. 1255 (SEQ ID NO:1255), FIG. 1257 (SEQ ID NO:1257), FIG. 1259 (SEQ ID NO:1259), FIG. 1261 (SEQ ID NO:1261), FIG. 1263 (SEQ ID NO:1263), FIG. 1265 (SEQ ID NO:1265), FIG. 1267 (SEQ ID NO:1267), FIG. 1269 (SEQ ID NO:1269), FIG. 1271 (SEQ ID NO:1271), FIG. 1273 (SEQ ID NO:1273), FIG. 1275 (SEQ ID NO:1275), FIG. 1277A-C (SEQ ID NO:1277), FIG. 1279 (SEQ ID NO:1279), FIG. 1281 (SEQ ID NO:1281), FIG. 1283A-B (SEQ ID NO:1283), FIG. 1285 (SEQ ID NO:1285), FIG. 1287A-B (SEQ ID NO:1287), FIG. 1289 (SEQ ID NO:1289), FIG. 1291 (SEQ ID NO:1291), FIG. 1293 (SEQ ID NO:1293), FIG. 1295 (SEQ ID NO:1295), FIG. 1297A-B (SEQ ID NO:1297), FIG. 1299 (SEQ ID NO:1299), FIG. 1301A-B (SEQ ID NO:1301), FIG. 1303 (SEQ ID NO:1303), FIG. 1305 (SEQ ID NO:1305), FIG. 1307 (SEQ ID NO:1307), FIG. 1309 (SEQ ID NO:1309), FIG. 1311 (SEQ ID NO:1311), FIG. 1313 (SEQ ID NO:1313), FIG. 1315 (SEQ ID NO:1315), FIG. 1317 (SEQ ID NO:1317), FIG. 1319 (SEQ ID NO:1319), FIG. 1321 A-B (SEQ ID NO:1321), FIG. 1323 (SEQ ID NO:1323), FIG. 1325 (SEQ ID NO:1325), FIG. 1327 (SEQ ID NO:1327), FIG. 1329 (SEQ ID NO:1329), FIG. 1331 (SEQ ID NO:1331), FIG. 1333 (SEQ ID NO:1333), FIG. 1335 (SEQ ID NO:1335), FIG. 1337 (SEQ ID NO:1337), FIG. 1339 (SEQ ID NO:1339), FIG. 1341 (SEQ ID NO:1341), FIG. 1343 (SEQ ID NO:1343), FIG. 1345 (SEQ ID NO:1345), FIG. 1347 (SEQ ID NO:1347), FIG. 1349 A-B (SEQ ID NO:1349), FIG. 1351 (SEQ ID NO:1351), FIG. 1353 (SEQ ID NO:1353), FIG. 1355 A-B (SEQ ID NO:1355), FIG. 1357 (SEQ ID NO:1357), FIG. 1359 (SEQ ID NO:1359), FIG. 1360 (SEQ ID NO:1360), FIG. 1362 (SEQ ID NO:1362), FIG. 1364 (SEQ ID NO:1364), FIG. 1366 (SEQ ID NO:1366), FIG. 1368 (SEQ ID NO:1368), FIG. 1370 (SEQ ID NO:1370), FIG. 1372 (SEQ ID NO:1372), FIG. 1374 (SEQ ID NO:1374), FIG. 1376 (SEQ ID NO:1376), FIG. 1378 (SEQ ID NO:1378), FIG. 1380 A-B (SEQ ID NO:1380), FIG. 1382 (SEQ ID NO:1382), FIG. 1384 (SEQ ID NO:1384), FIG. 1386 (SEQ ID NO:1386), FIG. 1388 (SEQ ID NO:1388), FIG. 1390 A-B (SEQ ID NO:1390), FIG. 1392 (SEQ ID NO:1392), FIG. 1394 (SEQ ID NO:1394), FIG. 1396 (SEQ ID NO:1396), FIG. 1398 A-B (SEQ ID NO:1398), FIG. 1400 (SEQ ID NO:1400), FIG. 1402 (SEQ ID NO:1402), FIG. 1404 (SEQ ID NO:1404), FIG. 1406 (SEQ ID NO:1406), FIG. 1408 (SEQ ID NO:1408), FIG. 1410 (SEQ ID NO:1410), FIG. 1412 (SEQ ID NO:1412), FIG. 1414 (SEQ ID NO:1414), FIG. 1416 (SEQ ID NO:1416), FIG. 1418 (SEQ ID NO:1418), FIG. 1420 (SEQ ID NO:1420), FIG. 1422 (SEQ ID NO:1422), FIG. 1424 (SEQ ID NO:1424), FIG. 1426 (SEQ ID NO:1426), FIG. 1428 (SEQ ID NO:1428), FIG. 1430 (SEQ ID NO:1430), FIG. 1432 A-B (SEQ ID NO:1432), FIG. 1434 (SEQ ID NO:1434), FIG. 1436 A-B (SEQ ID NO:1436), FIG. 1438 (SEQ ID NO:1438), FIG. 1440 (SEQ ID NO:1440), FIG. 1442 A-B (SEQ ID NO:1442), FIG. 1444 A-B (SEQ ID NO:1444), FIG. 1446 (SEQ ID NO:1446), FIG. 1448 (SEQ ID NO:1448), FIG. 1450 (SEQ ID NO:1450), FIG. 1452 (SEQ ID NO:1452), FIG. 1454 (SEQ ID NO:1454), FIG. 1456 (SEQ ID NO:1456), FIG. 1458 (SEQ ID NO:1458), FIG. 1460 (SEQ ID NO:1460), FIG. 1462 (SEQ ID NO:1462), FIG. 1464 (SEQ ID NO:1464), FIG. 1466 (SEQ ID NO:1466), FIG. 1468 (SEQ ID NO:1468), FIG. 1470 (SEQ ID NO:1470), FIG. 1472 (SEQ ID NO:1472), FIG. 1474 (SEQ ID NO:1474), FIG. 1476 (SEQ ID NO:1476), FIG. 1478 (SEQ ID NO:1478), FIG. 1480 (SEQ ID NO:1480), FIG. 1482 (SEQ ID NO:1482), FIG. 1484 (SEQ ID NO:1484), FIG. 1486 (SEQ ID NO:1486), FIG. 1488A-B (SEQ ID NO:1488), FIG. 1490 (SEQ ID NO:1490), FIG. 1492 (SEQ ID NO:1492), FIG. 1494 (SEQ ID NO:1494), FIG. 1496 (SEQ ID NO:1496), FIG. 1498 (SEQ ID NO:1498), FIG. 1500 (SEQ ID NO:1500), FIG. 1502 (SEQ ID NO:1502), FIG. 1504 (SEQ ID NO:1504), FIG. 1506 (SEQ ID NO:1506), FIG. 1508 (SEQ ID NO:1508), FIG. 1510 (SEQ ID NO:1510), FIG. 1512 (SEQ ID NO:1512), FIG. 1514 (SEQ ID NO:1514), FIG. 1516 (SEQ ID NO:1516), FIG. 1518 (SEQ ID NO:1518), FIG. 1520 (SEQ ID NO:1520), FIG. 1522 (SEQ ID NO:1522), FIG. 1524 (SEQ ID NO:1524), FIG. 1526 (SEQ ID NO:1526), FIG. 1528 (SEQ ID NO:1528), FIG. 1530 (SEQ ID NO:1530), FIG. 1532 (SEQ ID NO:1532), FIG. 1534 (SEQ ID NO:1534), FIG. 1536 (SEQ ID NO:1536), FIG. 1538 (SEQ ID NO:1538), FIG. 1540 (SEQ ID NO:1540), FIG. 1542 (SEQ ID NO:1542), FIG. 1544 (SEQ ID NO:1544), FIG. 1546 (SEQ ID NO:1546), FIG. 1548 (SEQ ID NO:1548), FIG. 1550 (SEQ ID NO:1550), FIG. 1552 (SEQ ID NO:1552), FIG. 1554 (SEQ ID NO:1554), FIG. 1556 (SEQ ID NO:1556), FIG. 1558 A-B (SEQ ID NO:1558), FIG. 1560 (SEQ ID NO:1560), FIG. 1562 (SEQ ID NO:1562), FIG. 1564 (SEQ ID NO:1564), FIG. 1566 (SEQ ID NO:1566), FIG. 1568 (SEQ ID NO:1568), FIG. 1570 A-B (SEQ ID NO:1570), FIG. 1572A-C (SEQ ID NO:1572), FIG. 1574 (SEQ ID NO:1574), FIG. 1576 (SEQ ID NO:1576), FIG. 1577 (SEQ ID NO:1577), FIG. 1579 (SEQ ID NO:1579), FIG. 1580 (SEQ ID NO:1580), FIG. 1582 A-B (SEQ ID NO:1582), FIG. 1584 (SEQ ID NO:1584), FIG. 1586 (SEQ ID NO:1586), FIG. 1588 A-B (SEQ ID NO:1588), FIG. 1590 (SEQ ID NO:1590), FIG. 1591 (SEQ ID NO:1591), FIG. 1593 (SEQ ID NO:1593), FIG. 1595 (SEQ ID NO:1595), FIG. 1597 (SEQ ID NO:1597), FIG. 1599A-D (SEQ ID NO:1599), FIG. 1601A-E (SEQ ID NO:1601), FIG. 1603 A-B (SEQ ID NO:1603), FIG. 1605 A-B (SEQ ID NO:1605), FIG. 1607 (SEQ ID NO:1607), FIG. 1608 (SEQ ID NO:1608), FIG. 1610 (SEQ ID NO:1610), FIG. 1612 (SEQ ID NO:1612), FIG. 1613 A-B (SEQ ID NO:1613), FIG. 1615 (SEQ ID NO:1615), FIG. 1616 (SEQ ID NO:1616), FIG. 1618 (SEQ ID NO:1618), FIG. 1620 A-B (SEQ ID NO:1620), FIG. 1622 (SEQ ID NO:1622), FIG. 1624 (SEQ ID NO:1624), FIG. 1625 (SEQ ID NO:1625), FIG. 1627 (SEQ ID NO:1627), FIG. 1629 (SEQ ID NO:1629), FIG. 1631 (SEQ ID NO:1631), FIG. 1633 (SEQ ID NO:1633), FIG. 1634 (SEQ ID NO:1634), FIG. 1635 (SEQ ID NO:1635), FIG. 1637 (SEQ ID NO:1637), FIG. 1638 (SEQ ID NO:1638), FIG. 1640 (SEQ ID NO:1640), FIG. 1641 (SEQ ID NO:1641), FIG. 1642 (SEQ ID NO:1642), FIG. 1643 (SEQ ID NO:1643), FIG. 1645 (SEQ ID NO:1645), FIG. 1647 A-B (SEQ ID NO:1647), FIG. 1649 (SEQ ID NO:1649), FIG. 1651 (SEQ ID NO:1651), FIG. 1653 (SEQ ID NO:1653), FIG. 1655 (SEQ ID NO:1655), FIG. 1657 (SEQ ID NO:1657), FIG. 1659 (SEQ ID NO:1659), FIG. 1661 (SEQ ID NO:1661), FIG. 1663 (SEQ ID NO:1663), FIG. 1665 (SEQ ID NO:1665), FIG. 1667 (SEQ ID NO:1667), FIG. 1669 (SEQ ID NO:1669), FIG. 1671 (SEQ ID NO:1671), FIG. 1673 (SEQ ID NO:1673), FIG. 1675 (SEQ ID NO:1675), FIG. 1677 (SEQ ID NO:1677), FIG. 1679 A-B (SEQ ID NO:1679), FIG. 1681 (SEQ ID NO:1681), FIG. 1682A-B (SEQ ID NO:1682), FIG. 1684 A-B (SEQ ID NO:1684), FIG. 1686 A-B (SEQ ID NO:1686), FIG. 1688 (SEQ ID NO:1688), FIG. 1690 (SEQ ID NO:1690), FIG. 1691 (SEQ ID NO:1691), FIG. 1693 (SEQ ID NO:1693), FIG. 1695 (SEQ ID NO:1695), FIG. 1697 (SEQ ID NO:1697), FIG. 1699 (SEQ ID NO:1699), FIG. 1700 (SEQ ID NO:1700), FIG. 1702 (SEQ ID NO:1702), FIG. 1704 (SEQ ID NO:1704), FIG. 1706 (SEQ ID NO:1706), FIG. 1708A-C (SEQ ID NO:1708), FIG. 1710 (SEQ ID NO:1710), FIG. 1712 (SEQ ID NO:1712), FIG. 1714 (SEQ ID NO:1714), FIG. 1716 (SEQ ID NO:1716), FIG. 1718 (SEQ ID NO:1718), FIG. 1720A-C (SEQ ID NO:1720), FIG. 1722 (SEQ ID NO:1722), FIG. 1724A-B (SEQ ID NO:1724), FIG. 1726 (SEQ ID NO:1726), FIG. 1728A-B (SEQ ID NO:1728), FIG. 1730 (SEQ ID NO:1730), FIG. 1731 (SEQ ID NO:1731), FIG. 1733 (SEQ ID NO:1733), FIG. 1735 (SEQ ID NO:1735), FIG. 1737 (SEQ ID NO:1737), FIG. 1739 (SEQ ID NO:1739), FIG. 1740 (SEQ ID NO:1740), FIG. 1742 (SEQ ID NO:1742), FIG. 1744 (SEQ ID NO:1744), FIG. 1746 (SEQ ID NO:1746), FIG. 1748 (SEQ ID NO:1748), FIG. 1750 (SEQ ID NO:1750), FIG. 1752A-B (SEQ ID NO:1752), FIG. 1754 (SEQ ID NO:1754), FIG. 1756 (SEQ ID NO:1756), FIG. 1758 (SEQ ID NO:1758), FIG. 1759 (SEQ ID NO:1759), FIG. 1761 (SEQ ID NO:1761), FIG. 1763 (SEQ ID NO:1763), FIG. 1765 (SEQ ID NO:1765), FIG. 1767 (SEQ ID NO:1767), FIG. 1768 (SEQ ID NO:1768), FIG. 1770 (SEQ ID NO:1770), FIG. 1772 (SEQ ID NO:1772), FIG. 1774 (SEQ ID NO:1774), FIG. 1776 (SEQ ID NO:1776), FIG. 1778 (SEQ ID NO:1778), FIG. 1780 (SEQ ID NO:1780), FIG. 1782 (SEQ ID NO:1782), FIG. 1784 (SEQ ID NO:1784), FIG. 1786 (SEQ ID NO:1786), FIG. 1788 (SEQ ID NO:1788), FIG. 1790 (SEQ ID NO:1790), FIG. 1791 (SEQ ID NO:1791), FIG. 1793 (SEQ ID NO:1793), FIG. 1794 (SEQ ID NO:1794), FIG. 1796 (SEQ ID NO:1796), FIG. 1798 (SEQ ID NO:1798), FIG. 1800 (SEQ ID NO:1800), FIG. 1801 (SEQ ID NO:1801), FIG. 1803 (SEQ ID NO:1803), FIG. 1804 (SEQ ID NO:1804), FIG. 1806 (SEQ ID NO:1806), FIG. 1808 (SEQ ID NO:1808), FIG. 1810 (SEQ ID NO:1810), FIG. 1812A-B (SEQ ID NO:1812), FIG. 1814 (SEQ ID NO:1814), FIG. 1816 (SEQ ID NO:1816), FIG. 1818 (SEQ ID NO:1818), FIG. 1820 (SEQ ID NO:1820), FIG. 1822 (SEQ ID NO:1822), FIG. 1824A-B (SEQ ID NO:1824), FIG. 1826 (SEQ ID NO:1826), FIG. 1828 (SEQ ID NO:1828), FIG. 1830 (SEQ ID NO:1830), FIG. 1832 (SEQ ID NO:1832), FIG. 1834 (SEQ ID NO:1834), FIG. 1835 (SEQ ID NO:1835), FIG. 1837 (SEQ ID NO:1837), FIG. 1839 (SEQ ID NO:1839), FIG. 1840 (SEQ ID NO:1840), FIG. 1842 (SEQ ID NO:1842), FIG. 1844A-B (SEQ ID NO:1844), FIG. 1846 (SEQ ID NO:1846), FIG. 1848A-B (SEQ ID NO:1848), FIG. 1850 (SEQ ID NO:1850), FIG. 1852 (SEQ ID NO:1852), FIG. 1853A-B (SEQ ID NO:1853), FIG. 1855 (SEQ ID NO:1855), FIG. 1857 (SEQ ID NO:1857), FIG. 1859 (SEQ ID NO:1859), FIG. 1861 (SEQ ID NO:1861), FIG. 1862A-B (SEQ ID NO:1862), FIG. 1864 (SEQ ID NO:1864), FIG. 1866 (SEQ ID NO:1866), FIG. 1868A-B (SEQ ID NO:1868), FIG. 1870 (SEQ ID NO:1870), FIG. 1872 (SEQ ID NO:1872), FIG. 1874 (SEQ ID NO:1874), FIG. 1876 (SEQ ID NO:1876), FIG. 1878 (SEQ ID NO:1878), FIG. 1879 (SEQ ID NO:1879), FIG. 1880 (SEQ ID NO:1880), FIG. 1882 (SEQ ID NO:1882), FIG. 1884 (SEQ ID NO:1884), FIG. 1886A-B (SEQ ID NO:1886), FIG. 1888 (SEQ ID NO:1888), FIG. 1890 (SEQ ID NO:1890), FIG. 1892 (SEQ ID NO:1892), FIG. 1894 (SEQ ID NO:1894), FIG. 1896 (SEQ ID NO:1896), FIG. 1898A-B (SEQ ID NO:1898), FIG. 1900 (SEQ ID NO:1900), FIG. 1902 (SEQ ID NO:1902), FIG. 1904 (SEQ ID NO:1904), FIG. 1906A-B (SEQ ID NO:1906), FIG. 1907 (SEQ ID NO:1907), FIG. 1909 (SEQ ID NO:1909), FIG. 1911 (SEQ ID NO:1911), FIG. 1912 (SEQ ID NO:1912), FIG. 1914 (SEQ ID NO:1914), FIG. 1916A-B (SEQ ID NO:1916), FIG. 1918 (SEQ ID NO:1918), FIG. 1920A-B (SEQ ID NO:1920), FIG. 1921 (SEQ ID NO:1921), FIG. 1923 (SEQ ID NO:1923), FIG. 1925 (SEQ ID NO:1925), FIG. 1927 (SEQ ID NO:1927), FIG. 1929 (SEQ ID NO:1929), FIG. 1931 (SEQ ID NO:1931), FIG. 1933 (SEQ ID NO:1933), FIG. 1935 (SEQ ID NO:1935), FIG. 1937 (SEQ ID NO:1937), FIG. 1939 (SEQ ID NO:1939), FIG. 1941 (SEQ ID NO:1941), FIG. 1943 (SEQ ID NO:1943), FIG. 1945 (SEQ ID NO:1945), FIG. 1947 (SEQ ID NO:1947), FIG. 1949 (SEQ ID NO:1949), FIG. 1951 (SEQ ID NO:1951), FIG. 1953 (SEQ ID NO:1953), FIG. 1955 (SEQ ID NO:1955), FIG. 1957 (SEQ ID NO:1957), FIG. 1959 (SEQ ID NO:1959), FIG. 1961 (SEQ ID NO:1961), FIG. 1963A-B (SEQ ID NO:1963), FIG. 1965 (SEQ ID NO:1965), FIG. 1967 (SEQ ID NO:1967), FIG. 1969 (SEQ ID NO:1969), FIG. 1971 (SEQ ID NO:1971), FIG. 1973 (SEQ ID NO:1973), FIG. 1975 (SEQ ID NO:1975), FIG. 1977 (SEQ ID NO:1977), FIG. 1979 (SEQ ID NO:1979), FIG. 1981 (SEQ ID NO:1981), FIG. 1983 (SEQ ID NO:1983), FIG. 1985 (SEQ ID NO:1985), FIG. 1987 (SEQ ID NO:1987), FIG. 1989 (SEQ ID NO:1989), FIG. 1991 (SEQ ID NO:1991), FIG. 1993 (SEQ ID NO:1993), FIG. 1995 (SEQ ID NO:1995), FIG. 1997 (SEQ ID NO:1997), FIG. 1999 (SEQ ID NO:1999), FIG. 2001 (SEQ ID NO:2001), FIG. 2003 (SEQ ID NO:2003), FIG. 2005A-B (SEQ ID NO:2005), FIG. 2007 (SEQ ID NO:2007), FIG. 2009 (SEQ ID NO:2009), FIG. 2011 (SEQ ID NO:2011), FIG. 2013 (SEQ ID NO:2013), FIG. 2015 (SEQ ID NO:2015), FIG. 2017A-B (SEQ ID NO:2017), FIG. 2019A-B (SEQ ID NO:2019), FIG. 2021 (SEQ ID NO:2021), FIG. 2023 (SEQ ID NO:2023), FIG. 2025 (SEQ ID NO:2025), FIG. 2027 (SEQ ID NO:2027), FIG. 2029 (SEQ ID NO:2029), FIG. 2031 (SEQ ID NO:2031), FIG. 2033 (SEQ ID NO:2033), FIG. 2035 (SEQ ID NO:2035), FIG. 2037 (SEQ ID NO:2037), FIG. 2039 (SEQ ID NO:2039), FIG. 2041 (SEQ ID NO:2041), FIG. 2043 (SEQ ID NO:2043), FIG. 2045 (SEQ ID NO:2045), FIG. 2047 (SEQ ID NO:2047), FIG. 2049A-B (SEQ ID NO:2049), FIG. 2051 (SEQ ID NO:2051), FIG. 2053 (SEQ ID NO:2053), FIG. 2055A-B (SEQ ID NO:2055), FIG. 2057 (SEQ ID NO:2057), FIG. 2059 (SEQ ID NO:2059), FIG. 2061 (SEQ ID NO:2061), FIG. 2063 (SEQ ID NO:2063), FIG. 2065 (SEQ ID NO:2065), FIG. 2067 (SEQ ID NO:2067), FIG. 2069 (SEQ ID NO:2069), FIG. 2071A-B (SEQ ID NO:2071), FIG. 2073 (SEQ ID NO:2073), FIG. 2075 (SEQ ID NO:2075), FIG. 2077 (SEQ ID NO:2077), FIG. 2079 (SEQ ID NO:2079), FIG. 2081 (SEQ ID NO:2081), FIG. 2083 (SEQ ID NO:2083), FIG. 2085 (SEQ ID NO:2085), FIG. 2087 (SEQ ID NO:2087), FIG. 2089 (SEQ ID NO:2089), FIG. 2091 (SEQ ID NO:2091), FIG. 2093 (SEQ ID NO:2093), FIG. 2095 (SEQ ID NO:2095), FIG. 2097 (SEQ ID NO:2097), FIG. 2099 (SEQ ID NO:2099), FIG. 2101 (SEQ ID NO:2101), FIG. 2103 (SEQ ID NO:2103), FIG. 2105 (SEQ ID NO:2105), FIG. 2107 (SEQ ID NO:2107), FIG. 2109 (SEQ ID NO:2109), FIG. 2111 (SEQ ID NO:2111), FIG. 2113 (SEQ ID NO:2113), FIG. 2115 (SEQ ID NO:2115), FIG. 2117 (SEQ ID NO:2117), FIG. 2119 (SEQ ID NO:2119), FIG. 2121 (SEQ ID NO:2121), FIG. 2123 (SEQ ID NO:2123), FIG. 2125 (SEQ ID NO:2125), FIG. 2127 (SEQ ID NO:2127), FIG. 2129 (SEQ ID NO:2129), FIG. 2131 (SEQ ID NO:2131), FIG. 2133 (SEQ ID NO:2133), FIG. 2135 (SEQ ID NO:2135), FIG. 2137 (SEQ ID NO:2137), FIG. 2139 (SEQ ID NO:2139), FIG. 2141 (SEQ ID NO:2141), FIG. 2143 (SEQ ID NO:2143), FIG. 2145A-B (SEQ ID NO:2145), FIG. 2147 (SEQ ID NO:2147), FIG. 2149 (SEQ ID NO:2149), FIG. 2151 (SEQ ID NO:2151), FIG. 2153 (SEQ ID NO:2153), FIG. 2155 (SEQ ID NO:2155), FIG. 2157 (SEQ ID NO:2157), FIG. 2159 (SEQ ID NO:2159), FIG. 2161A-B (SEQ ID NO:2161), FIG. 2162 (SEQ ID NO:2162), FIG. 2164 (SEQ ID NO:2164), FIG. 2166A-B (SEQ ID NO:2166), FIG. 2168 (SEQ ID NO:2168), FIG. 2169 (SEQ ID NO:2169), FIG. 2171A-B (SEQ ID NO:2171), FIG. 2173 (SEQ ID NO:2173), FIG. 2175A-B (SEQ ID NO:2175), FIG. 2177 (SEQ ID NO:2177), FIG. 2179 (SEQ ID NO:2179), FIG. 2181 (SEQ ID NO:2181), FIG. 2183 (SEQ ID NO:2183), FIG. 2185A-B (SEQ ID NO:2185), FIG. 2187 (SEQ ID NO:2187), FIG. 2189 (SEQ ID NO:2189), FIG. 2190A-B (SEQ ID NO:2190), FIG. 2192 (SEQ ID NO:2192), FIG. 2194 (SEQ ID NO:2194), FIG. 2196 (SEQ ID NO:2196), FIG. 2198 (SEQ ID NO:2198), FIG. 2200 (SEQ ID NO:2200), FIG. 2202 (SEQ ID NO:2202), FIG. 2203 (SEQ ID NO:2203), FIG. 2205 (SEQ ID NO:2205), FIG. 2206A-B (SEQ ID NO:2206), FIG. 2208 (SEQ ID NO:2208), FIG. 2210 (SEQ ID NO:2210), FIG. 2211 (SEQ ID NO:2211), FIG. 2213 (SEQ ID NO:2213), FIG. 2215 (SEQ ID NO:2215), FIG. 2217 (SEQ ID NO:2217), FIG. 2219 (SEQ ID NO:2219), FIG. 2221 (SEQ ID NO:2221), FIG. 2223 (SEQ ID NO:2223), FIG. 2225 (SEQ ID NO:2225), FIG. 2227 (SEQ ID NO:2227), FIG. 2229 (SEQ ID NO:2229), FIG. 2231 (SEQ ID NO:2231), FIG. 2233 (SEQ ID NO:2233), FIG. 2235 (SEQ ID NO:2235), FIG. 2237 (SEQ ID NO:2237), FIG. 2239 (SEQ ID NO:2239), FIG. 2241 (SEQ ID NO:2241), FIG. 2243 (SEQ ID NO:2243), FIG. 2245 (SEQ ID NO:2245), FIG. 2247 (SEQ ID NO:2247), FIG. 2249 (SEQ ID NO:2249), FIG. 2251 (SEQ ID NO:2251), FIG. 2253 (SEQ ID NO:2253), FIG. 2255 (SEQ ID NO:2255), FIG. 2257 (SEQ ID NO:2257), FIG. 2259 (SEQ ID NO:2259), FIG. 2261 (SEQ ID NO:2261), FIG. 2263 (SEQ ID NO:2263), FIG. 2265 (SEQ ID NO:2265), FIG. 2267 (SEQ ID NO:2267), FIG. 2269 (SEQ ID NO:2269), FIG. 2271 (SEQ ID NO:2271), FIG. 2273 (SEQ ID NO:2273), FIG. 2275 (SEQ ID NO:2275), FIG. 2277 (SEQ ID NO:2277), FIG. 2279 (SEQ ID NO:2279), FIG. 2281 (SEQ ID NO:2281), FIG. 2283 (SEQ ID NO:2283), FIG. 2285 (SEQ ID NO:2285), FIG. 2287 (SEQ ID NO:2287), FIG. 2289 (SEQ ID NO:2289), FIG. 2291 (SEQ ID NO:2291), FIG. 2293 (SEQ ID NO:2293), FIG. 2295 (SEQ ID NO:2295), FIG. 2297 (SEQ ID NO:2297), FIG. 2299 (SEQ ID NO:2299), FIG. 2300 (SEQ ID NO:2300), FIG. 2302A-B (SEQ ID NO:2302), FIG. 2304 (SEQ ID NO:2304), FIG. 2306 (SEQ ID NO:2306), FIG. 2308 (SEQ ID NO:2308), FIG. 2309 (SEQ ID NO:2309), FIG. 2311 (SEQ ID NO:2311), FIG. 2313 (SEQ ID NO:2313), FIG. 2315 (SEQ ID NO:2315), FIG. 2317 (SEQ ID NO:2317), FIG. 2318 (SEQ ID NO:2318), FIG. 2320A-B (SEQ ID NO:2320), FIG. 2322 (SEQ ID NO:2322), FIG. 2324 (SEQ ID NO:2324), FIG. 2326 (SEQ ID NO:2326), FIG. 2328 (SEQ ID NO:2328), FIG. 2330A-B (SEQ ID NO:2330), FIG. 2332 (SEQ ID NO:2332), FIG. 2334 (SEQ ID NO:2334), FIG. 2336A-B (SEQ ID NO:2336), FIG. 2338 (SEQ ID NO:2338), FIG. 2340 (SEQ ID NO:2340), FIG. 2342 (SEQ ID NO:2342), FIG. 2344 (SEQ ID NO:2344), FIG. 2346 (SEQ ID NO:2346), FIG. 2348 (SEQ ID NO:2348), FIG. 2350 (SEQ ID NO:2350), FIG. 2352 (SEQ ID NO:2352), FIG. 2354A-B (SEQ ID NO:2354), FIG. 2356 (SEQ ID NO:2356), FIG. 2358 (SEQ ID NO:2358), FIG. 2360 (SEQ ID NO:2360), FIG. 2362 (SEQ ID NO:2362), FIG. 2364 (SEQ ID NO:2364), FIG. 2366 (SEQ ID NO:2366), FIG. 2368 (SEQ ID NO:2368), FIG. 2370 (SEQ ID NO:2370), FIG. 2372 (SEQ ID NO:2372), FIG. 2374 (SEQ ID NO:2374), FIG. 2376A-B (SEQ ID NO:2376), FIG. 2377 (SEQ ID NO:2377), FIG. 2379 (SEQ ID NO:2379), FIG. 2381 (SEQ ID NO:2381), FIG. 2382 (SEQ ID NO:2382), FIG. 2384 (SEQ ID NO:2384), FIG. 2385 (SEQ ID NO:2385), FIG. 2387 (SEQ ID NO:2387), FIG. 2389 (SEQ ID NO:2389), FIG. 2390 (SEQ ID NO:2390), FIG. 2392 (SEQ ID NO:2392), FIG. 2394 (SEQ ID NO:2394), FIG. 2395A-B (SEQ ID NO:2395), FIG. 2397 (SEQ ID NO:2397), FIG. 2399 (SEQ ID NO:2399), FIG. 2400 (SEQ ID NO:2400), FIG. 2401 (SEQ ID NO:2401), FIG. 2403 (SEQ ID NO:2403), FIG. 2405 (SEQ ID NO:2405), FIG. 2406 (SEQ ID NO:2406), FIG. 2407 (SEQ ID NO:2407), FIG. 2409 (SEQ ID NO:2409), FIG. 2411 (SEQ ID NO:2411), FIG. 2413 (SEQ ID NO:2413), FIG. 2414 (SEQ ID NO:2414), FIG. 2416 (SEQ ID NO:2416), FIG. 2417 (SEQ ID NO:2417), FIG. 2419 (SEQ ID NO:2419), FIG. 2421 (SEQ ID NO:2421), FIG. 2423 (SEQ ID NO:2423), FIG. 2425 (SEQ ID NO:2425), FIG. 2427 (SEQ ID NO:2427), FIG. 2428 (SEQ ID NO:2428), FIG. 2429 (SEQ ID NO:2429), FIG. 2431 (SEQ ID NO:2431), FIG. 2433 (SEQ ID NO:2433), FIG. 2435 (SEQ ID NO:2435), FIG. 2437 (SEQ ID NO:2437), FIG. 2439 (SEQ ID NO:2439) or FIG. 2441 (SEQ ID NO:2441).

3. Isolated nucleic acid having at least 80% nucleic acid sequence identity to a nucleotide sequence selected from the group consisting of the full-length coding sequence of the nucleotide sequence shown in FIG. 1 (SEQ ID NO:1), FIG. 3 (SEQ ID NO:3), FIG. 5 (SEQ ID NO:5), FIG. 7 (SEQ ID NO:7), FIG. 9 (SEQ ID NO:9), FIG. 11 (SEQ ID NO:11), FIG. 13 (SEQ ID NO:13), FIG. 15 (SEQ ID NO:15), FIG. 17 (SEQ ID NO:17), FIG. 19 (SEQ ID NO:19), FIG. 21 (SEQ ID NO:21), FIG. 23 (SEQ ID NO:23), FIG. 25 (SEQ ID NO:25), FIG. 27 (SEQ ID NO:27), FIG. 29 (SEQ ID NO:29), FIG. 31 (SEQ ID NO:31), FIG. 33 (SEQ ID NO:33), FIG. 35 (SEQ ID NO:35), FIG. 37 (SEQ ID NO:37), FIG. 39 (SEQ ID NO:39), FIG. 41 (SEQ ID NO:41), FIG. 43 (SEQ ID NO:43), FIG. 45 (SEQ ID NO:45), FIG. 47 (SEQ ID NO:47), FIG. 49 (SEQ ID NO:49), FIG. 51 (SEQ ID NO:51), FIG. 53 (SEQ ID NO:53), FIG. 55 (SEQ ID NO:55), FIG. 57 (SEQ ID NO:57), FIG. 59 (SEQ ID NO:59), FIG. 61 (SEQ ID NO:61), FIG. 63 (SEQ ID NO:63), FIG. 65 (SEQ ID NO:65), FIG. 67 (SEQ ID NO:67), FIG. 69 (SEQ ID NO:69), FIG. 71 (SEQ ID NO:71), FIG. 73 (SEQ ID NO:73), FIG. 75 (SEQ ID NO:75), FIG. 77 (SEQ ID NO:77), FIG. 79 (SEQ ID NO:79), FIG. 81 (SEQ ID NO:81), FIG. 83 (SEQ ID NO:83), FIG. 85 (SEQ ID NO:85), FIG. 87 (SEQ ID NO:87), FIG. 89 (SEQ ID NO:89), FIG. 91 (SEQ ID NO:91), FIG. 93 (SEQ ID NO:93), FIG. 95 (SEQ ID NO:95), FIG. 97 (SEQ ID NO:97), FIG. 99 (SEQ ID NO:99), FIG. 101 (SEQ ID NO:101), FIG. 103 (SEQ ID NO:103), FIG. 105 (SEQ ID NO:105), FIG. 107 (SEQ ID NO:107), FIG. 109 (SEQ ID NO:109), FIG. 111 (SEQ ID NO:111), FIG. 113 (SEQ ID NO:113), FIG. 115 (SEQ ID NO:115), FIG. 117 (SEQ ID NO:117), FIG. 119 (SEQ ID NO:119), FIG. 120 (SEQ ID NO:120), FIG. 122 (SEQ ID NO:122), FIG. 124 (SEQ ID NO:124), FIG. 126 (SEQ ID NO:126), FIG. 128 (SEQ ID NO:128), FIG. 130 (SEQ ID NO:130), FIG. 132 (SEQ ID NO:132), FIG. 134 (SEQ ID NO:134), FIG. 136 (SEQ ID NO:136), FIG. 138 (SEQ ID NO:138), FIG. 140 (SEQ ID NO:140), FIG. 142 (SEQ ID NO:142), FIG. 144 (SEQ ID NO:144), FIG. 146 (SEQ ID NO:146), FIG. 148 (SEQ ID NO:148), FIG. 150 (SEQ ID NO:150), FIG. 152 (SEQ ID NO:152), FIG. 154 (SEQ ID NO:154), FIG. 156 (SEQ ID NO:156), FIG. 158 (SEQ ID NO:158), FIG. 160 (SEQ ID NO:160), FIG. 162 (SEQ ID NO:162), FIG. 164 (SEQ ID NO:164), FIG. 166 (SEQ ID NO:166), FIG. 168 (SEQ ID NO:168), FIG. 170 (SEQ ID NO:170), FIG. 172 (SEQ ID NO:172), FIG. 174 (SEQ ID NO:174), FIG. 176 (SEQ ID NO:176), FIG. 178 (SEQ ID NO:178), FIG. 180 (SEQ ID NO:180), FIG. 182 (SEQ ID NO:182), FIG. 184 (SEQ ID NO:184), FIG. 186 (SEQ ID NO:186), FIG. 188 (SEQ ID NO:188), FIG. 190 (SEQ ID NO:190), FIG. 192 (SEQ ID NO:192), FIG. 194 (SEQ ID NO:194), FIG. 196 (SEQ ID NO:196), FIG. 198 (SEQ ID NO:198), FIG. 200 (SEQ ID NO:200), FIG. 202 (SEQ ID NO:202), FIG. 204 (SEQ ID NO:204), FIG. 206 (SEQ ID NO:206), FIG. 208 (SEQ ID NO:208), FIG. 210 (SEQ ID NO:210), FIG. 212 (SEQ ID NO:212), FIG. 214 (SEQ ID NO:214), FIG. 216 (SEQ ID NO:216), FIG. 218 (SEQ ID NO:218), FIG. 220 (SEQ ID NO:220), FIG. 222 (SEQ ID NO:222), FIG. 224 (SEQ ID NO:224), FIG. 226 (SEQ ID NO:226), FIG. 228 (SEQ ID NO:228), FIG. 230 (SEQ ID NO:231), FIG. 232 (SEQ ID NO:232), FIG. 234 (SEQ ID NO:234), FIG. 236 (SEQ ID NO:236), FIG. 238 (SEQ ID NO:238), FIG. 240 (SEQ ID NO:240), FIG. 242 (SEQ ID NO:242), FIG. 244 (SEQ ID NO:244), FIG. 246 (SEQ ID NO:246), FIG. 248 (SEQ ID NO:248), FIG. 250 (SEQ ID NO:250), FIG. 252 (SEQ ID NO:252), FIG. 253 (SEQ ID NO:253), FIG. 255 (SEQ ID NO:255), FIG. 257 (SEQ ID NO:257), FIG. 259 (SEQ ID NO:259), FIG. 261 (SEQ ID NO:261), FIG. 263 (SEQ ID NO:263), FIG. 265 (SEQ ID NO:265), FIG. 267 (SEQ ID NO:267), FIG. 269 (SEQ ID NO:269), FIG. 271 (SEQ ID NO:271), FIG. 273 (SEQ ID NO:273), FIG. 275 (SEQ ID NO:275), FIG. 277 (SEQ ID NO:277), FIG. 279 (SEQ ID NO:279), FIG. 281 (SEQ ID NO:281), FIG. 283 (SEQ ID NO:283), FIG. 285 (SEQ ID NO:285), FIG. 287 (SEQ ID NO:287), FIG. 289 (SEQ ID NO:289), FIG. 291 (SEQ ID NO:291), FIG. 293 (SEQ ID NO:293), FIG. 295 (SEQ ID NO:295), FIG. 297 (SEQ ID NO:297), FIG. 299 (SEQ ID NO:299), FIG. 301 (SEQ ID NO:301), FIG. 303 (SEQ ID NO:303), FIG. 305 (SEQ ID NO:305), FIG. 307 (SEQ ID NO:307), FIG. 309 (SEQ ID NO:309), FIG. 311 (SEQ ID NO:311), FIG. 313 (SEQ ID NO:313), FIG. 315 (SEQ ID NO:315), FIG. 317 (SEQ ID NO:317), FIG. 319 (SEQ ID NO:319), FIG. 321 (SEQ ID NO:321), FIG. 323 (SEQ ID NO:323), FIG. 325 (SEQ ID NO:325), FIG. 327 (SEQ ID NO:327), FIG. 329 (SEQ ID NO:329), FIG. 331 (SEQ ID NO:331), FIG. 333 (SEQ ID NO:333), FIG. 335 (SEQ ID NO:335), FIG. 337 (SEQ ID NO:337), FIG. 339 (SEQ ID NO:339), FIG. 341 (SEQ ID NO:341), FIG. 343 (SEQ ID NO:343), FIG. 345 (SEQ ID NO:345), FIG. 347 (SEQ ID NO:347), FIG. 349 (SEQ ID NO:349), FIG. 351 (SEQ ID NO:351), FIG. 353 (SEQ ID NO:353), FIG. 355 (SEQ ID NO:355), FIG. 357 (SEQ ID NO:357), FIG. 359 (SEQ ID NO:359), FIG. 361 (SEQ ID NO:361), FIG. 363 (SEQ ID NO:363), FIG. 365 (SEQ ID NO:365), FIG. 367 (SEQ ID NO:367), FIG. 369 (SEQ ID NO:369), FIG. 371 (SEQ ID NO:371), FIG. 373 (SEQ ID NO:373), FIG. 375 (SEQ ID NO:375), FIG. 377 (SEQ ID NO:377), FIG. 379 (SEQ ID NO:379), FIG. 381 (SEQ ID NO:381), FIG. 383 (SEQ ID NO:383), FIG. 385 (SEQ ID NO:385), FIG. 387 (SEQ ID NO:387), FIG. 389 (SEQ ID NO:389), FIG. 391 (SEQ ID NO:391), FIG. 393 (SEQ ID NO:393), FIG. 395 (SEQ ID NO:395), FIG. 397 (SEQ ID NO:397), FIG. 399 (SEQ ID NO:399), FIG. 401 (SEQ ID NO:401), FIG. 403 (SEQ ID NO:403), FIG. 405 (SEQ ID NO:405), FIG. 407 (SEQ ID NO:407), FIG. 409 (SEQ ID NO:409), FIG. 411 (SEQ ID NO:411), FIG. 413 (SEQ ID NO:413), FIG. 415 (SEQ ID NO:415), FIG. 417 (SEQ ID NO:417), FIG. 419 (SEQ ID NO:419), FIG. 421 (SEQ ID NO:421), FIG. 423 (SEQ ID NO:423), FIG. 425 (SEQ ID NO:425), FIG. 427 (SEQ ID NO:427), FIG. 429 (SEQ ID NO:429), FIG. 431 (SEQ ID NO:431), FIG. 433 (SEQ ID NO:433), FIG. 435 (SEQ ID NO:435), FIG. 437 (SEQ ID NO:437), FIG. 439 (SEQ ID NO:439), FIG. 441 (SEQ ID NO:441), FIG. 443 (SEQ ID NO:443), FIG. 445 (SEQ ID NO:445), FIG. 447 (SEQ ID NO:447), FIG. 449 (SEQ ID NO:449), FIG. 451 (SEQ ID NO:451), FIG. 453 (SEQ ID NO:453), FIG. 455 (SEQ ID NO:455), FIG. 457 (SEQ ID NO:457), FIG. 459 (SEQ ID NO:459), FIG. 461 (SEQ ID NO:461), FIG. 463 (SEQ ID NO:463), FIG. 465 (SEQ ID NO:465), FIG. 467 (SEQ ID NO:467), FIG. 469 (SEQ ID NO:469), FIG. 471 (SEQ ID NO:471), FIG. 473 (SEQ ID NO:473), FIG. 475 (SEQ ID NO:475), FIG. 477 (SEQ ID NO:477), FIG. 479 (SEQ ID NO:479), FIG. 481 (SEQ ID NO:481), FIG. 483 (SEQ ID NO:483), FIG. 485 (SEQ ID NO:485), FIG. 487 (SEQ ID NO:487), FIG. 489 (SEQ ID NO:489), FIG. 491 (SEQ ID NO:491), FIG. 493 (SEQ ID NO:493), FIG. 495 (SEQ ID NO:495), FIG. 497 (SEQ ID NO:497), FIG. 499 (SEQ ID NO:499), FIG. 501 (SEQ ID NO:501), FIG. 503 (SEQ ID NO:503), FIG. 505 (SEQ ID NO:505), FIG. 507 (SEQ ID NO:507), FIG. 509 (SEQ ID NO:509), FIG. 511 (SEQ ID NO:511), FIG. 513 (SEQ ID NO:513), FIG. 515 (SEQ ID NO:515), FIG. 517 (SEQ ID NO:517), FIG. 519 (SEQ ID NO:519), FIG. 521 (SEQ ID NO:521), FIG. 523 (SEQ ID NO:523), FIG. 525 (SEQ ID NO:525), FIG. 527 (SEQ ID NO:527), FIG. 529 (SEQ ID NO:529), FIG. 531 (SEQ ID NO:531), FIG. 533 (SEQ ID NO:533), FIG. 535 (SEQ ID NO:535), FIG. 537 (SEQ ID NO:537), FIG. 539 (SEQ ID NO:539), FIG. 541 (SEQ ID NO:541), FIG. 543 (SEQ ID NO:543), FIG. 545 (SEQ ID NO:545), FIG. 547 (SEQ ID NO:547), FIG. 548 (SEQ ID NO:548), FIG. 550 (SEQ ID NO:550), FIG. 552 (SEQ ID NO:552), FIG. 554 (SEQ ID NO:554), FIG. 556 (SEQ ID NO:556), FIG. 558 (SEQ ID NO:558), FIG. 560 (SEQ ID NO:560), FIG. 562 (SEQ ID NO:562), FIG. 564 (SEQ ID NO:564), FIG. 566 (SEQ ID NO:566), FIG. 568 (SEQ ID NO:568), FIG. 570 (SEQ ID NO:570), FIG. 572 (SEQ ID NO:572), FIG. 574 (SEQ ID NO:574), FIG. 576 (SEQ ID NO:576), FIG. 578 (SEQ ID NO:578), FIG. 580 (SEQ ID NO:580), FIG. 582 (SEQ ID NO:582), FIG. 584 (SEQ ID NO:584), FIG. 586 (SEQ ID NO:586), FIG. 588 (SEQ ID NO:588), FIG. 590 (SEQ ID NO:590), FIG. 592 (SEQ ID NO:592), FIG. 594 (SEQ ID NO:594), FIG. 596 (SEQ ID NO:596), FIG. 598 (SEQ ID NO:598), FIG. 600 (SEQ ID NO:600), FIG. 602 (SEQ ID NO:602), FIG. 604 (SEQ ID NO:604), FIG. 606 (SEQ ID NO:606), FIG. 608 (SEQ ID NO:608), FIG. 610 (SEQ ID NO:610), FIG. 612 (SEQ ID NO:612), FIG. 614 (SEQ ID NO:614), FIG. 616 (SEQ ID NO:616), FIG. 618 (SEQ ID NO:618), FIG. 620 (SEQ ID NO:620), FIG. 622 (SEQ ID NO:622), FIG. 624 (SEQ ID NO:624), FIG. 626 (SEQ ID NO:626), FIG. 628 (SEQ ID NO:628), FIG. 630 (SEQ ID NO:630), FIG. 632 (SEQ ID NO:632), FIG. 634 (SEQ ID NO:634), FIG. 636 (SEQ ID NO:636), FIG. 638 (SEQ ID NO:638), FIG. 640 (SEQ ID NO:640), FIG. 642 (SEQ ID NO:642), FIG. 644 (SEQ ID NO:644), FIG. 646 (SEQ ID NO:646), FIG. 648 (SEQ ID NO:648), FIG. 650 (SEQ ID NO:650), FIG. 652 (SEQ ID NO:652), FIG. 654 (SEQ ID NO:654), FIG. 656 (SEQ ID NO:656), FIG. 658 (SEQ ID NO:658), FIG. 660 (SEQ ID NO:660), FIG. 662 (SEQ ID NO:662), FIG. 664 (SEQ ID NO:664), FIG. 666 (SEQ ID NO:666), FIG. 668 (SEQ ID NO:668), FIG. 670 (SEQ ID NO:670), FIG. 672 (SEQ ID NO:672), FIG. 674 (SEQ ID NO:674), FIG. 676 (SEQ ID NO:676), FIG. 678 (SEQ ID NO:678), FIG. 680 (SEQ ID NO:680), FIG. 682 (SEQ ID NO:682), FIG. 684 (SEQ ID NO:684), FIG. 686 (SEQ ID NO:686), FIG. 688 (SEQ ID NO:688), FIG. 690 (SEQ ID NO:690), FIG. 692 (SEQ ID NO:692), FIG. 694 (SEQ ID NO:694), FIG. 696 (SEQ ID NO:696), FIG. 698 (SEQ ID NO:698), FIG. 700 (SEQ ID NO:700), FIG. 702 (SEQ ID NO:702), FIG. 704 (SEQ ID NO:704), FIG. 706 (SEQ ID NO:706), FIG. 708 (SEQ ID NO:708), FIG. 710 (SEQ ID NO:710), FIG. 712 (SEQ ID NO:712), FIG. 714 (SEQ ID NO:714), FIG. 716 (SEQ ID NO:716), FIG. 718 (SEQ ID NO:718), FIG. 720 (SEQ ID NO:720), FIG. 722 (SEQ ID NO:722), FIG. 724 (SEQ ID NO:724), FIG. 726 (SEQ ID NO:726), FIG. 728 (SEQ ID NO:728), FIG. 730 (SEQ ID NO:730), FIG. 732 (SEQ ID NO:732), FIG. 734 (SEQ ID NO:734), FIG. 736 (SEQ ID NO:736), FIG. 738 (SEQ ID NO:738), FIG. 740 (SEQ ID NO:740), FIG. 742 (SEQ ID NO:742), FIG. 744 (SEQ ID NO:744), FIG. 746 (SEQ ID NO:746), FIG. 748 (SEQ ID NO:748), FIG. 750 (SEQ ID NO:750), FIG. 752 (SEQ ID NO:752), FIG. 754 (SEQ ID NO:754), FIG. 756 (SEQ ID NO:756), FIG. 758 (SEQ ID NO:758), FIG. 760 (SEQ ID NO:760), FIG. 762 (SEQ ID NO:762), FIG. 764 (SEQ ID NO:764), FIG. 766 (SEQ ID NO:766), FIG. 768 (SEQ ID NO:768), FIG. 770 (SEQ ID NO:770), FIG. 772 (SEQ ID NO:772), FIG. 774 (SEQ ID NO:774), FIG. 776 (SEQ ID NO:776), FIG. 778 (SEQ ID NO:778), FIG. 780 (SEQ ID NO:780), FIG. 782 (SEQ ID NO:782), FIG. 784 (SEQ ID NO:784), FIG. 786 (SEQ ID NO:786), FIG. 788 (SEQ ID NO:788), FIG. 790 (SEQ ID NO:790), FIG. 792 (SEQ ID NO:792), FIG. 794 (SEQ ID NO:794), FIG. 796 (SEQ ID NO:796), FIG. 798 (SEQ ID NO:798), FIG. 800 (SEQ ID NO:800), FIG. 802 (SEQ ID NO:802), FIG. 804 (SEQ ID NO:804), FIG. 806 (SEQ ID NO:806), FIG. 808 (SEQ ID NO:808), FIG. 810A-B (SEQ ID NO:810), FIG. 812 (SEQ ID NO:812), FIG. 814 (SEQ ID NO:814), FIG. 816 (SEQ ID NO:816), FIG. 818 (SEQ ID NO:818), FIG. 820 (SEQ ID NO:820), FIG. 822 (SEQ ID NO:822), FIG. 824 (SEQ ID NO:824), FIG. 826 (SEQ ID NO:826), FIG. 828 (SEQ ID NO:828), FIG. 830 (SEQ ID NO:830), FIG. 832 (SEQ ID NO:832), FIG. 834 (SEQ ID NO:834), FIG. 836 (SEQ ID NO:836), FIG. 838 (SEQ ID NO:838), FIG. 840 (SEQ ID NO:840), FIG. 842 (SEQ ID NO:842), FIG. 844 (SEQ ID NO:844), FIG. 846 (SEQ ID NO:846), FIG. 848 (SEQ ID NO:848), FIG. 850 (SEQ ID NO:850), FIG. 852 (SEQ ID NO:852), FIG. 854 (SEQ ID NO:854), FIG. 856 (SEQ ID NO:856), FIG. 857A-B (SEQ ID NO:857), FIG. 859A-B (SEQ ID NO:859), FIG. 861 (SEQ ID NO:861), FIG. 863 (SEQ ID NO:863), FIG. 865 (SEQ ID NO:865), FIG. 867 (SEQ ID NO:867), FIG. 869 (SEQ ID NO:869), FIG. 871 (SEQ ID NO:871), FIG. 873 (SEQ ID NO:873), FIG. 875 (SEQ ID NO:875), FIG. 877 (SEQ ID NO:877), FIG. 879 (SEQ ID NO:879), FIG. 881A-B (SEQ ID NO:881), FIG. 883 (SEQ ID NO:883), FIG. 885 (SEQ ID NO:885), FIG. 887 (SEQ ID NO:887), FIG. 889 (SEQ ID NO:889), FIG. 891 (SEQ ID NO:891), FIG. 893 (SEQ ID NO:893), FIG. 895 (SEQ ID NO:895), FIG. 897 (SEQ ID NO:897), FIG. 899 (SEQ ID NO:899), FIG. 901 (SEQ ID NO:901), FIG. 903 (SEQ ID NO:903), FIG. 905A-C (SEQ ID NO:905), FIG. 907 (SEQ ID NO:907), FIG. 909 (SEQ ID NO:909), FIG. 911 (SEQ ID NO:911), FIG. 913 (SEQ ID NO:913), FIG. 915 (SEQ ID NO:915), FIG. 917 (SEQ ID NO:917), FIG. 919A-B (SEQ ID NO:919), FIG. 921 (SEQ ID NO:921), FIG. 923 (SEQ ID NO:923), FIG. 925 (SEQ ID NO:925), FIG. 927 (SEQ ID NO:927), FIG. 929 (SEQ ID NO:929), FIG. 931 (SEQ ID NO:931), FIG. 933A-B (SEQ ID NO:933), FIG. 935 (SEQ ID NO:935), FIG. 937A-B (SEQ ID NO:937), FIG. 939A-B (SEQ ID NO:939), FIG. 941A-B (SEQ ID NO:941), FIG. 942A-B (SEQ ID NO:942), FIG. 944 (SEQ ID NO:944), FIG. 946 (SEQ ID NO:946), FIG. 948A-C (SEQ ID NO:948), FIG. 950 (SEQ ID NO:950), FIG. 952 (SEQ ID NO:952), FIG. 954A-B (SEQ ID NO:954), FIG. 956A-B (SEQ ID NO:956), FIG. 957A-B (SEQ ID NO:957), FIG. 959 (SEQ ID NO:959), FIG. 961 (SEQ ID NO:961), FIG. 962 (SEQ ID NO:962), FIG. 964 (SEQ ID NO:964), FIG. 966 (SEQ ID NO:966), FIG. 967 (SEQ ID NO:967), FIG. 969A-B (SEQ ID NO:969), FIG. 971A-B (SEQ ID NO:971), FIG. 973 (SEQ ID NO:973), FIG. 975 (SEQ ID NO:975), FIG. 977A-B (SEQ ID NO:977), FIG. 979 (SEQ ID NO:979), FIG. 981 (SEQ ID NO:981), FIG. 982 (SEQ ID NO:982), FIG. 984 (SEQ ID NO:984), FIG. 986 (SEQ ID NO:986), FIG. 988 (SEQ ID NO:988), FIG. 989A-D (SEQ ID NO:989), FIG. 991 (SEQ ID NO:991), FIG. 993A-C (SEQ ID NO:993), FIG. 995 (SEQ ID NO:995), FIG. 997 (SEQ ID NO:997), FIG. 999A-B (SEQ ID NO:999), FIG. 1001 (SEQ ID NO:1001), FIG. 1003A-B (SEQ ID NO:1003), FIG. 1004A-B (SEQ ID NO:1004), FIG. 1005A-B (SEQ ID NO:1005), FIG. 1006A-B (SEQ ID NO:1006), FIG. 1008 (SEQ ID NO:1008), FIG. 1010A-B (SEQ ID NO:1010), FIG. 1012 (SEQ ID NO:1012), FIG. 1014 (SEQ ID NO:1014), FIG. 1016A-B (SEQ ID NO:1016), FIG. 1018 (SEQ ID NO:1018), FIG. 1020A-B (SEQ ID NO:1020), FIG. 1022 (SEQ ID NO:1022), FIG. 1024A-C (SEQ ID NO:1024), FIG. 1026A-B (SEQ ID NO:1026), FIG. 1027 (SEQ ID NO:1027), FIG. 1028A-B (SEQ ID NO:1028), FIG. 1029 (SEQ ID NO:1029), FIG. 1031 (SEQ ID NO:1031), FIG. 1032 (SEQ ID NO:1032), FIG. 1034A-C (SEQ ID NO:1034), FIG. 1036A-B (SEQ ID NO:1036), FIG. A-B 1038 (SEQ ID NO:1038), FIG. 1040 (SEQ ID NO:1040), FIG. 1042A-B (SEQ ID NO:1042), FIG. 1044A-B (SEQ ID NO:1044), FIG. 1045 (SEQ ID NO:1045), FIG. 1047 (SEQ ID NO:1047), FIG. 1049 (SEQ ID NO:1049), FIG. 1051 (SEQ ID NO:1051), FIG. 1052A-B (SEQ ID NO:1052), FIG. 1054 (SEQ ID NO:1054), FIG. 1056 (SEQ ID NO:1056), FIG. 1058 (SEQ ID NO:1058), FIG. 1059 (SEQ ID NO:1059), FIG. 1061 (SEQ ID NO:1061), FIG. 1063 (SEQ ID NO:1063), FIG. 1065 (SEQ ID NO:1065), FIG. 1067 (SEQ ID NO:1067), FIG. 1069A-B (SEQ ID NO:1069), FIG. 1071 (SEQ ID NO:1071), FIG. 1073A-B (SEQ ID NO:1073), FIG. 1075 (SEQ ID NO:1075), FIG. 1077 (SEQ ID NO:1077), FIG. 1079 (SEQ ID NO:1079), FIG. 1081 (SEQ ID NO:1081), FIG. 1083A-B (SEQ ID NO:1083), FIG. 1085 (SEQ ID NO:1085), FIG. 1087 (SEQ ID NO:1087), FIG. 1089 (SEQ ID NO:1089), FIG. 1091 (SEQ ID NO:1091), FIG. 1093A-B (SEQ ID NO:1093), FIG. 1095 (SEQ ID NO:1095), FIG. 1097 (SEQ ID NO:1097), FIG. 1099 (SEQ ID NO:1099), FIG. 1100 (SEQ ID NO:1100), FIG. 1102A-B (SEQ ID NO:1102), FIG. 1104A-B (SEQ ID NO:1104), FIG. 1106 (SEQ ID NO:1106), FIG. 1108 (SEQ ID NO:1108), FIG. 1110 (SEQ ID NO:1110), FIG. 1112 (SEQ ID NO:1112), FIG. 1114A-B (SEQ ID NO:1114), FIG. 1115 (SEQ ID NO:1115), FIG. 1117A-B (SEQ ID NO:1117), FIG. 1119 (SEQ ID NO:1119), FIG. 1121 (SEQ ID NO:1121), FIG. 1122 (SEQ ID NO:1122), FIG. 1124 (SEQ ID NO:1124), FIG. 1126 (SEQ ID NO:1126), FIG. 1127 (SEQ ID NO:1127), FIG. 1129 (SEQ ID NO:1129), FIG. 1131 (SEQ ID NO:1131), FIG. 1133 (SEQ ID NO:1133), FIG. 1135 (SEQ ID NO:1135), FIG. 1137A-B (SEQ ID NO:1137), FIG. 1139 (SEQ ID NO:1139), FIG. 1140 (SEQ ID NO:1140), FIG. 1141 (SEQ ID NO:1141), FIG. 1143A-C (SEQ ID NO:1143), FIG. 1145A-B (SEQ ID NO:1145), FIG. 1147 (SEQ ID NO:1147), FIG. 1149 (SEQ ID NO:1149), FIG. 1151 (SEQ ID NO:1151), FIG. 1153 (SEQ ID NO:1153), FIG. 1155A-B (SEQ ID NO:1155), FIG. 1157 (SEQ ID NO:1157), FIG. 1159 (SEQ ID NO:1159), FIG. 1161 (SEQ ID NO:1161), FIG. 1163 (SEQ ID NO:1163), FIG. 1165 (SEQ ID NO:1165), FIG. 1167 (SEQ ID NO:1167), FIG. 1169 (SEQ ID NO:1169), FIG. 1171 (SEQ ID NO:1171), FIG. 1173 (SEQ ID NO:1173), FIG. 1175 (SEQ ID NO:1175), FIG. 1177 (SEQ ID NO:1177), FIG. 1179 (SEQ ID NO:1179), FIG. 1181 (SEQ ID NO:1181), FIG. 1183 (SEQ ID NO:1183), FIG. 1185 (SEQ ID NO:1185), FIG. 1187 (SEQ ID NO:), FIG. 1189 (SEQ ID NO:1189), FIG. 1191 (SEQ ID NO:1191), FIG. 1193 (SEQ ID NO:1193), FIG. 1195 (SEQ ID NO:1195), FIG. 1197 (SEQ ID NO:1197), FIG. 1199 (SEQ ID NO:1199), FIG. 1201 (SEQ ID NO:1201), FIG. 1203 (SEQ ID NO:1203), FIG. 1205 (SEQ ID NO:1205), FIG. 1207 (SEQ ID NO:1207), FIG. 1209 (SEQ ID NO:1209), FIG. 1211 (SEQ ID NO:1211), FIG. 1213 (SEQ ID NO:1213), FIG. 1215 (SEQ ID NO:1215), FIG. 1217 (SEQ ID NO:1217), FIG. 1219 (SEQ ID NO:1219), FIG. 1221 (SEQ ID NO:1221), FIG. 1223A-B (SEQ ID NO:1223), FIG. 1225 (SEQ ID NO:1225), FIG. 1227 (SEQ ID NO:1227), FIG. 1229 (SEQ ID NO:1229), FIG. 1231 (SEQ ID NO:1231), FIG. 1233 (SEQ ID NO:1233), FIG. 1235 (SEQ ID NO:1235), FIG. 1237 (SEQ ID NO:1237), FIG. 1239 (SEQ ID NO:1239), FIG. 1241 (SEQ ID NO:1241), FIG. 1243 (SEQ ID NO:1243), FIG. 1245 (SEQ ID NO:1245), FIG. 1247 (SEQ ID NO:1247), FIG. 1249 (SEQ ID NO:1249), FIG. 1251 (SEQ ID NO:1251), FIG. 1253 (SEQ ID NO:1253), FIG. 1255 (SEQ ID NO:1255), FIG. 1257 (SEQ ID NO:1257), FIG. 1259 (SEQ ID NO:1259), FIG. 1261 (SEQ ID NO:1261), FIG. 1263 (SEQ ID NO:1263), FIG. 1265 (SEQ ID NO:1265), FIG. 1267 (SEQ ID NO:1267), FIG. 1269 (SEQ ID NO:1269), FIG. 1271 (SEQ ID NO:1271), FIG. 1273 (SEQ ID NO:1273), FIG. 1275 (SEQ ID NO:1275), FIG. 1277A-C (SEQ ID NO:1277), FIG. 1279 (SEQ ID NO:1279), FIG. 1281 (SEQ ID NO:1281), FIG. 1283A-B (SEQ ID NO:1283), FIG. 1285 (SEQ ID NO:1285), FIG. 1287A-B (SEQ ID NO:1287), FIG. 1289 (SEQ ID NO:1289), FIG. 1291 (SEQ ID NO:1291), FIG. 1293 (SEQ ID NO:1293), FIG. 1295 (SEQ ID NO:1295), FIG. 1297A-B (SEQ ID NO:1297), FIG. 1299 (SEQ ID NO:1299), FIG. 1301A-B (SEQ ID NO:1301), FIG. 1303 (SEQ ID NO:1303), FIG. 1305 (SEQ ID NO:1305), FIG. 1307 (SEQ ID NO:1307), FIG. 1309 (SEQ ID NO:1309), FIG. 1311 (SEQ ID NO:1311), FIG. 1313 (SEQ ID NO:1313), FIG. 1315 (SEQ ID NO:1315), FIG. 1317 (SEQ ID NO:1317), FIG. 1319 (SEQ ID NO:1319), FIG. 1321 A-B (SEQ ID NO:1321), FIG. 1323 (SEQ ID NO:1323), FIG. 1325 (SEQ ID NO:1325), FIG. 1327 (SEQ ID NO:1327), FIG. 1329 (SEQ ID NO:1329), FIG. 1331 (SEQ ID NO:1331), FIG. 1333 (SEQ ID NO:1333), FIG. 1335 (SEQ ID NO:1335), FIG. 1337 (SEQ ID NO:1337), FIG. 1339 (SEQ ID NO:1339), FIG. 1341 (SEQ ID NO:1341), FIG. 1343 (SEQ ID NO:1343), FIG. 1345 (SEQ ID NO:1345), FIG. 1347 (SEQ ID NO:1347), FIG. 1349 A-B (SEQ ID NO:1349), FIG. 1351 (SEQ ID NO:1351), FIG. 1353 (SEQ ID NO:1353), FIG. 1355 A-B (SEQ ID NO:1355), FIG. 1357 (SEQ ID NO:1357), FIG. 1359 (SEQ ID NO:1359), FIG. 1360 (SEQ ID NO:1360), FIG. 1362 (SEQ ID NO:1362), FIG. 1364 (SEQ ID NO:1364), FIG. 1366 (SEQ ID NO:1366), FIG. 1368 (SEQ ID NO:1368), FIG. 1370 (SEQ ID NO:1370), FIG. 1372 (SEQ ID NO:1372), FIG. 1374 (SEQ ID NO:1374), FIG. 1376 (SEQ ID NO:1376), FIG. 1378 (SEQ ID NO:1378), FIG. 1380 A-B (SEQ ID NO:1380), FIG. 1382 (SEQ ID NO:1382), FIG. 1384 (SEQ ID NO:1384), FIG. 1386 (SEQ ID NO:1386), FIG. 1388 (SEQ ID NO:1388), FIG. 1390 A-B (SEQ ID NO:1390), FIG. 1392 (SEQ ID NO:1392), FIG. 1394 (SEQ ID NO:1394), FIG. 1396 (SEQ ID NO:1396), FIG. 1398 A-B (SEQ ID NO:1398), FIG. 1400 (SEQ ID NO:1400), FIG. 1402 (SEQ ID NO:1402), FIG. 1404 (SEQ ID NO:1404), FIG. 1406 (SEQ ID NO:1406), FIG. 1408 (SEQ ID NO:1408), FIG. 1410 (SEQ ID NO:1410), FIG. 1412 (SEQ ID NO:1412), FIG. 1414 (SEQ ID NO:1414), FIG. 1416 (SEQ ID NO:1416), FIG. 1418 (SEQ ID NO:1418), FIG. 1420 (SEQ ID NO:1420), FIG. 1422 (SEQ ID NO:1422), FIG. 1424 (SEQ ID NO:1424), FIG. 1426 (SEQ ID NO:1426), FIG. 1428 (SEQ ID NO:1428), FIG. 1430 (SEQ ID NO:1430), FIG. 1432 A-B (SEQ ID NO:1432), FIG. 1434 (SEQ ID NO:1434), FIG. 1436 A-B (SEQ ID NO:1436), FIG. 1438 (SEQ ID NO:1438), FIG. 1440 (SEQ ID NO:1440), FIG. 1442 A-B (SEQ ID NO:1442), FIG. 1444 A-B (SEQ ID NO:1444), FIG. 1446 (SEQ ID NO:1446), FIG. 1448 (SEQ ID NO:1448), FIG. 1450 (SEQ ID NO:1450), FIG. 1452 (SEQ ID NO:1452), FIG. 1454 (SEQ ID NO:1454), FIG. 1456 (SEQ ID NO:1456), FIG. 1458 (SEQ ID NO:1458), FIG. 1460 (SEQ ID NO:1460), FIG. 1462 (SEQ ID NO:1462), FIG. 1464 (SEQ ID NO:1464), FIG. 1466 (SEQ ID NO:1466), FIG. 1468 (SEQ ID NO:1468), FIG. 1470 (SEQ ID NO:1470), FIG. 1472 (SEQ ID NO:1472), FIG. 1474 (SEQ ID NO:1474), FIG. 1476 (SEQ ID NO:1476), FIG. 1478 (SEQ ID NO:1478), FIG. 1480 (SEQ ID NO:1480), FIG. 1482 (SEQ ID NO:1482), FIG. 1484 (SEQ ID NO:1484), FIG. 1486 (SEQ ID NO:1486), FIG. 1488A-B (SEQ ID NO:1488), FIG. 1490 (SEQ ID NO:1490), FIG. 1492 (SEQ ID NO:1492), FIG. 1494 (SEQ ID NO:1494), FIG. 1496 (SEQ ID NO:1496), FIG. 1498 (SEQ ID NO:1498), FIG. 1500 (SEQ ID NO:1500), FIG. 1502 (SEQ ID NO:1502), FIG. 1504 (SEQ ID NO:1504), FIG. 1506 (SEQ ID NO:1506), FIG. 1508 (SEQ ID NO:1508), FIG. 1510 (SEQ ID NO:1510), FIG. 1512 (SEQ ID NO:1512), FIG. 1514 (SEQ ID NO:1514), FIG. 1516 (SEQ ID NO:1516), FIG. 1518 (SEQ ID NO:1518), FIG. 1520 (SEQ ID NO:1520), FIG. 1522 (SEQ ID NO:1522), FIG. 1524 (SEQ ID NO:1524), FIG. 1526 (SEQ ID NO:1526), FIG. 1528 (SEQ ID NO:1528), FIG. 1530 (SEQ ID NO:1530), FIG. 1532 (SEQ ID NO:1532), FIG. 1534 (SEQ ID NO:1534), FIG. 1536 (SEQ ID NO:1536), FIG. 1538 (SEQ ID NO:1538), FIG. 1540 (SEQ ID NO:1540), FIG. 1542 (SEQ ID NO:1542), FIG. 1544 (SEQ ID NO:1544), FIG. 1546 (SEQ ID NO:1546), FIG. 1548 (SEQ ID NO:1548), FIG. 1550 (SEQ ID NO:1550), FIG. 1552 (SEQ ID NO:1552), FIG. 1554 (SEQ ID NO:1554), FIG. 1556 (SEQ ID NO:1556), FIG. 1558 A-B (SEQ ID NO:1558), FIG. 1560 (SEQ ID NO:1560), FIG. 1562 (SEQ ID NO:1562), FIG. 1564 (SEQ ID NO:1564), FIG. 1566 (SEQ ID NO:1566), FIG. 1568 (SEQ ID NO:1568), FIG. 1570 A-B (SEQ ID NO:1570), FIG. 1572A-C (SEQ ID NO:1572), FIG. 1574 (SEQ ID NO:1574), FIG. 1576 (SEQ ID NO:1576), FIG. 1577 (SEQ ID NO:1577), FIG. 1579 (SEQ ID NO:1579), FIG. 1580 (SEQ ID NO:1580), FIG. 1582 A-B (SEQ ID NO:1582), FIG. 1584 (SEQ ID NO:1584), FIG. 1586 (SEQ ID NO:1586), FIG. 1588 A-B (SEQ ID NO:1588), FIG. 1590 (SEQ ID NO:1590), FIG. 1591 (SEQ ID NO:1591), FIG. 1593 (SEQ ID NO:1593), FIG. 1595 (SEQ ID NO:1595), FIG. 1597 (SEQ ID NO:1597), FIG. 1599A-D (SEQ ID NO:1599), FIG. 1601A-E (SEQ ID NO:1601), FIG. 1603 A-B (SEQ ID NO:1603), FIG. 1605 A-B (SEQ ID NO:1605), FIG. 1607 (SEQ ID NO:1607), FIG. 1608 (SEQ ID NO:1608), FIG. 1610 (SEQ ID NO:1610), FIG. 1612 (SEQ ID NO:1612), FIG. 1613 A-B (SEQ ID NO:1613), FIG. 1615 (SEQ ID NO:1615), FIG. 1616 (SEQ ID NO:1616), FIG. 1618 (SEQ ID NO:1618), FIG. 1620 A-B (SEQ ID NO:1620), FIG. 1622 (SEQ ID NO:1622), FIG. 1624 (SEQ ID NO:1624), FIG. 1625 (SEQ ID NO:1625), FIG. 1627 (SEQ ID NO:1627), FIG. 1629 (SEQ ID NO:1629), FIG. 1631 (SEQ ID NO:1631), FIG. 1633 (SEQ ID NO:1633), FIG. 1634 (SEQ ID NO:1634), FIG. 1635 (SEQ ID NO:1635), FIG. 1637 (SEQ ID NO:1637), FIG. 1638 (SEQ ID NO:1638), FIG. 1640 (SEQ ID NO:1640), FIG. 1641 (SEQ ID NO:1641), FIG. 1642 (SEQ ID NO:1642), FIG. 1643 (SEQ ID NO:1643), FIG. 1645 (SEQ ID NO:1645), FIG. 1647 A-B (SEQ ID NO:1647), FIG. 1649 (SEQ ID NO:1649), FIG. 1651 (SEQ ID NO:1651), FIG. 1653 (SEQ ID NO:1653), FIG. 1655 (SEQ ID NO:1655), FIG. 1657 (SEQ ID NO:1657), FIG. 1659 (SEQ ID NO:1659), FIG. 1661 (SEQ ID NO:1661), FIG. 1663 (SEQ ID NO:1663), FIG. 1665 (SEQ ID NO:1665), FIG. 1667 (SEQ ID NO:1667), FIG. 1669 (SEQ ID NO:1669), FIG. 1671 (SEQ ID NO:1671), FIG. 1673 (SEQ ID NO:1673), FIG. 1675 (SEQ ID NO:1675), FIG. 1677 (SEQ ID NO:1677), FIG. 1679 A-B (SEQ ID NO:1679), FIG. 1681 (SEQ ID NO:1681), FIG. 1682A-B (SEQ ID NO:1682), FIG. 1684 A-B (SEQ ID NO:1684), FIG. 1686 A-B (SEQ ID NO:1686), FIG. 1688 (SEQ ID NO:1688), FIG. 1690 (SEQ ID NO:1690), FIG. 1691 (SEQ ID NO:1691), FIG. 1693 (SEQ ID NO:1693), FIG. 1695 (SEQ ID NO:1695), FIG. 1697 (SEQ ID NO:1697), FIG. 1699 (SEQ ID NO:1699), FIG. 1700 (SEQ ID NO:1700), FIG. 1702 (SEQ ID NO:1702), FIG. 1704 (SEQ ID NO:1704), FIG. 1706 (SEQ ID NO:1706), FIG. 1708A-C (SEQ ID NO:1708), FIG. 1710 (SEQ ID NO:1710), FIG. 1712 (SEQ ID NO:1712), FIG. 1714 (SEQ ID NO:1714), FIG. 1716 (SEQ ID NO:1716), FIG. 1718 (SEQ ID NO:1718), FIG. 1720A-C (SEQ ID NO:1720), FIG. 1722 (SEQ ID NO:1722), FIG. 1724A-B (SEQ ID NO:1724), FIG. 1726 (SEQ ID NO:1726), FIG. 1728A-B (SEQ ID NO:1728), FIG. 1730 (SEQ ID NO:1730), FIG. 1731 (SEQ ID NO:1731), FIG. 1733 (SEQ ID NO:1733), FIG. 1735 (SEQ ID NO:1735), FIG. 1737 (SEQ ID NO:1737), FIG. 1739 (SEQ ID NO:1739), FIG. 1740 (SEQ ID NO:1740), FIG. 1742 (SEQ ID NO:1742), FIG. 1744 (SEQ ID NO:1744), FIG. 1746 (SEQ ID NO:1746), FIG. 1748 (SEQ ID NO:1748), FIG. 1750 (SEQ ID NO:1750), FIG. 1752A-B (SEQ ID NO:1752), FIG. 1754 (SEQ ID NO:1754), FIG. 1756 (SEQ ID NO:1756), FIG. 1758 (SEQ ID NO:1758), FIG. 1759 (SEQ ID NO:1759), FIG. 1761 (SEQ ID NO:1761), FIG. 1763 (SEQ ID NO:1763), FIG. 1765 (SEQ ID NO:1765), FIG. 1767 (SEQ ID NO:1767), FIG. 1768 (SEQ ID NO:1768), FIG. 1770 (SEQ ID NO:1770), FIG. 1772 (SEQ ID NO:1772), FIG. 1774 (SEQ ID NO:1774), FIG. 1776 (SEQ ID NO:1776), FIG. 1778 (SEQ ID NO:1778), FIG. 1780 (SEQ ID NO:1780), FIG. 1782 (SEQ ID NO:1782), FIG. 1784 (SEQ ID NO:1784), FIG. 1786 (SEQ ID NO:1786), FIG. 1788 (SEQ ID NO:1788), FIG. 1790 (SEQ ID NO:1790), FIG. 1791 (SEQ ID NO:1791), FIG. 1793 (SEQ ID NO:1793), FIG. 1794 (SEQ ID NO:1794), FIG. 1796 (SEQ ID NO:1796), FIG. 1798 (SEQ ID NO:1798), FIG. 1800 (SEQ ID NO:1800), FIG. 1801 (SEQ ID NO:1801), FIG. 1803 (SEQ ID NO:1803), FIG. 1804 (SEQ ID NO:1804), FIG. 1806 (SEQ ID NO:1806), FIG. 1808 (SEQ ID NO:1808), FIG. 1810 (SEQ ID NO:1810), FIG. 1812A-B (SEQ ID NO:1812), FIG. 1814 (SEQ ID NO:1814), FIG. 1816 (SEQ ID NO:1816), FIG. 1818 (SEQ ID NO:1818), FIG. 1820 (SEQ ID NO:1820), FIG. 1822 (SEQ ID NO:1822), FIG. 1824A-B (SEQ ID NO:1824), FIG. 1826 (SEQ ID NO:1826), FIG. 1828 (SEQ ID NO:1828), FIG. 1830 (SEQ ID NO:1830), FIG. 1832 (SEQ ID NO:1832), FIG. 1834 (SEQ ID NO:1834), FIG. 1835 (SEQ ID NO:1835), FIG. 1837 (SEQ ID NO:1837), FIG. 1839 (SEQ ID NO:1839), FIG. 1840 (SEQ ID NO:1840), FIG. 1842 (SEQ ID NO:1842), FIG. 1844A-B (SEQ ID NO:1844), FIG. 1846 (SEQ ID NO:1846), FIG. 1848A-B (SEQ ID NO:1848), FIG. 1850 (SEQ ID NO:1850), FIG. 1852 (SEQ ID NO:1852), FIG. 1853A-B (SEQ ID NO:1853), FIG. 1855 (SEQ ID NO:1855), FIG. 1857 (SEQ ID NO:1857), FIG. 1859 (SEQ ID NO:1859), FIG. 1861 (SEQ ID NO:1861), FIG. 1862A-B (SEQ ID NO:1862), FIG. 1864 (SEQ ID NO:1864), FIG. 1866 (SEQ ID NO:1866), FIG. 1868A-B (SEQ ID NO:1868), FIG. 1870 (SEQ ID NO:1870), FIG. 1872 (SEQ ID NO:1872), FIG. 1874 (SEQ ID NO:1874), FIG. 1876 (SEQ ID NO:1876), FIG. 1878 (SEQ ID NO:1878), FIG. 1879 (SEQ ID NO:1879), FIG. 1880 (SEQ ID NO:1880), FIG. 1882 (SEQ ID NO:1882), FIG. 1884 (SEQ ID NO:1884), FIG. 1886A-B (SEQ ID NO:1886), FIG. 1888 (SEQ ID NO:1888), FIG. 1890 (SEQ ID NO:1890), FIG. 1892 (SEQ ID NO:1892), FIG. 1894 (SEQ ID NO:1894), FIG. 1896 (SEQ ID NO:1896), FIG. 1898A-B (SEQ ID NO:1898), FIG. 1900 (SEQ ID NO:1900), FIG. 1902 (SEQ ID NO:1902), FIG. 1904 (SEQ ID NO:1904), FIG. 1906A-B (SEQ ID NO:1906), FIG. 1907 (SEQ ID NO:1907), FIG. 1909 (SEQ ID NO:1909), FIG. 1911 (SEQ ID NO:1911), FIG. 1912 (SEQ ID NO:1912), FIG. 1914 (SEQ ID NO:1914), FIG. 1916A-B (SEQ ID NO:1916), FIG. 1918 (SEQ ID NO:1918), FIG. 1920A-B (SEQ ID NO:1920), FIG. 1921 (SEQ ID NO:1921), FIG. 1923 (SEQ ID NO:1923), FIG. 1925 (SEQ ID NO:1925), FIG. 1927 (SEQ ID NO:1927), FIG. 1929 (SEQ ID NO:1929), FIG. 1931 (SEQ ID NO:1931), FIG. 1933 (SEQ ID NO:1933), FIG. 1935 (SEQ ID NO:1935), FIG. 1937 (SEQ ID NO:1937), FIG. 1939 (SEQ ID NO:1939), FIG. 1941 (SEQ ID NO:1941), FIG. 1943 (SEQ ID NO:1943), FIG. 1945 (SEQ ID NO:1945), FIG. 1947 (SEQ ID NO:1947), FIG. 1949 (SEQ ID NO:1949), FIG. 1951 (SEQ ID NO:1951), FIG. 1953 (SEQ ID NO:1953), FIG. 1955 (SEQ ID NO:1955), FIG. 1957 (SEQ ID NO:1957), FIG. 1959 (SEQ ID NO:1959), FIG. 1961 (SEQ ID NO:1961), FIG. 1963A-B (SEQ ID NO:1963), FIG. 1965 (SEQ ID NO:1965), FIG. 1967 (SEQ ID NO:1967), FIG. 1969 (SEQ ID NO:1969), FIG. 1971 (SEQ ID NO:1971), FIG. 1973 (SEQ ID NO:1973), FIG. 1975 (SEQ ID NO:1975), FIG. 1977 (SEQ ID NO:1977), FIG. 1979 (SEQ ID NO:1979), FIG. 1981 (SEQ ID NO:1981), FIG. 1983 (SEQ ID NO:1983), FIG. 1985 (SEQ ID NO:1985), FIG. 1987 (SEQ ID NO:1987), FIG. 1989 (SEQ ID NO:1989), FIG. 1991 (SEQ ID NO:1991), FIG. 1993 (SEQ ID NO:1993), FIG. 1995 (SEQ ID NO:1995), FIG. 1997 (SEQ ID NO:1997), FIG. 1999 (SEQ ID NO:1999), FIG. 2001 (SEQ ID NO:2001), FIG. 2003 (SEQ ID NO:2003), FIG. 2005A-B (SEQ ID NO:2005), FIG. 2007 (SEQ ID NO:2007), FIG. 2009 (SEQ ID NO:2009), FIG. 2011 (SEQ ID NO:2011), FIG. 2013 (SEQ ID NO:2013), FIG. 2015 (SEQ ID NO:2015), FIG. 2017A-B (SEQ ID NO:2017), FIG. 2019A-B (SEQ ID NO:2019), FIG. 2021 (SEQ ID NO:2021), FIG. 2023 (SEQ ID NO:2023), FIG. 2025 (SEQ ID NO:2025), FIG. 2027 (SEQ ID NO:2027), FIG. 2029 (SEQ ID NO:2029), FIG. 2031 (SEQ ID NO:2031), FIG. 2033 (SEQ ID NO:2033), FIG. 2035 (SEQ ID NO:2035), FIG. 2037 (SEQ ID NO:2037), FIG. 2039 (SEQ ID NO:2039), FIG. 2041 (SEQ ID NO:2041), FIG. 2043 (SEQ ID NO:2043), FIG. 2045 (SEQ ID NO:2045), FIG. 2047 (SEQ ID NO:2047), FIG. 2049A-B (SEQ ID NO:2049), FIG. 2051 (SEQ ID NO:2051), FIG. 2053 (SEQ ID NO:2053), FIG. 2055A-B (SEQ ID NO:2055), FIG. 2057 (SEQ ID NO:2057), FIG. 2059 (SEQ ID NO:2059), FIG. 2061 (SEQ ID NO:2061), FIG. 2063 (SEQ ID NO:2063), FIG. 2065 (SEQ ID NO:2065), FIG. 2067 (SEQ ID NO:2067), FIG. 2069 (SEQ ID NO:2069), FIG. 2071A-B (SEQ ID NO:2071), FIG. 2073 (SEQ ID NO:2073), FIG. 2075 (SEQ ID NO:2075), FIG. 2077 (SEQ ID NO:2077), FIG. 2079 (SEQ ID NO:2079), FIG. 2081 (SEQ ID NO:2081), FIG. 2083 (SEQ ID NO:2083), FIG. 2085 (SEQ ID NO:2085), FIG. 2087 (SEQ ID NO:2087), FIG. 2089 (SEQ ID NO:2089), FIG. 2091 (SEQ ID NO:2091), FIG. 2093 (SEQ ID NO:2093), FIG. 2095 (SEQ ID NO:2095), FIG. 2097 (SEQ ID NO:2097), FIG. 2099 (SEQ ID NO:2099), FIG. 2101 (SEQ ID NO:2101), FIG. 2103 (SEQ ID NO:2103), FIG. 2105 (SEQ ID NO:2105), FIG. 2107 (SEQ ID NO:2107), FIG. 2109 (SEQ ID NO:2109), FIG. 2111 (SEQ ID NO:2111), FIG. 2113 (SEQ ID NO:2113), FIG. 2115 (SEQ ID NO:2115), FIG. 2117 (SEQ ID NO:2117), FIG. 2119 (SEQ ID NO:2119), FIG. 2121 (SEQ ID NO:2121), FIG. 2123 (SEQ ID NO:2123), FIG. 2125 (SEQ ID NO:2125), FIG. 2127 (SEQ ID NO:2127), FIG. 2129 (SEQ ID NO:2129), FIG. 2131 (SEQ ID NO:2131), FIG. 2133 (SEQ ID NO:2133), FIG. 2135 (SEQ ID NO:2135), FIG. 2137 (SEQ ID NO:2137), FIG. 2139 (SEQ ID NO:2139), FIG. 2141 (SEQ ID NO:2141), FIG. 2143 (SEQ ID NO:2143), FIG. 2145A-B (SEQ ID NO:2145), FIG. 2147 (SEQ ID NO:2147), FIG. 2149 (SEQ ID NO:2149), FIG. 2151 (SEQ ID NO:2151), FIG. 2153 (SEQ ID NO:2153), FIG. 2155 (SEQ ID NO:2155), FIG. 2157 (SEQ ID NO:2157), FIG. 2159 (SEQ ID NO:2159), FIG. 2161A-B (SEQ ID NO:2161), FIG. 2162 (SEQ ID NO:2162), FIG. 2164 (SEQ ID NO:2164), FIG. 2166A-B (SEQ ID NO:2166), FIG. 2168 (SEQ ID NO:2168), FIG. 2169 (SEQ ID NO:2169), FIG. 2171A-B (SEQ ID NO:2171), FIG. 2173 (SEQ ID NO:2173), FIG. 2175A-B (SEQ ID NO:2175), FIG. 2177 (SEQ ID NO:2177), FIG. 2179 (SEQ ID NO:2179), FIG. 2181 (SEQ ID NO:2181), FIG. 2183 (SEQ ID NO:2183), FIG. 2185A-B (SEQ ID NO:2185), FIG. 2187 (SEQ ID NO:2187), FIG. 2189 (SEQ ID NO:2189), FIG. 2190A-B (SEQ ID NO:2190), FIG. 2192 (SEQ ID NO:2192), FIG. 2194 (SEQ ID NO:2194), FIG. 2196 (SEQ ID NO:2196), FIG. 2198 (SEQ ID NO:2198), FIG. 2200 (SEQ ID NO:2200), FIG. 2202 (SEQ ID NO:2202), FIG. 2203 (SEQ ID NO:2203), FIG. 2205 (SEQ ID NO:2205), FIG. 2206A-B (SEQ ID NO:2206), FIG. 2208 (SEQ ID NO:2208), FIG. 2210 (SEQ ID NO:2210), FIG. 2211 (SEQ ID NO:2211), FIG. 2213 (SEQ ID NO:2213), FIG. 2215 (SEQ ID NO:2215), FIG. 2217 (SEQ ID NO:2217), FIG. 2219 (SEQ ID NO:2219), FIG. 2221 (SEQ ID NO:2221), FIG. 2223 (SEQ ID NO:2223), FIG. 2225 (SEQ ID NO:2225), FIG. 2227 (SEQ ID NO:2227), FIG. 2229 (SEQ ID NO:2229), FIG. 2231 (SEQ ID NO:2231), FIG. 2233 (SEQ ID NO:2233), FIG. 2235 (SEQ ID NO:2235), FIG. 2237 (SEQ ID NO:2237), FIG. 2239 (SEQ ID NO:2239), FIG. 2241 (SEQ ID NO:2241), FIG. 2243 (SEQ ID NO:2243), FIG. 2245 (SEQ ID NO:2245), FIG. 2247 (SEQ ID NO:2247), FIG. 2249 (SEQ ID NO:2249), FIG. 2251 (SEQ ID NO:2251), FIG. 2253 (SEQ ID NO:2253), FIG. 2255 (SEQ ID NO:2255), FIG. 2257 (SEQ ID NO:2257), FIG. 2259 (SEQ ID NO:2259), FIG. 2261 (SEQ ID NO:2261), FIG. 2263 (SEQ ID NO:2263), FIG. 2265 (SEQ ID NO:2265), FIG. 2267 (SEQ ID NO:2267), FIG. 2269 (SEQ ID NO:2269), FIG. 2271 (SEQ ID NO:2271), FIG. 2273 (SEQ ID NO:2273), FIG. 2275 (SEQ ID NO:2275), FIG. 2277 (SEQ ID NO:2277), FIG. 2279 (SEQ ID NO:2279), FIG. 2281 (SEQ ID NO:2281), FIG. 2283 (SEQ ID NO:2283), FIG. 2285 (SEQ ID NO:2285), FIG. 2287 (SEQ ID NO:2287), FIG. 2289 (SEQ ID NO:2289), FIG. 2291 (SEQ ID NO:2291), FIG. 2293 (SEQ ID NO:2293), FIG. 2295 (SEQ ID NO:2295), FIG. 2297 (SEQ ID NO:2297), FIG. 2299 (SEQ ID NO:2299), FIG. 2300 (SEQ ID NO:2300), FIG. 2302A-B (SEQ ID NO:2302), FIG. 2304 (SEQ ID NO:2304), FIG. 2306 (SEQ ID NO:2306), FIG. 2308 (SEQ ID NO:2308), FIG. 2309 (SEQ ID NO:2309), FIG. 2311 (SEQ ID NO:2311), FIG. 2313 (SEQ ID NO:2313), FIG. 2315 (SEQ ID NO:2315), FIG. 2317 (SEQ ID NO:2317), FIG. 2318 (SEQ ID NO:2318), FIG. 2320A-B (SEQ ID NO:2320), FIG. 2322 (SEQ ID NO:2322), FIG. 2324 (SEQ ID NO:2324), FIG. 2326 (SEQ ID NO:2326), FIG. 2328 (SEQ ID NO:2328), FIG. 2330A-B (SEQ ID NO:2330), FIG. 2332 (SEQ ID NO:2332), FIG. 2334 (SEQ ID NO:2334), FIG. 2336A-B (SEQ ID NO:2336), FIG. 2338 (SEQ ID NO:2338), FIG. 2340 (SEQ ID NO:2340), FIG. 2342 (SEQ ID NO:2342), FIG. 2344 (SEQ ID NO:2344), FIG. 2346 (SEQ ID NO:2346), FIG. 2348 (SEQ ID NO:2348), FIG. 2350 (SEQ ID NO:2350), FIG. 2352 (SEQ ID NO:2352), FIG. 2354A-B (SEQ ID NO:2354), FIG. 2356 (SEQ ID NO:2356), FIG. 2358 (SEQ ID NO:2358), FIG. 2360 (SEQ ID NO:2360), FIG. 2362 (SEQ ID NO:2362), FIG. 2364 (SEQ ID NO:2364), FIG. 2366 (SEQ ID NO:2366), FIG. 2368 (SEQ ID NO:2368), FIG. 2370 (SEQ ID NO:2370), FIG. 2372 (SEQ ID NO:2372), FIG. 2374 (SEQ ID NO:2374), FIG. 2376A-B (SEQ ID NO:2376), FIG. 2377 (SEQ ID NO:2377), FIG. 2379 (SEQ ID NO:2379), FIG. 2381 (SEQ ID NO:2381), FIG. 2382 (SEQ ID NO:2382), FIG. 2384 (SEQ ID NO:2384), FIG. 2385 (SEQ ID NO:2385), FIG. 2387 (SEQ ID NO:2387), FIG. 2389 (SEQ ID NO:2389), FIG. 2390 (SEQ ID NO:2390), FIG. 2392 (SEQ ID NO:2392), FIG. 2394 (SEQ ID NO:2394), FIG. 2395A-B (SEQ ID NO:2395), FIG. 2397 (SEQ ID NO:2397), FIG. 2399 (SEQ ID NO:2399), FIG. 2400 (SEQ ID NO:2400), FIG. 2401 (SEQ ID NO:2401), FIG. 2403 (SEQ ID NO:2403), FIG. 2405 (SEQ ID NO:2405), FIG. 2406 (SEQ ID NO:2406), FIG. 2407 (SEQ ID NO:2407), FIG. 2409 (SEQ ID NO:2409), FIG. 2411 (SEQ ID NO:2411), FIG. 2413 (SEQ ID NO:2413), FIG. 2414 (SEQ ID NO:2414), FIG. 2416 (SEQ ID NO:2416), FIG. 2417 (SEQ ID NO:2417), FIG. 2419 (SEQ ID NO:2419), FIG. 2421 (SEQ ID NO:2421), FIG. 2423 (SEQ ID NO:2423), FIG. 2425 (SEQ ID NO:2425), FIG. 2427 (SEQ ID NO:2427), FIG. 2428 (SEQ ID NO:2428), FIG. 2429 (SEQ ID NO:2429), FIG. 2431 (SEQ ID NO:2431), FIG. 2433 (SEQ ID NO:2433), FIG. 2435 (SEQ ID NO:2435), FIG. 2437 (SEQ ID NO:2437), FIG. 2439 (SEQ ID NO:2439) or FIG. 2441 (SEQ ID NO:2441).

4. A vector comprising the nucleic acid of claim 1.

5. The vector of claim 4 operably linked to control sequences recognized by a host cell transformed with the vector.

6. A host cell comprising the vector of claim 4.

7. The host cell of claim 6, wherein said cell is a CHO cell, an E. coli cell or a yeast cell.

8. A process for producing a PRO polypeptide comprising culturing the host cell of claim 7 under conditions suitable for expression of said PRO polypeptide and recovering said PRO polypeptide from the cell culture.

9. An isolated polypeptide having at least 80% amino acid sequence identity to an amino acid sequence of the polypeptide shown in FIG. 2 (SEQ ID NO:2), FIG. 4 (SEQ ID NO:4), FIG. 6 (SEQ ID NO:6), FIG. 8 (SEQ ID NO:8), FIG. 10 (SEQ ID NO:10), FIG. 12 (SEQ ID NO:12), FIG. 14 (SEQ ID NO:14), FIG. 16 (SEQ ID NO:16), FIG. 18 (SEQ ID NO:18), FIG. 20 (SEQ ID NO:20), FIG. 22 (SEQ ID NO:22), FIG. 24 (SEQ ID NO:24), FIG. 26 (SEQ ID NO:26), FIG. 28 (SEQ ID NO:28), FIG. 30 (SEQ ID NO:30), FIG. 32 (SEQ ID NO:32), FIG. 34 (SEQ ID NO:34), FIG. 36 (SEQ ID NO:36), FIG. 38 (SEQ ID NO:38), FIG. 40 (SEQ ID NO:40), FIG. 42 (SEQ ID NO:42), FIG. 44 (SEQ ID NO:44), FIG. 46 (SEQ ID NO:46), FIG. 48 (SEQ ID NO:48), FIG. 50 (SEQ ID NO:50), FIG. 52 (SEQ ID NO:52), FIG. 54 (SEQ ID NO:54), FIG. 56 (SEQ ID NO:56), FIG. 58 (SEQ ID NO:58), FIG. 60 (SEQ ID NO:60), FIG. 62 (SEQ ID NO:62), FIG. 64 (SEQ ID NO:64), FIG. 66 (SEQ ID NO:66), FIG. 68 (SEQ ID NO:68), FIG. 70 (SEQ ID NO:70), FIG. 72 (SEQ ID NO:72), FIG. 74 (SEQ ID NO:74), FIG. 76 (SEQ ID NO:76), FIG. 78 (SEQ ID NO:78), FIG. 80 (SEQ ID NO:80), FIG. 82 (SEQ ID NO:82), FIG. 84 (SEQ ID NO:84), FIG. 86 (SEQ ID NO:86), FIG. 88 (SEQ ID NO:88), FIG. 90 (SEQ ID NO:90), FIG. 92 (SEQ ID NO:92), FIG. 94 (SEQ ID NO:94), FIG. 96 (SEQ ID NO:96), FIG. 98 (SEQ ID NO:98), FIG. 100 (SEQ ID NO:100), FIG. 102 (SEQ ID NO:102), FIG. 104 (SEQ ID NO:104), FIG. 106 (SEQ ID NO:106), FIG. 108 (SEQ ID NO:108), FIG. 110 (SEQ ID NO:110), FIG. 112 (SEQ ID NO:112), FIG. 114 (SEQ ID NO:114), FIG. 116 (SEQ ID NO:116), FIG. 118 (SEQ ID NO:118), FIG. 121 (SEQ ID NO:121), FIG. 123 (SEQ ID NO:123), FIG. 125 (SEQ ID NO:125), FIG. 127 (SEQ ID NO:127), FIG. 129 (SEQ ID NO:129), FIG. 131 (SEQ ID NO:131), FIG. 133 (SEQ ID NO:133), FIG. 135 (SEQ ID NO:135), FIG. 137 (SEQ ID NO:137), FIG. 139 (SEQ ID NO:139), FIG. 141 (SEQ ID NO:141), FIG. 143 (SEQ ID NO:143), FIG. 145 (SEQ ID NO:145), FIG. 147 (SEQ ID NO:147), FIG. 149 (SEQ ID NO:149), FIG. 151 (SEQ ID NO:151), FIG. 153 (SEQ ID NO:153), FIG. 155 (SEQ ID NO:155), FIG. 157 (SEQ ID NO:157), FIG. 159 (SEQ ID NO:159), FIG. 161 (SEQ ID NO:161), FIG. 163 (SEQ ID NO:163), FIG. 165 (SEQ ID NO:165), FIG. 167 (SEQ ID NO:167), FIG. 169 (SEQ ID NO:169), FIG. 171 (SEQ ID NO:171), FIG. 173 (SEQ ID NO:173), FIG. 175 (SEQ ID NO:175), FIG. 177 (SEQ ID NO:177), FIG. 179 (SEQ ID NO:179), FIG. 181 (SEQ ID NO:181), FIG. 183 (SEQ ID NO:183), FIG. 185 (SEQ ID NO:185), FIG. 187 (SEQ ID NO:187), FIG. 189 (SEQ ID NO:189), FIG. 191 (SEQ ID NO:191), FIG. 193 (SEQ ID NO:193), FIG. 195 (SEQ ID NO:195), FIG. 197 (SEQ ID NO:197), FIG. 199 (SEQ ID NO:199), FIG. 201 (SEQ ID NO:201), FIG. 203 (SEQ ID NO:203), FIG. 205 (SEQ ID NO:205), FIG. 207 (SEQ ID NO:207), FIG. 209 (SEQ ID NO:209), FIG. 211 (SEQ ID NO:211), FIG. 213 (SEQ ID NO:213), FIG. 215 (SEQ ID NO:215), FIG. 217 (SEQ ID NO:217), FIG. 219 (SEQ ID NO:219), FIG. 221 (SEQ ID NO:221), FIG. 223 (SEQ ID NO:223), FIG. 225 (SEQ ID NO:225), FIG. 227 (SEQ ID NO:227), FIG. 229 (SEQ ID NO:229), FIG. 231 (SEQ ID NO:231), FIG. 233 (SEQ ID NO:233), FIG. 235 (SEQ ID NO:235), FIG. 237 (SEQ ID NO:237), FIG. 239 (SEQ ID NO:239), FIG. 241 (SEQ ID NO:241), FIG. 243 (SEQ ID NO:243), FIG. 245 (SEQ ID NO:245), FIG. 247 (SEQ ID NO:247), FIG. 249 (SEQ ID NO:249), FIG. 251 (SEQ ID NO:251), FIG. 254 (SEQ ID NO:254), FIG. 256 (SEQ ID NO:256), FIG. 258 (SEQ ID NO:258), FIG. 260 (SEQ ID NO:260), FIG. 262 (SEQ ID NO:262), FIG. 264 (SEQ ID NO:264), FIG. 266 (SEQ ID NO:266), FIG. 268 (SEQ ID NO:268), FIG. 270 (SEQ ID NO:270), FIG. 272 (SEQ ID NO:272), FIG. 274 (SEQ ID NO:274), FIG. 276 (SEQ ID NO:276), FIG. 278 (SEQ ID NO:278), FIG. 280 (SEQ ID NO:280), FIG. 282 (SEQ ID NO:282), FIG. 284 (SEQ ID NO:284), FIG. 286 (SEQ ID NO:286), FIG. 288 (SEQ ID NO:288), FIG. 290 (SEQ ID NO:290), FIG. 292 (SEQ ID NO:292), FIG. 294 (SEQ ID NO:294), FIG. 296 (SEQ ID NO:296), FIG. 298 (SEQ ID NO:298), FIG. 300 (SEQ ID NO:300), FIG. 302 (SEQ ID NO:302), FIG. 304 (SEQ ID NO:304), FIG. 306 (SEQ ID NO:306), FIG. 308 (SEQ ID NO:308), FIG. 310 (SEQ ID NO:310), FIG. 312 (SEQ ID NO:312), FIG. 314 (SEQ ID NO:314), FIG. 316 (SEQ ID NO:316), FIG. 318 (SEQ ID NO:318), FIG. 320 (SEQ ID NO:320), FIG. 322 (SEQ ID NO:322), FIG. 324 (SEQ ID NO:324), FIG. 326 (SEQ ID NO:326), FIG. 328 (SEQ ID NO:328), FIG. 330 (SEQ ID NO:330), FIG. 332 (SEQ ID NO:332), FIG. 334 (SEQ ID NO:334), FIG. 336 (SEQ ID NO:336), FIG. 338 (SEQ ID NO:338), FIG. 340 (SEQ ID NO:340), FIG. 342 (SEQ ID NO:342), FIG. 344 (SEQ ID NO:344), FIG. 346 (SEQ ID NO:346), FIG. 348 (SEQ ID NO:348), FIG. 350 (SEQ ID NO:350), FIG. 352 (SEQ ID NO:352), FIG. 354 (SEQ ID NO:354), FIG. 356 (SEQ ID NO:356), FIG. 358 (SEQ ID NO:358), FIG. 360 (SEQ ID NO:360), FIG. 362 (SEQ ID NO:362), FIG. 364 (SEQ ID NO:364), FIG. 366 (SEQ ID NO:366), FIG. 368 (SEQ ID NO:368), FIG. 370 (SEQ ID NO:370), FIG. 372 (SEQ ID NO:372), FIG. 374 (SEQ ID NO:374), FIG. 376 (SEQ ID NO:376), FIG. 378 (SEQ ID NO:378), FIG. 380 (SEQ ID NO:380), FIG. 382 (SEQ ID NO:382), FIG. 384 (SEQ ID NO:384), FIG. 386 (SEQ ID NO:386), FIG. 388 (SEQ ID NO:388), FIG. 390 (SEQ ID NO:390), FIG. 392 (SEQ ID NO:392), FIG. 394 (SEQ ID NO:394), FIG. 396 (SEQ ID NO:396), FIG. 398 (SEQ ID NO:398), FIG. 400 (SEQ ID NO:400), FIG. 402 (SEQ ID NO:402), FIG. 404 (SEQ ID NO:404), FIG. 406 (SEQ ID NO:406), FIG. 408 (SEQ ID NO:408), FIG. 410 (SEQ ID NO:410), FIG. 412 (SEQ ID NO:412), FIG. 414 (SEQ ID NO:414), FIG. 416 (SEQ ID NO:416), FIG. 418 (SEQ ID NO:418), FIG. 420 (SEQ ID NO:420), FIG. 422 (SEQ ID NO:422), FIG. 424 (SEQ ID NO:424), FIG. 426 (SEQ ID NO:426), FIG. 428 (SEQ ID NO:428), FIG. 430 (SEQ ID NO:430), FIG. 432 (SEQ ID NO:432), FIG. 434 (SEQ ID NO:434), FIG. 436 (SEQ ID NO:436), FIG. 438 (SEQ ID NO:438), FIG. 440 (SEQ ID NO:440), FIG. 442 (SEQ ID NO:442), FIG. 444 (SEQ ID NO:444), FIG. 446 (SEQ ID NO:446), FIG. 448 (SEQ ID NO:448), FIG. 450 (SEQ ID NO:450), FIG. 452 (SEQ ID NO:452), FIG. 454 (SEQ ID NO:454), FIG. 456 (SEQ ID NO:456), FIG. 458 (SEQ ID NO:458), FIG. 460 (SEQ ID NO:460), FIG. 462 (SEQ ID NO:462), FIG. 464 (SEQ ID NO:464), FIG. 466 (SEQ ID NO:466), FIG. 468 (SEQ ID NO:468), FIG. 470 (SEQ ID NO:470), FIG. 472 (SEQ ID NO:472), FIG. 474 (SEQ ID NO:474), FIG. 476 (SEQ ID NO:476), FIG. 478 (SEQ ID NO:478), FIG. 480 (SEQ ID NO:480), FIG. 482 (SEQ ID NO:482), FIG. 484 (SEQ ID NO:484), FIG. 486 (SEQ ID NO:486), FIG. 488 (SEQ ID NO:488), FIG. 490 (SEQ ID NO:490), FIG. 492 (SEQ ID NO:492), FIG. 494 (SEQ ID NO:494), FIG. 496 (SEQ ID NO:496), FIG. 498 (SEQ ID NO:498), FIG. 500 (SEQ ID NO:500), FIG. 502 (SEQ ID NO:502), FIG. 504 (SEQ ID NO:504), FIG. 506 (SEQ ID NO:506), FIG. 508 (SEQ ID NO:508), FIG. 510 (SEQ ID NO:510), FIG. 512 (SEQ ID NO:512), FIG. 514 (SEQ ID NO:514), FIG. 516 (SEQ ID NO:516), FIG. 518 (SEQ ID NO:518), FIG. 520 (SEQ ID NO:520), FIG. 522 (SEQ ID NO:522), FIG. 524 (SEQ ID NO:524), FIG. 526 (SEQ ID NO:526), FIG. 528 (SEQ ID NO:528), FIG. 530 (SEQ ID NO:530), FIG. 532 (SEQ ID NO:532), FIG. 534 (SEQ ID NO:534), FIG. 536 (SEQ ID NO:536), FIG. 538 (SEQ ID NO:538), FIG. 540 (SEQ ID NO:540), FIG. 542 (SEQ ID NO:542), FIG. 544 (SEQ ID NO:544), FIG. 546 (SEQ ID NO:546), FIG. 549 (SEQ ID NO:549), FIG. 551 (SEQ ID NO:551), FIG. 553 (SEQ ID NO:553), FIG. 555 (SEQ ID NO:555), FIG. 557 (SEQ ID NO:557), FIG. 559 (SEQ ID NO:559), FIG. 561 (SEQ ID NO:561), FIG. 563 (SEQ ID NO:563), FIG. 565 (SEQ ID NO:565), FIG. 567 (SEQ ID NO:567), FIG. 569 (SEQ ID NO:569), FIG. 571 (SEQ ID NO:571), FIG. 573 (SEQ ID NO:573), FIG. 575 (SEQ ID NO:575), FIG. 577 (SEQ ID NO:577), FIG. 579 (SEQ ID NO:579), FIG. 581 (SEQ ID NO:581), FIG. 583 (SEQ ID NO:583), FIG. 585 (SEQ ID NO:585), FIG. 587 (SEQ ID NO:587), FIG. 589 (SEQ ID NO:589), FIG. 591 (SEQ ID NO:591), FIG. 593 (SEQ ID NO:593), FIG. 595 (SEQ ID NO:595), FIG. 597 (SEQ ID NO:597), FIG. 599 (SEQ ID NO:599), FIG. 601 (SEQ ID NO:601), FIG. 603 (SEQ ID NO:603), FIG. 605 (SEQ ID NO:605), FIG. 607 (SEQ ID NO:607), FIG. 609 (SEQ ID NO:609), FIG. 611 (SEQ ID NO:611), FIG. 613 (SEQ ID NO:613), FIG. 615 (SEQ ID NO:615), FIG. 617 (SEQ ID NO:617), FIG. 619 (SEQ ID NO:619), FIG. 621 (SEQ ID NO:621), FIG. 623 (SEQ ID NO:623), FIG. 625 (SEQ ID NO:625), FIG. 627 (SEQ ID NO:627), FIG. 629 (SEQ ID NO:629), FIG. 631 (SEQ ID NO:631), FIG. 633 (SEQ ID NO:633), FIG. 635 (SEQ ID NO:635), FIG. 637 (SEQ ID NO:637), FIG. 639 (SEQ ID NO:639), FIG. 641 (SEQ ID NO:641), FIG. 643 (SEQ ID NO:643), FIG. 645 (SEQ ID NO:645), FIG. 647 (SEQ ID NO:647), FIG. 649 (SEQ ID NO:649), FIG. 651 (SEQ ID NO:651), FIG. 653 (SEQ ID NO:653), FIG. 655 (SEQ ID NO:655), FIG. 657 (SEQ ID NO:657), FIG. 659 (SEQ ID NO:659), FIG. 661 (SEQ ID NO:661), FIG. 663 (SEQ ID NO:663), FIG. 665 (SEQ ID NO:665), FIG. 667 (SEQ ID NO:667), FIG. 669 (SEQ ID NO:669), FIG. 671 (SEQ ID NO:671), FIG. 673 (SEQ ID NO:673), FIG. 675 (SEQ ID NO:675), FIG. 677 (SEQ ID NO:377), FIG. 679 (SEQ ID NO:679), FIG. 681 (SEQ ID NO:681), FIG. 683 (SEQ ID NO:683), FIG. 685 (SEQ ID NO:685), FIG. 687 (SEQ ID NO:687), FIG. 689 (SEQ ID NO:689), FIG. 691 (SEQ ID NO:691), FIG. 693 (SEQ ID NO:693), FIG. 695 (SEQ ID NO:695), FIG. 697 (SEQ ID NO:697), FIG. 699 (SEQ ID NO:699), FIG. 701 (SEQ ID NO:701), FIG. 703 (SEQ ID NO:703), FIG. 705 (SEQ ID NO:705), FIG. 707 (SEQ ID NO:707), FIG. 709 (SEQ ID NO:709), FIG. 711 (SEQ ID NO:711), FIG. 713 (SEQ ID NO:713), FIG. 715 (SEQ ID NO:715), FIG. 717 (SEQ ID NO:717), FIG. 719 (SEQ ID NO:719), FIG. 721 (SEQ ID NO:721), FIG. 723 (SEQ ID NO:723), FIG. 725 (SEQ ID NO:725), FIG. 727 (SEQ ID NO:727), FIG. 729 (SEQ ID NO:729), FIG. 731 (SEQ ID NO:731), FIG. 733 (SEQ ID NO:733), FIG. 735 (SEQ ID NO:735), FIG. 737 (SEQ ID NO:737), FIG. 739 (SEQ ID NO:739), FIG. 741 (SEQ ID NO:741), FIG. 743 (SEQ ID NO:743), FIG. 745 (SEQ ID NO:745), FIG. 747 (SEQ ID NO:747), FIG. 749 (SEQ ID NO:749), FIG. 751 (SEQ ID NO:751), FIG. 753 (SEQ ID NO:753), FIG. 755 (SEQ ID NO:755), FIG. 757 (SEQ ID NO:757), FIG. 759 (SEQ ID NO:759), FIG. 761 (SEQ ID NO:761), FIG. 763 (SEQ ID NO:763), FIG. 765 (SEQ ID NO:765), FIG. 767 (SEQ ID NO:767), FIG. 769 (SEQ ID NO:769), FIG. 771 (SEQ ID NO:771), FIG. 773 (SEQ ID NO:773), FIG. 775 (SEQ ID NO:775), FIG. 777 (SEQ ID NO:777), FIG. 779 (SEQ ID NO:779), FIG. 781 (SEQ ID NO:781), FIG. 783 (SEQ ID NO:783), FIG. 785 (SEQ ID NO:785), FIG. 787 (SEQ ID NO:787), FIG. 789 (SEQ ID NO:789), FIG. 791 (SEQ ID NO:791), FIG. 793 (SEQ ID NO:793), FIG. 795 (SEQ ID NO:795), FIG. 797 (SEQ ID NO:797), FIG. 799 (SEQ ID NO:799), FIG. 801 (SEQ ID NO:801), FIG. 803 (SEQ ID NO:803), FIG. 805 (SEQ ID NO:805), FIG. 807 (SEQ ID NO:807), FIG. 809 (SEQ ID NO:809), FIG. 811 (SEQ ID NO:811), FIG. 813 (SEQ ID NO:813), FIG. 815 (SEQ ID NO:815), FIG. 817 (SEQ ID NO:817), FIG. 819 (SEQ ID NO:819), FIG. 821 (SEQ ID NO:821), FIG. 823 (SEQ ID NO:823), FIG. 825 (SEQ ID NO:825), FIG. 827 (SEQ ID NO:827), FIG. 829 (SEQ ID NO:829), FIG. 831 (SEQ ID NO:831), FIG. 833 (SEQ ID NO:833), FIG. 835 (SEQ ID NO:835), FIG. 837 (SEQ ID NO:837), FIG. 839 (SEQ ID NO:839), FIG. 841 (SEQ ID NO:841), FIG. 843 (SEQ ID NO:843), FIG. 845 (SEQ ID NO:845), FIG. 847 (SEQ ID NO:847), FIG. 849 (SEQ ID NO:849), FIG. 851 (SEQ ID NO:851), FIG. 853 (SEQ ID NO:853), FIG. 855 (SEQ ID NO:855), FIG. 858 (SEQ ID NO:858), FIG. 860 (SEQ ID NO:860), FIG. 862 (SEQ ID NO:862), FIG. 864 (SEQ ID NO:864), FIG. 866 (SEQ ID NO:866), FIG. 868 (SEQ ID NO:868), FIG. 870 (SEQ ID NO:870), FIG. 872 (SEQ ID NO:872), FIG. 874 (SEQ ID NO:874), FIG. 876 (SEQ ID NO:876), FIG. 878 (SEQ ID NO:878), FIG. 880 (SEQ ID NO:880), FIG. 882 (SEQ ID NO:882), FIG. 884 (SEQ ID NO:884), FIG. 886 (SEQ ID NO:886), FIG. 888 (SEQ ID NO:888), FIG. 890 (SEQ ID NO:890), FIG. 892 (SEQ ID NO:892), FIG. 894 (SEQ ID NO:894), FIG. 896 (SEQ ID NO:896), FIG. 898 (SEQ ID NO:898), FIG. 900 (SEQ ID NO:900), FIG. 902 (SEQ ID NO:902), FIG. 904 (SEQ ID NO:904), FIG. 906 (SEQ ID NO:906), FIG. 908 (SEQ ID NO:908), FIG. 910 (SEQ ID NO:910), FIG. 912 (SEQ ID NO:912), FIG. 914 (SEQ ID NO:914), FIG. 916 (SEQ ID NO:916), FIG. 918 (SEQ ID NO:918), FIG. 920 (SEQ ID NO:920), FIG. 922 (SEQ ID NO:922), FIG. 924 (SEQ ID NO:924), FIG. 926 (SEQ ID NO:926), FIG. 928 (SEQ ID NO:928), FIG. 930 (SEQ ID NO:930), FIG. 932 (SEQ ID NO:932), FIG. 934 (SEQ ID NO:934), FIG. 936 (SEQ ID NO:936), FIG. 938 (SEQ ID NO:938), FIG. 940 (SEQ ID NO:940), FIG. 943 (SEQ ID NO:943), FIG. 945 (SEQ ID NO:945), FIG. 947 (SEQ ID NO:947), FIG. 949 (SEQ ID NO:949), FIG. 951 (SEQ ID NO:951), FIG. 953 (SEQ ID NO:953), FIG. 955 (SEQ ID NO:955), FIG. 958 (SEQ ID NO:958), FIG. 960 (SEQ ID NO:960), FIG. 963 (SEQ ID NO:963), FIG. 965 (SEQ ID NO:965), FIG. 968 (SEQ ID NO:968), FIG. 970 (SEQ ID NO:970), FIG. 972 (SEQ ID NO:972), FIG. 974 (SEQ ID NO:974), FIG. 976 (SEQ ID NO:976), FIG. 978 (SEQ ID NO:978), FIG. 980 (SEQ ID NO:980), FIG. 983 (SEQ ID NO:983), FIG. 985 (SEQ ID NO:985), FIG. 987 (SEQ ID NO:987), FIG. 990 (SEQ ID NO:990), FIG. 992 (SEQ ID NO:992), FIG. 994 (SEQ ID NO:994), FIG. 996 (SEQ ID NO:996), FIG. 998 (SEQ ID NO:998), FIG. 1000 (SEQ ID NO:1000), FIG. 1002 (SEQ ID NO:1002), FIG. 1007 (SEQ ID NO:1007), FIG. 1009 (SEQ ID NO:1009), FIG. 1011 (SEQ ID NO:1011), FIG. 1013 (SEQ ID NO:1013), FIG. 1015 (SEQ ID NO:1015), FIG. 1017 (SEQ ID NO:1017), FIG. 1019 (SEQ ID NO:1019), FIG. 1021 (SEQ ID NO:1021), FIG. 1023 (SEQ ID NO:1023), FIG. 1025 (SEQ ID NO:1025), FIG. 1030 (SEQ ID NO:1030), FIG. 1033 (SEQ ID NO:1033), FIG. 1035 (SEQ ID NO:1035), FIG. 1037 (SEQ ID NO:1037), FIG. 1039 (SEQ ID NO:1039), FIG. 1041 (SEQ ID NO:1041), FIG. 1043 (SEQ ID NO:1043), FIG. 1046 (SEQ ID NO:1046), FIG. 1048 (SEQ ID NO:1048), FIG. 1050 (SEQ ID NO:1050), FIG. 1053 (SEQ ID NO:1053), FIG. 1055 (SEQ ID NO:1055), FIG. 1057 (SEQ ID NO:1057), FIG. 1060 (SEQ ID NO:1060), FIG. 1062 (SEQ ID NO:1062), FIG. 1064 (SEQ ID NO:1064), FIG. 1066 (SEQ ID NO:1066), FIG. 1068 (SEQ ID NO:1068), FIG. 1070 (SEQ ID NO:1070), FIG. 1072 (SEQ ID NO:1072), FIG. 1074 (SEQ ID NO:1074), FIG. 1076 (SEQ ID NO:1076), FIG. 1078 (SEQ ID NO:1078), FIG. 1080 (SEQ ID NO:1080), FIG. 1082 (SEQ ID NO:1082), FIG. 1084 (SEQ ID NO:1084), FIG. 1086 (SEQ ID NO:1086), FIG. 1088 (SEQ ID NO:1088), FIG. 1090 (SEQ ID NO:1090), FIG. 1092 (SEQ ID NO:1092), FIG. 1094 (SEQ ID NO:1094), FIG. 1096 (SEQ ID NO:1096), FIG. 1098 (SEQ ID NO:1098), FIG. 1101 (SEQ ID NO:1101), FIG. 1103 (SEQ ID NO:1103), FIG. 1105 (SEQ ID NO:1105), FIG. 1107 (SEQ ID NO:1107), FIG. 1109 (SEQ ID NO:1109), FIG. 1111 (SEQ ID NO:1111), FIG. 1113 (SEQ ID NO:1113), FIG. 1116 (SEQ ID NO:1116), FIG. 1118 (SEQ ID NO:1118), FIG. 1120 (SEQ ID NO:1120), FIG. 1123 (SEQ ID NO:1123), FIG. 1125 (SEQ ID NO:1125), FIG. 1128 (SEQ ID NO:1128), FIG. 1130 (SEQ ID NO:1130), FIG. 1132 (SEQ ID NO:1132), FIG. 1134 (SEQ ID NO:1134), FIG. 1136 (SEQ ID NO:1136), FIG. 1138 (SEQ ID NO:1138), FIG. 1142 (SEQ ID NO:1142), FIG. 1144 (SEQ ID NO:1144), FIG. 1146 (SEQ ID NO:1146), FIG. 1148 (SEQ ID NO:1148), FIG. 1150 (SEQ ID NO:1150), FIG. 1152 (SEQ ID NO:1152), FIG. 1154 (SEQ ID NO:1154), FIG. 1156 (SEQ ID NO:1156), FIG. 1158 (SEQ ID NO:1158), FIG. 1160 (SEQ ID NO:1160), FIG. 1162 (SEQ ID NO:1162), FIG. 1164 (SEQ ID NO:1164), FIG. 1166 (SEQ ID NO:1166), FIG. 1168 (SEQ ID NO:1168), FIG. 1170 (SEQ ID NO:1170), FIG. 1172 (SEQ ID NO:1172), FIG. 1174 (SEQ ID NO:1174), FIG. 1176 (SEQ ID NO:1176), FIG. 1178 (SEQ ID NO:1178), FIG. 1180 (SEQ ID NO:1180), FIG. 1182 (SEQ ID NO:1182), FIG. 1184 (SEQ ID NO:1184), FIG. 1186 (SEQ ID NO:1186), FIG. 1188 (SEQ ID NO:1188), FIG. 1190 (SEQ ID NO:1190), FIG. 1192 (SEQ ID NO:1192), FIG. 1194 (SEQ ID NO:1194), FIG. 1196 (SEQ ID NO:1196), FIG. 1198 (SEQ ID NO:1198), FIG. 1200 (SEQ ID NO:1200), FIG. 1202 (SEQ ID NO:1202), FIG. 1204 (SEQ ID NO:1204), FIG. 1206 (SEQ ID NO:1206), FIG. 1208 (SEQ ID NO:1208), FIG. 1210 (SEQ ID NO:1210), FIG. 1212 (SEQ ID NO:1212), FIG. 1214 (SEQ ID NO:1214), FIG. 1216 (SEQ ID NO:1216), FIG. 1218 (SEQ ID NO:1218), FIG. 1220 (SEQ ID NO:1220), FIG. 1222 (SEQ ID NO:1222), FIG. 1224 (SEQ ID NO:1224), FIG. 1226 (SEQ ID NO:1226), FIG. 1228 (SEQ ID NO:1228), FIG. 1230 (SEQ ID NO:1230), FIG. 1232 (SEQ ID NO:1232), FIG. 1234 (SEQ ID NO:1234), FIG. 1236 (SEQ ID NO:1236), FIG. 1238 (SEQ ID NO:1238), FIG. 1240 (SEQ ID NO:1240), FIG. 1242 (SEQ ID NO:1242), FIG. 1244 (SEQ ID NO:1244), FIG. 1246 (SEQ ID NO:1246), FIG. 1248 (SEQ ID NO:1248), FIG. 1250 (SEQ ID NO:1250), FIG. 1252 (SEQ ID NO:1252), FIG. 1254 (SEQ ID NO:1254), FIG. 1256 (SEQ ID NO:1256), FIG. 1258 (SEQ ID NO:1258), FIG. 1260 (SEQ ID NO:1260), FIG. 1262 (SEQ ID NO:1262), FIG. 1264 (SEQ ID NO:1264), FIG. 1266 (SEQ ID NO:1266), FIG. 1268 (SEQ ID NO:1268), FIG. 1270 (SEQ ID NO:1270), FIG. 1272 (SEQ ID NO:1272), FIG. 1274 (SEQ ID NO:1274), FIG. 1276 (SEQ ID NO:1276), FIG. 1278 (SEQ ID NO:1278), FIG. 1280 (SEQ ID NO:1280), FIG. 1282 (SEQ ID NO:1282), FIG. 1284 (SEQ ID NO:1284), FIG. 1286 (SEQ ID NO:1286), FIG. 1288 (SEQ ID NO:1288), FIG. 1290 (SEQ ID NO:1290), FIG. 1292 (SEQ ID NO:1292), FIG. 1294 (SEQ ID NO:1294), FIG. 1296 (SEQ ID NO:1296), FIG. 1298 (SEQ ID NO:1298), FIG. 1300 (SEQ ID NO:1300), FIG. 1302 (SEQ ID NO:1302), FIG. 1304 (SEQ ID NO:1304), FIG. 1306 (SEQ ID NO:1306), FIG. 1308 (SEQ ID NO:1308), FIG. 1310 (SEQ ID NO:1310), FIG. 1312 (SEQ ID NO:1312), FIG. 1314 (SEQ ID NO:1314), FIG. 1316 (SEQ ID NO:1316), FIG. 1318 (SEQ ID NO:1318), FIG. 1320 (SEQ ID NO:1320), FIG. 1322 (SEQ ID NO:1322), FIG. 1324 (SEQ ID NO:1324), FIG. 1326 (SEQ ID NO:1326), FIG. 1328 (SEQ ID NO:1328), FIG. 1330 (SEQ ID NO:1330), FIG. 1332 (SEQ ID NO:1332), FIG. 1334 (SEQ ID NO:1334), FIG. 1336 (SEQ ID NO:1336), FIG. 1338 (SEQ ID NO:1338), FIG. 1340 (SEQ ID NO:1340), FIG. 1342 (SEQ ID NO:1342), FIG. 1344 (SEQ ID NO:1344), FIG. 1346 (SEQ ID NO:1346), FIG. 1348 (SEQ ID NO:1348), FIG. 1350 (SEQ ID NO:1350), FIG. 1352 (SEQ ID NO:1352), FIG. 1354 (SEQ ID NO:1354), FIG. 1356 (SEQ ID NO:1356), FIG. 1358 (SEQ ID NO:1358), FIG. 1361 (SEQ ID NO:1361), FIG. 1363 (SEQ ID NO:1363), FIG. 1365 (SEQ ID NO:1365), FIG. 1367 (SEQ ID NO:1367), FIG. 1369 (SEQ ID NO:1369), FIG. 1371 (SEQ ID NO:1371), FIG. 1373 (SEQ ID NO:1373), FIG. 1375 (SEQ ID NO:1375), FIG. 1377 (SEQ ID NO:1377), FIG. 1379 (SEQ ID NO:1379), FIG. 1381 (SEQ ID NO:1381), FIG. 1383 (SEQ ID NO:1383), FIG. 1385 (SEQ ID NO:1385), FIG. 1387 (SEQ ID NO:1387), FIG. 1389 (SEQ ID NO:1389), FIG. 1391 (SEQ ID NO:1391), FIG. 1393 (SEQ ID NO:1393), FIG. 1395 (SEQ ID NO:1395), FIG. 1397 (SEQ ID NO:1397), FIG. 1399 (SEQ ID NO:1399), FIG. 1401 (SEQ ID NO:1401), FIG. 1403 (SEQ ID NO:1403), FIG. 1405 (SEQ ID NO:1405), FIG. 1407 (SEQ ID NO:1407), FIG. 1409 (SEQ ID NO:1409), FIG. 1411 (SEQ ID NO:1411), FIG. 1413 (SEQ ID NO:1413), FIG. 1415 (SEQ ID NO:1415), FIG. 1417 (SEQ ID NO:1417), FIG. 1419 (SEQ ID NO:1419), FIG. 1421 (SEQ ID NO:1421), FIG. 1423 (SEQ ID NO:1423), FIG. 1425 (SEQ ID NO:1425), FIG. 1427 (SEQ ID NO:1427), FIG. 1429 (SEQ ID NO:1429), FIG. 1431 (SEQ ID NO:1431), FIG. 1433 (SEQ ID NO:1433), FIG. 1435 (SEQ ID NO:1435), FIG. 1437 (SEQ ID NO:1437), FIG. 1439 (SEQ ID NO:1439), FIG. 1441 (SEQ ID NO:1441), FIG. 1443 (SEQ ID NO:1443), FIG. 1445 (SEQ ID NO:1445), FIG. 1447 (SEQ ID NO:1447), FIG. 1449 (SEQ ID NO:1449), FIG. 1451 (SEQ ID NO:1451), FIG. 1453 (SEQ ID NO:1453), FIG. 1455 (SEQ ID NO:1455), FIG. 1457 (SEQ ID NO:1457), FIG. 1459 (SEQ ID NO:1459), FIG. 1461 (SEQ ID NO:1461), FIG. 1463 (SEQ ID NO:1463), FIG. 1465 (SEQ ID NO:1465), FIG. 1467 (SEQ ID NO:1467), FIG. 1469 (SEQ ID NO:1469), FIG. 1471 (SEQ ID NO:1471), FIG. 1473 (SEQ ID NO:1473), FIG. 1475 (SEQ ID NO:1475), FIG. 1477 (SEQ ID NO:1477), FIG. 1479 (SEQ ID NO:1479), FIG. 1481 (SEQ ID NO:1481), FIG. 1483 (SEQ ID NO:1483), FIG. 1485 (SEQ ID NO:1485), FIG. 1487 (SEQ ID NO:1487), FIG. 1489 (SEQ ID NO:1489), FIG. 1491 (SEQ ID NO:1491), FIG. 1493 (SEQ ID NO:1493), FIG. 1495 (SEQ ID NO:1495), FIG. 1497 (SEQ ID NO:1497), FIG. 1499 (SEQ ID NO:1499), FIG. 1501 (SEQ ID NO:1501), FIG. 1503 (SEQ ID NO:1503), FIG. 1505 (SEQ ID NO:1505), FIG. 1507 (SEQ ID NO:1507), FIG. 1509 (SEQ ID NO:1509), FIG. 1511 (SEQ ID NO:1511), FIG. 1513 (SEQ ID NO:1513), FIG. 1515 (SEQ ID NO:1515), FIG. 1517 (SEQ ID NO:1517), FIG. 1519 (SEQ ID NO:1519), FIG. 1521 (SEQ ID NO:1521), FIG. 1523 (SEQ ID NO:1523), FIG. 1525 (SEQ ID NO:1525), FIG. 1527 (SEQ ID NO:1527), FIG. 1529 (SEQ ID NO:1529), FIG. 1531 (SEQ ID NO:1531), FIG. 1533 (SEQ ID NO:1533), FIG. 1535 (SEQ ID NO:1535), FIG. 1537 (SEQ ID NO:1537), FIG. 1539 (SEQ ID NO:1539), FIG. 1541 (SEQ ID NO:1541), FIG. 1543 (SEQ ID NO:1543), FIG. 1545 (SEQ ID NO:1545), FIG. 1547 (SEQ ID NO:1547), FIG. 1549 (SEQ ID NO:1549), FIG. 1551 (SEQ ID NO:1551), FIG. 1553 (SEQ ID NO:1553), FIG. 1555 (SEQ ID NO:1555), FIG. 1557 (SEQ ID NO:1557), FIG. 1559 (SEQ ID NO:1559), FIG. 1561 (SEQ ID NO:1561), FIG. 1563 (SEQ ID NO:1563), FIG. 1565 (SEQ ID NO:1565), FIG. 1567 (SEQ ID NO:1567), FIG. 1569 (SEQ ID NO:1569), FIG. 1571 (SEQ ID NO:1571), FIG. 1573 (SEQ ID NO:1573), FIG. 1575 (SEQ ID NO:1575), FIG. 1578 (SEQ ID NO:1578), FIG. 1581 (SEQ ID NO:1581), FIG. 1583 (SEQ ID NO:1583), FIG. 1585 (SEQ ID NO:1587), FIG. 1589 (SEQ ID NO:1589), FIG. 1592 (SEQ ID NO:1592), FIG. 1594 (SEQ ID NO:1594), FIG. 1596 (SEQ ID NO:1596), FIG. 1598 (SEQ ID NO:1598), FIG. 1600 (SEQ ID NO:1600), FIG. 1602 (SEQ ID NO:1602), FIG. 1604 (SEQ ID NO:1604), FIG. 1606 (SEQ ID NO:1606), FIG. 1609 (SEQ ID NO:1609), FIG. 1611 (SEQ ID NO:1611), FIG. 1614 (SEQ ID NO:1614), FIG. 1617 (SEQ ID NO:1617), FIG. 1619 (SEQ ID NO:1619), FIG. 1621 (SEQ ID NO:1621), FIG. 1623 (SEQ ID NO:1623), FIG. 1626 (SEQ ID NO:1626), FIG. 1628 (SEQ ID NO:1628), FIG. 1630 (SEQ ID NO:1630), FIG. 1632 (SEQ ID NO:1632), FIG. 1636 (SEQ ID NO:1636), FIG. 1639 (SEQ ID NO:1639), FIG. 1644 (SEQ ID NO:1644), FIG. 1646 (SEQ ID NO:1646), FIG. 1648 (SEQ ID NO:1648), FIG. 1650 (SEQ ID NO:1650), FIG. 1652 (SEQ ID NO:1652), FIG. 1654 (SEQ ID NO:1654), FIG. 1656 (SEQ ID NO:1656), FIG. 1658 (SEQ ID NO:1658), FIG. 1660 (SEQ ID NO:1660), FIG. 1662 (SEQ ID NO:1662), FIG. 1664 (SEQ ID NO:1664), FIG. 1666 (SEQ ID NO:1666), FIG. 1668 (SEQ ID NO:1668), FIG. 1670 (SEQ ID NO:1670), FIG. 1672 (SEQ ID NO:1672), FIG. 1674 (SEQ ID NO:1674), FIG. 1676 (SEQ ID NO:1676), FIG. 1678 (SEQ ID NO:1678), FIG. 1680 (SEQ ID NO:1680), FIG. 1683 (SEQ ID NO:1683), FIG. 1685 (SEQ ID NO:1685), FIG. 1687 (SEQ ID NO:1687), FIG. 1689 (SEQ ID NO:1689), FIG. 1692 (SEQ ID NO:1692), FIG. 1694 (SEQ ID NO:1694), FIG. 1696 (SEQ ID NO:1696), FIG. 1698 (SEQ ID NO:1698), FIG. 1701 (SEQ ID NO:1701), FIG. 1703 (SEQ ID NO:1703), FIG. 1705 (SEQ ID NO:1705), FIG. 1707 (SEQ ID NO:1707), FIG. 1709 (SEQ ID NO:1709), FIG. 1711 (SEQ ID NO:1711), FIG. 1713 (SEQ ID NO:1713), FIG. 1715 (SEQ ID NO:1715), FIG. 1717 (SEQ ID NO:1717), FIG. 1719 (SEQ ID NO:1719), FIG. 1721 (SEQ ID NO:1721), FIG. 1723 (SEQ ID NO:1723), FIG. 1725 (SEQ ID NO:1725), FIG. 1727 (SEQ ID NO:1727), FIG. 1729 (SEQ ID NO:1729), FIG. 1732 (SEQ ID NO:1732), FIG. 1734 (SEQ ID NO:1734), FIG. 1736 (SEQ ID NO:1736), FIG. 1738 (SEQ ID NO:1738), FIG. 1741 (SEQ ID NO:1741), FIG. 1743 (SEQ ID NO:1743), FIG. 1745 (SEQ ID NO:1745), FIG. 1747 (SEQ ID NO:1747), FIG. 1749 (SEQ ID NO:1749), FIG. 1751 (SEQ ID NO:1751), FIG. 1753 (SEQ ID NO:1753), FIG. 1755 (SEQ ID NO:1755), FIG. 1757 (SEQ ID NO:1757), FIG. 1760 (SEQ ID NO:1760), FIG. 1762 (SEQ ID NO:1762), FIG. 1764 (SEQ ID NO:1764), FIG. 1766 (SEQ ID NO:1766), FIG. 1769 (SEQ ID NO:1769), FIG. 1771 (SEQ ID NO:1771), FIG. 1773 (SEQ ID NO:1773), FIG. 1775 (SEQ ID NO:1775), FIG. 1777 (SEQ ID NO:1777), FIG. 1779 (SEQ ID NO:1779), FIG. 1781 (SEQ ID NO:1781), FIG. 1783 (SEQ ID NO:1783), FIG. 1785 (SEQ ID NO:1785), FIG. 1787 (SEQ ID NO:1787), FIG. 1789 (SEQ ID NO:1789), FIG. 1792 (SEQ ID NO:1792), FIG. 1795 (SEQ ID NO:1795), FIG. 1797 (SEQ ID NO:1797), FIG. 1799 (SEQ ID NO:1799), FIG. 1802 (SEQ ID NO:1802), FIG. 1805 (SEQ ID NO:1805), FIG. 1807 (SEQ ID NO:1807), FIG. 1809 (SEQ ID NO:1809), FIG. 1811 (SEQ ID NO:1811), FIG. 1813 (SEQ ID NO:1813), FIG. 1815 (SEQ ID NO:1815), FIG. 1817 (SEQ ID NO:1817), FIG. 1819 (SEQ ID NO:1819), FIG. 1821 (SEQ ID NO:1821), FIG. 1823 (SEQ ID NO:1823), FIG. 1825 (SEQ ID NO:1825), FIG. 1827 (SEQ ID NO:1827), FIG. 1829 (SEQ ID NO:1829), FIG. 1831 (SEQ ID NO:1831), FIG. 1833 (SEQ ID NO:1833), FIG. 1836 (SEQ ID NO:1836), FIG. 1838 (SEQ ID NO:1838), FIG. 1841 (SEQ ID NO:1841), FIG. 1843 (SEQ ID NO:1843), FIG. 1845 (SEQ ID NO:1845), FIG. 1847 (SEQ ID NO:1847), FIG. 1849 (SEQ ID NO:1849), FIG. 1851 (SEQ ID NO:1851), FIG. 1854 (SEQ ID NO:1854), FIG. 1856 (SEQ ID NO:1856), FIG. 1858 (SEQ ID NO:1858), FIG. 1860 (SEQ ID NO:1860), FIG. 1863 (SEQ ID NO:1863), FIG. 1865 (SEQ ID NO:1865), FIG. 1867 (SEQ ID NO:1867), FIG. 1869 (SEQ ID NO:1869), FIG. 1871 (SEQ ID NO:1871), FIG. 1873 (SEQ ID NO:1873), FIG. 1875 (SEQ ID NO:1875), FIG. 1877 (SEQ ID NO:1877), FIG. 1881 (SEQ ID NO:1881), FIG. 1883 (SEQ ID NO:1883), FIG. 1885 (SEQ ID NO:1885), FIG. 1887 (SEQ ID NO:1887), FIG. 1889 (SEQ ID NO:1889), FIG. 1891 (SEQ ID NO:1891), FIG. 1893 (SEQ ID NO:1893), FIG. 1895 (SEQ ID NO:1895), FIG. 1897 (SEQ ID NO:1897), FIG. 1899 (SEQ ID NO:1899), FIG. 1901 (SEQ ID NO:1901), FIG. 1903 (SEQ ID NO:1903), FIG. 1905 (SEQ ID NO:1905), FIG. 1908 (SEQ ID NO:1908), FIG. 1910 (SEQ ID NO:1910), FIG. 1913 (SEQ ID NO:1913), FIG. 1915 (SEQ ID NO:1915), FIG. 1917 (SEQ ID NO:1917), FIG. 1919 (SEQ ID NO:1919), FIG. 1922 (SEQ ID NO:1922), FIG. 1924 (SEQ ID NO:1924), FIG. 1926 (SEQ ID NO:1926), FIG. 1928 (SEQ ID NO:1928), FIG. 1930 (SEQ ID NO:1930), FIG. 1932 (SEQ ID NO:1932), FIG. 1934 (SEQ ID NO:1934), FIG. 1936 (SEQ ID NO:1936), FIG. 1938 (SEQ ID NO:1938), FIG. 1940 (SEQ ID NO:1940), FIG. 1942 (SEQ ID NO:1942), FIG. 1944 (SEQ ID NO:1944), FIG. 1946 (SEQ ID NO:1946), FIG. 1948 (SEQ ID NO:1948), FIG. 1950 (SEQ ID NO:1950), FIG. 1952 (SEQ ID NO:1952), FIG. 1954 (SEQ ID NO:1954), FIG. 1956 (SEQ ID NO:1956), FIG. 1958 (SEQ ID NO:1958), FIG. 1960 (SEQ ID NO:1960), FIG. 1962 (SEQ ID NO:1962), FIG. 1964 (SEQ ID NO:1964), FIG. 1966 (SEQ ID NO:1966), FIG. 1968 (SEQ ID NO:1968), FIG. 1970 (SEQ ID NO:1970), FIG. 1972 (SEQ ID NO:1972), FIG. 1974 (SEQ ID NO:1974), FIG. 1976 (SEQ ID NO:1976), FIG. 1978 (SEQ ID NO:1978), FIG. 1980 (SEQ ID NO:1980), FIG. 1982 (SEQ ID NO:1982), FIG. 1984 (SEQ ID NO:1984), FIG. 1986 (SEQ ID NO:1986), FIG. 1988 (SEQ ID NO:1988), FIG. 1990 (SEQ ID NO:1990), FIG. 1992 (SEQ ID NO:1992), FIG. 1994 (SEQ ID NO:1994), FIG. 1996 (SEQ ID NO:1996), FIG. 1998 (SEQ ID NO:1998), FIG. 2000 (SEQ ID NO:2000), FIG. 2002 (SEQ ID NO:2002), FIG. 2004 (SEQ ID NO:2004), FIG. 2006 (SEQ ID NO:2006), FIG. 2008 (SEQ ID NO:2008), FIG. 2010 (SEQ ID NO:2010), FIG. 2012 (SEQ ID NO:2012), FIG. 2014 (SEQ ID NO:2014), FIG. 2016 (SEQ ID NO:2016), FIG. 2018 (SEQ ID NO:2018), FIG. 2020 (SEQ ID NO:2020), FIG. 2022 (SEQ ID NO:2022), FIG. 2024 (SEQ ID NO:2024), FIG. 2026 (SEQ ID NO:2026), FIG. 2028 (SEQ ID NO:2028), FIG. 2030 (SEQ ID NO:2030), FIG. 2032 (SEQ ID NO:2032), FIG. 2034 (SEQ ID NO:2034), FIG. 2036 (SEQ ID NO:2036), FIG. 2038 (SEQ ID NO:2038), FIG. 2040 (SEQ ID NO:2040), FIG. 2042 (SEQ ID NO:2042), FIG. 2044 (SEQ ID NO:2044), FIG. 2046 (SEQ ID NO:2046), FIG. 2048 (SEQ ID NO:2048), FIG. 2050 (SEQ ID NO:2050), FIG. 2052 (SEQ ID NO:2052), FIG. 2054 (SEQ ID NO:2054), FIG. 2056 (SEQ ID NO:2056), FIG. 2058 (SEQ ID NO:2058), FIG. 2060 (SEQ ID NO:2060), FIG. 2062 (SEQ ID NO:2062), FIG. 2064 (SEQ ID NO:2064), FIG. 2066 (SEQ ID NO:2066), FIG. 2068 (SEQ ID NO:2068), FIG. 2070 (SEQ ID NO:2070), FIG. 2072 (SEQ ID NO:2072), FIG. 2074 (SEQ ID NO:2074), FIG. 2076 (SEQ ID NO:2076), FIG. 2078 (SEQ ID NO:2078), FIG. 2080 (SEQ ID NO:2080), FIG. 2082 (SEQ ID NO:2082), FIG. 2084 (SEQ ID NO:2084), FIG. 2086 (SEQ ID NO:2086), FIG. 2088 (SEQ ID NO:2088), FIG. 2090 (SEQ ID NO:2090), FIG. 2092 (SEQ ID NO:2092), FIG. 2094 (SEQ ID NO:2094), FIG. 2096 (SEQ ID NO:2096), FIG. 2098 (SEQ ID NO:2098), FIG. 2100 (SEQ ID NO:2100), FIG. 2102 (SEQ ID NO:2102), FIG. 2104 (SEQ ID NO:2104), FIG. 2106 (SEQ ID NO:2106), FIG. 2108 (SEQ ID NO:2108), FIG. 2110 (SEQ ID NO:2110), FIG. 2112 (SEQ ID NO:2112), FIG. 2114 (SEQ ID NO:2114), FIG. 2116 (SEQ ID NO:2116), FIG. 2118 (SEQ ID NO:2118), FIG. 2120 (SEQ ID NO:2120), FIG. 2122 (SEQ ID NO:2122), FIG. 2124 (SEQ ID NO:2124), FIG. 2126 (SEQ ID NO:2126), FIG. 2128 (SEQ ID NO:2128), FIG. 2130 (SEQ ID NO:2130), FIG. 2132 (SEQ ID NO:2132), FIG. 2134 (SEQ ID NO:2134), FIG. 2136 (SEQ ID NO:2136), FIG. 2138 (SEQ ID NO:2138), FIG. 2140 (SEQ ID NO:2140), FIG. 2142 (SEQ ID NO:2142), FIG. 2144 (SEQ ID NO:2144), FIG. 2146 (SEQ ID NO:2146), FIG. 2148 (SEQ ID NO:2148), FIG. 2150 (SEQ ID NO:2150), FIG. 2152 (SEQ ID NO:2152), FIG. 2154 (SEQ ID NO:2154), FIG. 2156 (SEQ ID NO:2156), FIG. 2158 (SEQ ID NO:2158), FIG. 2160 (SEQ ID NO:2160), FIG. 2163 (SEQ ID NO:2163), FIG. 2165 (SEQ ID NO:2165), FIG. 2167 (SEQ ID NO:2167), FIG. 2170 (SEQ ID NO:2170), FIG. 2172 (SEQ ID NO:2172), FIG. 2174 (SEQ ID NO:2174), FIG. 2176 (SEQ ID NO:2176), FIG. 2178 (SEQ ID NO:2178), FIG. 2180 (SEQ ID NO:2180), FIG. 2182 (SEQ ID NO:2182), FIG. 2184 (SEQ ID NO:2184), FIG. 2186 (SEQ ID NO:2186), FIG. 2188 (SEQ ID NO:2188), FIG. 2191 (SEQ ID NO:2191), FIG. 2193 (SEQ ID NO:2193), FIG. 2195 (SEQ ID NO:2195), FIG. 2197 (SEQ ID NO:2197), FIG. 2199 (SEQ ID NO:2199), FIG. 2201 (SEQ ID NO:2201), FIG. 2204 (SEQ ID NO:2204), FIG. 2207 (SEQ ID NO:2207), FIG. 2209 (SEQ ID NO:2209), FIG. 2212 (SEQ ID NO:2212), FIG. 2214 (SEQ ID NO:2214), FIG. 2216 (SEQ ID NO:2216), FIG. 2218 (SEQ ID NO:2218), FIG. 2220 (SEQ ID NO:2220), FIG. 2222 (SEQ ID NO:2222), FIG. 2224 (SEQ ID NO:2224), FIG. 2226 (SEQ ID NO:2226), FIG. 2228 (SEQ ID NO:2228), FIG. 2230 (SEQ ID NO:2230), FIG. 2232 (SEQ ID NO:2232), FIG. 2234 (SEQ ID NO:2234), FIG. 2236 (SEQ ID NO:2236), FIG. 2238 (SEQ ID NO:2238), FIG. 2240 (SEQ ID NO:2240), FIG. 2242 (SEQ ID NO:2242), FIG. 2244 (SEQ ID NO:2244), FIG. 2246 (SEQ ID NO:2246), FIG. 2248 (SEQ ID NO:2248), FIG. 2250 (SEQ ID NO:2250), FIG. 2252 (SEQ ID NO:2252), FIG. 2254 (SEQ ID NO:2254), FIG. 2256 (SEQ ID NO:2256), FIG. 2258 (SEQ ID NO:2258), FIG. 2260 (SEQ ID NO:2260), FIG. 2262 (SEQ ID NO:2262), FIG. 2264 (SEQ ID NO:2264), FIG. 2266 (SEQ ID NO:2266), FIG. 2268 (SEQ ID NO:2268), FIG. 2270 (SEQ ID NO:2270), FIG. 2272 (SEQ ID NO:2272), FIG. 2274 (SEQ ID NO:2274), FIG. 2276 (SEQ ID NO:2276), FIG. 2278 (SEQ ID NO:2278), FIG. 2280 (SEQ ID NO:2280), FIG. 2282 (SEQ ID NO:2282), FIG. 2284 (SEQ ID NO:2284), FIG. 2286 (SEQ ID NO:2286), FIG. 2288 (SEQ ID NO:2288), FIG. 2290 (SEQ ID NO:2290), FIG. 2292 (SEQ ID NO:2292), FIG. 2294 (SEQ ID NO:2294), FIG. 2296 (SEQ ID NO:2296), FIG. 2298 (SEQ ID NO:2298), FIG. 2301 (SEQ ID NO:2301), FIG. 2303 (SEQ ID NO:2303), FIG. 2305 (SEQ ID NO:2305), FIG. 2307 (SEQ ID NO:2307), FIG. 2310 (SEQ ID NO:2310), FIG. 2312 (SEQ ID NO:2312), FIG. 2314 (SEQ ID NO:2314), FIG. 2316 (SEQ ID NO:2316), FIG. 2319 (SEQ ID NO:2319), FIG. 2321 (SEQ ID NO:2321), FIG. 2323 (SEQ ID NO:2323), FIG. 2325 (SEQ ID NO:2325), FIG. 2327 (SEQ ID NO:2327), FIG. 2329 (SEQ ID NO:2329), FIG. 2331 (SEQ ID NO:2331), FIG. 2333 (SEQ ID NO:2333), FIG. 2335 (SEQ ID NO:2335), FIG. 2337 (SEQ ID NO:2337), FIG. 2339 (SEQ ID NO:2339), FIG. 2341 (SEQ ID NO:2341), FIG. 2343 (SEQ ID NO:2343), FIG. 2345 (SEQ ID NO:2345), FIG. 2347 (SEQ ID NO:2347), FIG. 2349 (SEQ ID NO:2349), FIG. 2351 (SEQ ID NO:2351), FIG. 2353 (SEQ ID NO:2353), FIG. 2355 (SEQ ID NO:2355), FIG. 2357 (SEQ ID NO:2357), FIG. 2359 (SEQ ID NO:2359), FIG. 2361 (SEQ ID NO:2361), FIG. 2363 (SEQ ID NO:2363), FIG. 2365 (SEQ ID NO:2365), FIG. 2367 (SEQ ID NO:2367), FIG. 2369 (SEQ ID NO:2369), FIG. 2371 (SEQ ID NO:2371), FIG. 2373 (SEQ ID NO:2373), FIG. 2375 (SEQ ID NO:2375), FIG. 2378 (SEQ ID NO:2378), FIG. 2380 (SEQ ID NO:2380), FIG. 2383 (SEQ ID NO:2383), FIG. 2386 (SEQ ID NO:2386), FIG. 2388 (SEQ ID NO:2388), FIG. 2391 (SEQ ID NO:2391), FIG. 2393 (SEQ ID NO:2393), FIG. 2396 (SEQ ID NO:2396), FIG. 2398 (SEQ ID NO:2398), FIG. 2402 (SEQ ID NO:2402), FIG. 2404 (SEQ ID NO:2404), FIG. 2408 (SEQ ID NO:2408), FIG. 2410 (SEQ ID NO:2410), FIG. 2412 (SEQ ID NO:2412), FIG. 2415 (SEQ ID NO:2415), FIG. 2418 (SEQ ID NO:2418), FIG. 2420 (SEQ ID NO:2420), FIG. 2422 (SEQ ID NO:2422), FIG. 2424 (SEQ ID NO:2424), FIG. 2426 (SEQ ID NO:2426), FIG. 2430 (SEQ ID NO:2430), FIG. 2432 (SEQ ID NO:2432), FIG. 2434 (SEQ ID NO:2434), FIG. 2436 (SEQ ID NO:2436), FIG. 2438 (SEQ ID NO:2438), FIG. 2440 (SEQ ID NO:2440) or FIG. 2442 (SEQ ID NO:2442).

10. A chimeric molecule comprising a polypeptide according to claim 9 fused to a heterologous amino acid sequence.

11. The chimeric molecule of claim 10, wherein said heterologous amino acid sequence is an epitope tag sequence or an Fc region of an immunoglobulin.

12. An antibody which specifically binds to a polypeptide according to claim 9.

13. The antibody of claim 12, wherein said antibody is a monoclonal antibody, a humanized antibody or a single-chain antibody.

14. A composition of matter comprising (a) a polypeptide of claim 9, (b) an agonist of said polypeptide, (c) an antagonist of said polypeptide, or (d) an antibody that binds to said polypeptide, in combination with a carrier.

15. The composition of matter of claim 14, wherein said carrier is a pharmaceutically acceptable carrier.

16. The composition of matter of claim 15 comprising a therapeutically effective amount of (a), (b), (c) or (d).

17. An article of manufacture, comprising:
a container;
a label on said container; and
a composition of matter comprising (a) a polypeptide of claim 9, (b) an agonist of said polypeptide, (c) an antagonist of said polypeptide, or (d) an antibody that binds to said polypeptide, contained within said container, wherein label on said container indicates that said composition of matter can be used for treating an immune related disease.

18. A method of treating an immune related disorder in a mammal in need thereof comprising administering to said mammal a therapeutically effective amount of (a) a polypeptide of claim 9, (b) an agonist of said polypeptide, (c) an antagonist of said polypeptide, or (d) an antibody that binds to said polypeptide.

19. The method of claim 18, wherein the immune related disorder is systemic lupus erythematosis, rheumatoid arthritis, osteoarthritis, juvenile chronic arthritis, a spondyloarthropathy, systemic sclerosis, an idiopathic inflammatory myopathy, Sjögren's syndrome, systemic vasculitis, sarcoidosis, autoimmune hemolytic anemia, autoimmune thrombocytopenia, thyroiditis, diabetes mellitus, immune-mediated renal disease, a demyelinating disease of the central or peripheral nervous system, idiopathic demyelinating polyneuropathy, Guillain-Barré syndrome, a chronic inflammatory demyelinating polyneuropathy, a hepatobiliary disease, infectious or autoimmune chronic active hepatitis, primary biliary cirrhosis, granulomatous hepatitis, sclerosing cholangitis, inflammatory bowel disease, gluten-sensitive enteropathy, Whipple's disease, an autoimmune or immune-mediated skin disease, a bullous skin disease, erythema multiforme, contact dermatitis, psoriasis, an allergic disease, asthma, allergic rhinitis, atopic dermatitis, food hypersensitivity, urticaria, an immunologic disease of the lung, eosinophilic pneumonias, idiopathic pulmonary fibrosis, hypersensitivity pneumonitis, a transplantation associated disease, graft rejection or graft-versus-host-disease.

20. A method for determining the presence of a PRO polypeptide of the invention as described in FIG. 2 (SEQ ID NO:2), FIG. 4 (SEQ ID NO:4), FIG. 6 (SEQ ID NO:6), FIG. 8 (SEQ ID NO:8), FIG. 10 (SEQ ID NO:10), FIG. 12 (SEQ ID NO:12), FIG. 14 (SEQ ID NO:14), FIG. 16 (SEQ ID NO:16), FIG. 18 (SEQ ID NO:18), FIG. 20 (SEQ ID NO:20), FIG. 22 (SEQ ID NO:22), FIG. 24 (SEQ ID NO:24), FIG. 26 (SEQ ID NO:26), FIG. 28 (SEQ ID NO:28), FIG. 30 (SEQ ID NO:30), FIG. 32 (SEQ ID NO:32), FIG. 34 (SEQ ID NO:34), FIG. 36 (SEQ ID NO:36), FIG. 38 (SEQ ID NO:38), FIG. 40 (SEQ ID NO:40), FIG. 42 (SEQ ID NO:42), FIG. 44 (SEQ ID NO:44), FIG. 46 (SEQ ID NO:46), FIG. 48 (SEQ ID NO:48), FIG. 50 (SEQ ID NO:50), FIG. 52 (SEQ ID NO:52), FIG. 54 (SEQ ID NO:54), FIG. 56 (SEQ ID NO:56), FIG. 58 (SEQ ID NO:58), FIG. 60 (SEQ ID NO:60), FIG. 62 (SEQ ID NO:62), FIG. 64 (SEQ ID NO:64), FIG. 66 (SEQ ID NO:66), FIG. 68 (SEQ ID NO:68), FIG. 70 (SEQ ID NO:70), FIG. 72 (SEQ ID NO:72), FIG. 74 (SEQ ID NO:74), FIG. 76 (SEQ ID NO:76), FIG. 78 (SEQ ID NO:78), FIG. 80 (SEQ ID NO:80), FIG. 82 (SEQ ID NO:82), FIG. 84 (SEQ ID NO:84), FIG. 86 (SEQ ID NO:86), FIG. 88 (SEQ ID NO:88), FIG. 90 (SEQ ID NO:90), FIG. 92 (SEQ ID NO:92), FIG. 94 (SEQ ID NO:94), FIG. 96 (SEQ ID NO:96), FIG. 98 (SEQ ID NO:98), FIG. 100 (SEQ ID NO:100), FIG. 102 (SEQ ID NO:102), FIG. 104 (SEQ ID NO:104), FIG. 106 (SEQ ID NO:106), FIG. 108 (SEQ ID NO:108), FIG. 110 (SEQ ID NO:110), FIG. 112 (SEQ ID NO:112), FIG. 114 (SEQ ID NO:114), FIG. 116 (SEQ ID NO:116), FIG. 118 (SEQ ID NO:118), FIG. 121 (SEQ ID NO:121), FIG. 123 (SEQ ID NO:123), FIG. 125 (SEQ ID NO:125), FIG. 127 (SEQ ID NO:127), FIG. 129 (SEQ ID NO:129), FIG. 131 (SEQ ID NO:131), FIG. 133 (SEQ ID NO:133), FIG. 135 (SEQ ID NO:135), FIG. 137 (SEQ ID NO:137), FIG. 139 (SEQ ID NO:139), FIG. 141 (SEQ ID NO:141), FIG. 143 (SEQ ID NO:143), FIG. 145 (SEQ ID NO:145), FIG. 147 (SEQ ID NO:147), FIG. 149 (SEQ ID NO:149), FIG. 151 (SEQ ID NO:151), FIG. 153 (SEQ ID NO:153), FIG. 155 (SEQ ID NO:155), FIG. 157 (SEQ ID NO:157), FIG. 159 (SEQ ID NO:159), FIG. 161 (SEQ ID NO:161), FIG. 163 (SEQ ID NO:163), FIG. 165 (SEQ ID NO:165), FIG. 167 (SEQ ID NO:167), FIG. 169 (SEQ ID NO:169), FIG. 171 (SEQ ID NO:171), FIG. 173 (SEQ ID NO:173), FIG. 175 (SEQ ID NO:175), FIG. 177 (SEQ ID NO:177), FIG. 179 (SEQ ID NO:179), FIG. 181 (SEQ ID NO:181), FIG. 183 (SEQ ID NO:183), FIG. 185 (SEQ ID NO:185), FIG. 187 (SEQ ID NO:187), FIG. 189 (SEQ ID NO:189), FIG. 191 (SEQ ID NO:191), FIG. 193 (SEQ ID NO:193), FIG. 195 (SEQ ID NO:195), FIG. 197 (SEQ ID NO:197), FIG. 199 (SEQ ID NO:199), FIG. 201 (SEQ ID NO:201), FIG. 203 (SEQ ID NO:203), FIG. 205 (SEQ ID NO:205), FIG. 207 (SEQ ID NO:207), FIG. 209 (SEQ ID NO:209), FIG. 211 (SEQ ID NO:211), FIG. 213 (SEQ ID NO:213), FIG. 215 (SEQ ID NO:215), FIG. 217 (SEQ ID NO:217), FIG. 219 (SEQ ID NO:219), FIG. 221 (SEQ ID NO:221), FIG. 223 (SEQ ID NO:223), FIG. 225 (SEQ ID NO:225), FIG. 227 (SEQ ID NO:227), FIG. 229 (SEQ ID NO:229), FIG. 231 (SEQ ID NO:231), FIG. 233 (SEQ ID NO:233), FIG. 235 (SEQ ID NO:235), FIG. 237 (SEQ ID NO:237), FIG. 239 (SEQ ID NO:239), FIG. 241 (SEQ ID NO:241), FIG. 243 (SEQ ID NO:243), FIG. 245 (SEQ ID NO:245), FIG. 247 (SEQ ID NO:247), FIG. 249 (SEQ ID NO:249), FIG. 251 (SEQ ID NO:251), FIG. 254 (SEQ ID NO:254), FIG. 256 (SEQ ID NO:256), FIG. 258 (SEQ ID NO:258), FIG. 260 (SEQ ID NO:260), FIG. 262 (SEQ ID NO:262), FIG. 264 (SEQ ID NO:264), FIG. 266 (SEQ ID NO:266), FIG. 268 (SEQ ID NO:268), FIG. 270 (SEQ ID NO:270), FIG. 272 (SEQ ID NO:272), FIG. 274 (SEQ ID NO:274), FIG. 276 (SEQ ID NO:276), FIG. 278 (SEQ ID NO:278), FIG. 280 (SEQ ID NO:280), FIG. 282 (SEQ ID NO:282), FIG. 284 (SEQ ID NO:284), FIG. 286 (SEQ ID NO:286), FIG. 288 (SEQ ID NO:288), FIG. 290 (SEQ ID NO:290), FIG. 292 (SEQ ID NO:292), FIG. 294 (SEQ ID NO:294), FIG. 296 (SEQ ID NO:296), FIG. 298 (SEQ ID NO:298), FIG. 300 (SEQ ID NO:300), FIG. 302 (SEQ ID NO:302), FIG. 304 (SEQ ID NO:304), FIG. 306 (SEQ ID NO:306), FIG. 308 (SEQ ID NO:308), FIG. 310 (SEQ ID NO:310), FIG. 312 (SEQ ID NO:312), FIG. 314 (SEQ ID NO:314), FIG. 316 (SEQ ID NO:316), FIG. 318 (SEQ ID NO:318), FIG. 320 (SEQ ID NO:320), FIG. 322 (SEQ ID NO:322), FIG. 324 (SEQ ID NO:324), FIG. 326 (SEQ ID NO:326), FIG. 328 (SEQ ID NO:328), FIG. 330 (SEQ ID NO:330), FIG. 332 (SEQ ID NO:332), FIG. 334 (SEQ ID NO:334), FIG. 336 (SEQ ID NO:336), FIG. 338 (SEQ ID NO:338), FIG. 340 (SEQ ID NO:340), FIG. 342 (SEQ ID NO:342), FIG. 344 (SEQ ID NO:344), FIG. 346 (SEQ ID NO:346), FIG. 348 (SEQ ID NO:348), FIG. 350 (SEQ ID NO:350), FIG. 352 (SEQ ID NO:352), FIG. 354 (SEQ ID NO:354), FIG. 356 (SEQ ID NO:356), FIG. 358 (SEQ ID NO:358), FIG. 360 (SEQ ID NO:360), FIG. 362 (SEQ ID NO:362), FIG. 364 (SEQ ID NO:364), FIG. 366 (SEQ ID NO:366), FIG. 368 (SEQ ID NO:368), FIG. 370 (SEQ ID NO:310), FIG. 372 (SEQ ID NO:372), FIG. 374 (SEQ ID NO:374), FIG. 376 (SEQ ID NO:376), FIG. 378 (SEQ ID NO:378), FIG. 380 (SEQ ID NO:380), FIG. 382 (SEQ ID NO:382), FIG. 384 (SEQ ID NO:384), FIG. 386 (SEQ ID NO:386), FIG. 388 (SEQ ID NO:388), FIG. 390 (SEQ ID NO:390), FIG. 392 (SEQ ID NO:392), FIG. 394 (SEQ ID NO:394), FIG. 396 (SEQ ID NO:396), FIG. 398 (SEQ ID NO:398), FIG. 400 (SEQ ID NO:400), FIG. 402 (SEQ ID NO:402), FIG. 404 (SEQ ID NO:404), FIG. 406 (SEQ ID NO:406), FIG. 408 (SEQ ID NO:408), FIG. 410 (SEQ ID NO:410), FIG. 412 (SEQ ID NO:412), FIG. 414 (SEQ ID NO:414), FIG. 416 (SEQ ID NO:416), FIG. 418 (SEQ ID NO:418), FIG. 420 (SEQ ID NO:420), FIG. 422 (SEQ ID NO:422), FIG. 424 (SEQ ID NO:424), FIG. 426 (SEQ ID NO:426), FIG. 428 (SEQ ID NO:428), FIG. 430 (SEQ ID NO:430), FIG. 432 (SEQ ID NO:432), FIG. 434 (SEQ ID NO:434), FIG. 436 (SEQ ID NO:436), FIG. 438 (SEQ ID NO:438), FIG. 440 (SEQ ID NO:440), FIG. 442 (SEQ ID NO:442), FIG. 444 (SEQ ID NO:444), FIG. 446 (SEQ ID NO:446), FIG. 448 (SEQ ID NO:448), FIG. 450 (SEQ ID NO:450), FIG. 452 (SEQ ID NO:452), FIG. 454 (SEQ ID NO:454), FIG. 456 (SEQ ID NO:456), FIG. 458 (SEQ ID NO:458), FIG. 460 (SEQ ID NO:460), FIG. 462 (SEQ ID NO:462), FIG. 464 (SEQ ID NO:464), FIG. 466 (SEQ ID NO:466), FIG. 468 (SEQ ID NO:468), FIG. 470 (SEQ ID NO:470), FIG. 472 (SEQ ID NO:472), FIG. 474 (SEQ ID NO:474), FIG. 476 (SEQ ID NO:476), FIG. 478 (SEQ ID NO:478), FIG. 480 (SEQ ID NO:480), FIG. 482 (SEQ ID NO:482), FIG. 484 (SEQ ID NO:484), FIG. 486 (SEQ ID NO:486), FIG. 488 (SEQ ID NO:488), FIG. 490 (SEQ ID NO:490), FIG. 492 (SEQ ID NO:492), FIG. 494 (SEQ ID NO:494), FIG. 496 (SEQ ID NO:496), FIG. 498 (SEQ ID NO:498), FIG. 500 (SEQ ID NO:500), FIG. 502 (SEQ ID NO:502), FIG. 504 (SEQ ID NO:504), FIG. 506 (SEQ ID NO:506), FIG. 508 (SEQ ID NO:508), FIG. 510 (SEQ ID NO:510), FIG. 512 (SEQ ID NO:512), FIG. 514 (SEQ ID NO:514), FIG. 516 (SEQ ID NO:516), FIG. 518 (SEQ ID NO:518), FIG. 520 (SEQ ID NO:520), FIG. 522 (SEQ ID NO:522), FIG. 524 (SEQ ID NO:524), FIG. 526 (SEQ ID NO:526), FIG. 528 (SEQ ID NO:528), FIG. 530 (SEQ ID NO:530), FIG. 532 (SEQ ID NO:532), FIG. 534 (SEQ ID NO:534), FIG. 536 (SEQ ID NO:536), FIG. 538 (SEQ ID NO:538), FIG. 540 (SEQ ID NO:540), FIG. 542 (SEQ ID NO:542), FIG. 544 (SEQ ID NO:544), FIG. 546 (SEQ ID NO:546), FIG. 549 (SEQ ID NO:549), FIG. 551 (SEQ ID NO:551), FIG. 553 (SEQ ID NO:553), FIG. 555 (SEQ ID NO:555), FIG. 557 (SEQ ID NO:557), FIG. 559 (SEQ ID NO:559), FIG. 561 (SEQ ID NO:561), FIG. 563 (SEQ ID NO:563), FIG. 565 (SEQ ID NO:565), FIG. 567 (SEQ ID NO:567), FIG. 569 (SEQ ID NO:569), FIG. 571 (SEQ ID NO:571), FIG. 573 (SEQ ID NO:573), FIG. 575 (SEQ ID NO:575), FIG. 577 (SEQ ID NO:577), FIG. 579 (SEQ ID NO:579), FIG. 581 (SEQ ID NO:581), FIG. 583 (SEQ ID NO:583), FIG. 585 (SEQ ID NO:585), FIG. 587 (SEQ ID NO:587), FIG. 589 (SEQ ID NO:589), FIG. 591 (SEQ ID NO:591), FIG. 593 (SEQ ID NO:593), FIG. 595 (SEQ ID NO:595), FIG. 597 (SEQ ID NO:597), FIG. 599 (SEQ ID NO:599), FIG. 601 (SEQ ID NO:601), FIG. 603 (SEQ ID NO:603), FIG. 605 (SEQ ID NO:605), FIG. 607 (SEQ ID NO:607), FIG. 609 (SEQ ID NO:609), FIG. 611 (SEQ ID NO:611), FIG. 613 (SEQ ID NO:613), FIG. 615 (SEQ ID NO:615), FIG. 617 (SEQ ID NO:617), FIG. 619 (SEQ ID NO:619), FIG. 621 (SEQ ID NO:621), FIG. 623 (SEQ ID NO:623), FIG. 625 (SEQ ID NO:625), FIG. 627 (SEQ ID NO:627), FIG. 629 (SEQ ID NO:629), FIG. 631 (SEQ ID NO:631), FIG. 633 (SEQ ID NO:633), FIG. 635 (SEQ ID NO:635), FIG. 637 (SEQ ID NO:637), FIG. 639 (SEQ ID NO:639), FIG. 641 (SEQ ID NO:641), FIG. 643 (SEQ ID NO:643), FIG. 645 (SEQ ID NO:645), FIG. 647 (SEQ ID NO:647), FIG. 649 (SEQ ID NO:649), FIG. 651 (SEQ ID NO:651), FIG. 653 (SEQ ID NO:653), FIG. 655 (SEQ ID NO:655), FIG. 657 (SEQ ID NO:657), FIG. 659 (SEQ ID NO:659), FIG. 661 (SEQ ID NO:661), FIG. 663 (SEQ ID NO:663), FIG. 665 (SEQ ID NO:665), FIG. 667 (SEQ ID NO:667), FIG. 669 (SEQ ID NO:669), FIG. 671 (SEQ ID NO:671), FIG. 673 (SEQ ID NO:673), FIG. 675 (SEQ ID NO:675), FIG. 677 (SEQ ID NO:377), FIG. 679 (SEQ ID NO:679), FIG. 681 (SEQ ID NO:681), FIG. 683 (SEQ ID NO:683), FIG. 685 (SEQ ID NO:685), FIG. 687 (SEQ ID NO:687), FIG. 689 (SEQ ID NO:689), FIG. 691 (SEQ ID NO:691), FIG. 693 (SEQ ID NO:693), FIG. 695 (SEQ ID NO:695), FIG. 697 (SEQ ID NO:697), FIG. 699 (SEQ ID NO:699), FIG. 701 (SEQ ID NO:701), FIG. 703 (SEQ ID NO:703), FIG. 705 (SEQ ID NO:705), FIG. 707 (SEQ ID NO:707), FIG. 709 (SEQ ID NO:709), FIG. 711 (SEQ ID NO:711), FIG. 713 (SEQ ID NO:713), FIG. 715 (SEQ ID NO:715), FIG. 717 (SEQ ID NO:717), FIG. 719 (SEQ ID NO:719), FIG. 721 (SEQ ID NO:721), FIG. 723 (SEQ ID NO:723), FIG. 725 (SEQ ID NO:725), FIG. 727 (SEQ ID NO:727), FIG. 729 (SEQ ID NO:729), FIG. 731 (SEQ ID NO:731), FIG. 733 (SEQ ID NO:733), FIG. 735 (SEQ ID NO:735), FIG. 737 (SEQ ID NO:737), FIG. 739 (SEQ ID NO:739), FIG. 741 (SEQ ID NO:741), FIG. 743 (SEQ ID NO:743), FIG. 745 (SEQ ID NO:745), FIG. 747 (SEQ ID NO:747), FIG. 749 (SEQ ID NO:749), FIG. 751 (SEQ ID NO:751), FIG. 753 (SEQ ID NO:753), FIG. 755 (SEQ ID NO:755), FIG. 757 (SEQ ID NO:757), FIG. 759 (SEQ ID NO:759), FIG. 761 (SEQ ID NO:761), FIG. 763 (SEQ ID NO:763), FIG. 765 (SEQ ID NO:765), FIG. 767 (SEQ ID NO:767), FIG. 769 (SEQ ID NO:769), FIG. 771 (SEQ ID NO:771), FIG. 773 (SEQ ID NO:773), FIG. 775 (SEQ ID NO:775), FIG. 777 (SEQ ID NO:777), FIG. 779 (SEQ ID NO:779), FIG. 781 (SEQ ID NO:781), FIG. 783 (SEQ ID NO:783), FIG. 785 (SEQ ID NO:785), FIG. 787 (SEQ ID NO:787), FIG. 789 (SEQ ID NO:789), FIG. 791 (SEQ ID NO:791), FIG. 793 (SEQ ID NO:793), FIG. 795 (SEQ ID NO:795), FIG. 797 (SEQ ID NO:797), FIG. 799 (SEQ ID NO:799), FIG. 801 (SEQ ID NO:801), FIG. 803 (SEQ ID NO:803), FIG. 805 (SEQ ID NO:805), FIG. 807 (SEQ ID NO:807), FIG. 809 (SEQ ID NO:809), FIG. 811 (SEQ ID NO:811), FIG. 813 (SEQ ID NO:813), FIG. 815 (SEQ ID NO:815), FIG. 817 (SEQ ID NO:817), FIG. 819 (SEQ ID NO:819), FIG. 821 (SEQ ID NO:821), FIG. 823 (SEQ ID NO:823), FIG. 825 (SEQ ID NO:825), FIG. 827 (SEQ ID NO:827), FIG. 829 (SEQ ID NO:829), FIG. 831 (SEQ ID NO:831), FIG. 833 (SEQ ID NO:833), FIG. 835 (SEQ ID NO:835), FIG. 837 (SEQ ID NO:837), FIG. 839 (SEQ ID NO:839), FIG. 841 (SEQ ID NO:841), FIG. 843 (SEQ ID NO:843), FIG. 845 (SEQ ID NO:845), FIG. 847 (SEQ ID NO:847), FIG. 849 (SEQ ID NO:849), FIG. 851 (SEQ ID NO:851), FIG. 853 (SEQ ID NO:853), FIG. 855 (SEQ ID NO:855), FIG. 858 (SEQ ID NO:858), FIG. 860 (SEQ ID NO:860), FIG. 862 (SEQ ID NO:862), FIG. 864 (SEQ ID NO:864), FIG. 866 (SEQ ID NO:866), FIG. 868 (SEQ ID NO:868), FIG. 870 (SEQ ID NO:870), FIG. 872 (SEQ ID NO:872), FIG. 874 (SEQ ID NO:874), FIG. 876 (SEQ ID NO:876), FIG. 878 (SEQ ID NO:878), FIG. 880 (SEQ ID NO:880), FIG. 882 (SEQ ID NO:882), FIG. 884 (SEQ ID NO:884), FIG. 886 (SEQ ID NO:886), FIG. 888 (SEQ ID NO:888), FIG. 890 (SEQ ID NO:890), FIG. 892 (SEQ ID NO:892), FIG. 894 (SEQ ID NO:894), FIG. 896 (SEQ ID NO:896), FIG. 898 (SEQ ID NO:898), FIG. 900 (SEQ ID NO:900), FIG. 902 (SEQ ID NO:902), FIG. 904 (SEQ ID NO:904), FIG. 906 (SEQ ID NO:906), FIG. 908 (SEQ ID NO:908), FIG. 910 (SEQ ID NO:910), FIG. 912 (SEQ ID NO:912), FIG. 914 (SEQ ID NO:914), FIG. 916 (SEQ ID NO:916), FIG. 918 (SEQ ID NO:918), FIG. 920 (SEQ ID NO:920), FIG. 922 (SEQ ID NO:922), FIG. 924 (SEQ ID NO:924), FIG. 926 (SEQ ID NO:926), FIG. 928 (SEQ ID NO:928), FIG. 930 (SEQ ID NO:930), FIG. 932 (SEQ ID NO:932), FIG. 934 (SEQ ID NO:934), FIG. 936 (SEQ ID NO:936), FIG. 938 (SEQ ID NO:938), FIG. 940 (SEQ ID NO:940), FIG. 943 (SEQ ID NO:943), FIG. 945 (SEQ ID NO:945), FIG. 947 (SEQ ID NO:947), FIG. 949 (SEQ ID NO:949), FIG. 951 (SEQ ID NO:951), FIG. 953 (SEQ ID NO:953), FIG. 955 (SEQ ID NO:955), FIG. 958 (SEQ ID NO:958), FIG. 960 (SEQ ID NO:960), FIG. 963 (SEQ ID NO:963), FIG. 965 (SEQ ID NO:965), FIG. 968 (SEQ ID NO:968), FIG. 970 (SEQ ID NO:970), FIG. 972 (SEQ ID NO:972), FIG. 974 (SEQ ID NO:974), FIG. 976 (SEQ ID NO:976), FIG. 978 (SEQ ID NO:978), FIG. 980 (SEQ ID NO:980), FIG. 983 (SEQ ID NO:983), FIG. 985 (SEQ ID NO:985), FIG. 987 (SEQ ID NO:987), FIG. 990 (SEQ ID NO:990), FIG. 992 (SEQ ID NO:992), FIG. 994 (SEQ ID NO:994), FIG. 996 (SEQ ID NO:996), FIG. 998 (SEQ ID NO:998), FIG. 1000 (SEQ ID NO:1000), FIG. 1002 (SEQ ID NO:1002), FIG. 1007 (SEQ ID NO:1007), FIG. 1009 (SEQ ID NO:1009), FIG. 1011 (SEQ ID NO:1011), FIG. 1013 (SEQ ID NO:1013), FIG. 1015 (SEQ ID NO:1015), FIG. 1017 (SEQ ID NO:1017), FIG. 1019 (SEQ ID NO:1019), FIG. 1021 (SEQ ID NO:1021), FIG. 1023 (SEQ ID NO:1023), FIG. 1025 (SEQ ID NO:1025), FIG. 1030 (SEQ ID NO:1030), FIG. 1033 (SEQ ID NO:1033), FIG. 1035 (SEQ ID NO:1035), FIG. 1037 (SEQ ID NO:1037), FIG. 1039 (SEQ ID NO:1039), FIG. 1041 (SEQ ID NO:1041), FIG. 1043 (SEQ ID NO:1043), FIG. 1046 (SEQ ID NO:1046), FIG. 1048 (SEQ ID NO:1048), FIG. 1050 (SEQ ID NO:1050), FIG. 1053 (SEQ ID NO:1053), FIG. 1055 (SEQ ID NO:1055), FIG. 1057 (SEQ ID NO:1057), FIG. 1060 (SEQ ID NO:1060), FIG. 1062 (SEQ ID NO:1062), FIG. 1064 (SEQ ID NO:1064), FIG. 1066 (SEQ ID NO:1066), FIG. 1068 (SEQ ID NO:1068), FIG. 1070 (SEQ ID NO:1070), FIG. 1072 (SEQ ID NO:1072), FIG. 1074 (SEQ ID NO:1074), FIG. 1076 (SEQ ID NO:1076), FIG. 1078 (SEQ ID NO:1078), FIG. 1080 (SEQ ID NO:1080), FIG. 1082 (SEQ ID NO:1082), FIG. 1084 (SEQ ID NO:1084), FIG. 1086 (SEQ ID NO:1086), FIG. 1088 (SEQ ID NO:1088), FIG. 1090 (SEQ ID NO:1090), FIG. 1092 (SEQ ID NO:1092), FIG. 1094 (SEQ ID NO:1094), FIG. 1096 (SEQ ID NO:1096), FIG. 1098 (SEQ ID NO:1098), FIG. 1101 (SEQ ID NO:1101), FIG. 1103 (SEQ ID NO:1103), FIG. 1105 (SEQ ID NO:1105), FIG. 1107 (SEQ ID NO:1107), FIG. 1109 (SEQ ID NO:1109), FIG. 1111 (SEQ ID NO:1111), FIG. 1113 (SEQ ID NO:1113), FIG. 1116 (SEQ ID NO:1116), FIG. 1118 (SEQ ID NO:1118), FIG. 1120 (SEQ ID NO:1120), FIG. 1123 (SEQ ID NO:1123), FIG. 1125 (SEQ ID NO:1125), FIG. 1128 (SEQ ID NO:1128), FIG. 1130 (SEQ ID NO:1130), FIG. 1132 (SEQ ID NO:1132), FIG. 1134 (SEQ ID NO:1134), FIG. 1136 (SEQ ID NO:1136), FIG. 1138 (SEQ ID NO:1138), FIG. 1142 (SEQ ID NO:1142), FIG. 1144 (SEQ ID NO:1144), FIG. 1146 (SEQ ID NO:1146), FIG. 1148 (SEQ ID NO:1148), FIG. 1150 (SEQ ID NO:1150), FIG. 1152 (SEQ ID NO:1152), FIG. 1154 (SEQ ID NO:1154), FIG. 1156 (SEQ ID NO:1156), FIG. 1158 (SEQ ID NO:1158), FIG. 1160 (SEQ ID NO:1160), FIG. 1162 (SEQ ID NO:1162), FIG. 1164 (SEQ ID NO:1164), FIG. 1166 (SEQ ID NO:1166), FIG. 1168 (SEQ ID NO:1168), FIG. 1170 (SEQ ID NO:1170), FIG. 1172 (SEQ ID NO:1172), FIG. 1174 (SEQ ID NO:1174), FIG. 1176 (SEQ ID NO:1176), FIG. 1178 (SEQ ID NO:1178), FIG. 1180 (SEQ ID NO:1180), FIG. 1182 (SEQ ID NO:1182), FIG. 1184 (SEQ ID NO:1184), FIG. 1186 (SEQ ID NO:1186), FIG. 1188 (SEQ ID NO:1188), FIG. 1190 (SEQ ID NO:1190), FIG. 1192 (SEQ ID NO:1192), FIG. 1194 (SEQ ID NO:1194), FIG. 1196 (SEQ ID NO:1196), FIG. 1198 (SEQ ID NO:1198), FIG. 1200 (SEQ ID NO:1200), FIG. 1202 (SEQ ID NO:1202), FIG. 1204 (SEQ ID NO:1204), FIG. 1206 (SEQ ID NO:1206), FIG. 1208 (SEQ ID NO:1208), FIG. 1210 (SEQ ID NO:1210), FIG. 1212 (SEQ ID NO:1212), FIG. 1214 (SEQ ID NO:1214), FIG. 1216 (SEQ ID NO:1216), FIG. 1218 (SEQ ID NO:1218), FIG. 1220 (SEQ ID NO:1220), FIG. 1222 (SEQ ID NO:1222), FIG. 1224 (SEQ ID NO:1224), FIG. 1226 (SEQ ID NO:1226), FIG. 1228 (SEQ ID NO:1228), FIG. 1230 (SEQ ID NO:1230), FIG. 1232 (SEQ ID NO:1232), FIG. 1234 (SEQ ID NO:1234), FIG. 1236 (SEQ ID NO:1236), FIG. 1238 (SEQ ID NO:1238), FIG. 1240 (SEQ ID NO:1240), FIG. 1242 (SEQ ID NO:1242), FIG. 1244 (SEQ ID NO:1244), FIG. 1246 (SEQ ID NO:1246), FIG. 1248 (SEQ ID NO:1248), FIG. 1250 (SEQ ID NO:1250), FIG. 1252 (SEQ ID NO:1252), FIG. 1254 (SEQ ID NO:1254), FIG. 1256 (SEQ ID NO:1256), FIG. 1258 (SEQ ID NO:1258), FIG. 1260 (SEQ ID NO:1260), FIG. 1262 (SEQ ID NO:1262), FIG. 1264 (SEQ ID NO:1264), FIG. 1266 (SEQ ID NO:1266), FIG. 1268 (SEQ ID NO:1268), FIG. 1270 (SEQ ID NO:1270), FIG. 1272 (SEQ ID NO:1272), FIG. 1274 (SEQ ID NO:1274), FIG. 1276 (SEQ ID NO:1276), FIG. 1278 (SEQ ID NO:1278), FIG. 1280 (SEQ ID NO:1280), FIG. 1282 (SEQ ID NO:1282), FIG. 1284 (SEQ ID NO:1284), FIG. 1286 (SEQ ID NO:1286), FIG. 1288 (SEQ ID NO:1288), FIG. 1290 (SEQ ID NO:1290), FIG. 1292 (SEQ ID NO:1292), FIG. 1294 (SEQ ID NO:1294), FIG. 1296 (SEQ ID NO:1296), FIG. 1298 (SEQ ID NO:1298), FIG. 1300 (SEQ ID NO:1300), FIG. 1302 (SEQ ID NO:1302), FIG. 1304 (SEQ ID NO:1304), FIG. 1306 (SEQ ID NO:1306), FIG. 1308 (SEQ ID NO:1308), FIG. 1310 (SEQ ID NO:1310), FIG. 1312 (SEQ ID NO:1312), FIG. 1314 (SEQ ID NO:1314), FIG. 1316 (SEQ ID NO:1316), FIG. 1318 (SEQ ID NO:1318), FIG. 1320 (SEQ ID NO:1320), FIG. 1322 (SEQ ID NO:1322), FIG. 1324 (SEQ ID NO:1324), FIG. 1326 (SEQ ID NO:1326), FIG. 1328 (SEQ ID NO:1328), FIG. 1330 (SEQ ID NO:1330), FIG. 1332 (SEQ ID NO:1332), FIG. 1334 (SEQ ID NO:1334), FIG. 1336 (SEQ ID NO:1336), FIG. 1338 (SEQ ID NO:1338), FIG. 1340 (SEQ ID NO:1340), FIG. 1342 (SEQ ID NO:1342), FIG. 1344 (SEQ ID NO:1344), FIG. 1346 (SEQ ID NO:1346), FIG. 1348 (SEQ ID NO:1348), FIG. 1350 (SEQ ID NO:1350), FIG. 1352 (SEQ ID NO:1352), FIG. 1354 (SEQ ID NO:1354), FIG. 1356 (SEQ ID NO:1356), FIG. 1358 (SEQ ID NO:1358), FIG. 1361 (SEQ ID NO:1361), FIG. 1363 (SEQ ID NO:1363), FIG. 1365 (SEQ ID NO:1365), FIG. 1367 (SEQ ID NO:1367), FIG. 1369 (SEQ ID NO:1369), FIG. 1371 (SEQ ID NO:1371), FIG. 1373 (SEQ ID NO:1373), FIG. 1375 (SEQ ID NO:1375), FIG. 1377 (SEQ ID NO:1377), FIG. 1379 (SEQ ID NO:1379), FIG. 1381 (SEQ ID NO:1381), FIG. 1383 (SEQ ID NO:1383), FIG. 1385 (SEQ ID NO:1385), FIG. 1387 (SEQ ID NO:1387), FIG. 1389 (SEQ ID NO:1389), FIG. 1391 (SEQ ID NO:1391), FIG. 1393 (SEQ ID NO:1393), FIG. 1395 (SEQ ID NO:1395), FIG. 1397 (SEQ ID NO:1397), FIG. 1399 (SEQ ID NO:1399), FIG. 1401 (SEQ ID NO:1401), FIG. 1403 (SEQ ID NO:1403), FIG. 1405 (SEQ ID NO:1405), FIG. 1407 (SEQ ID NO:1407), FIG. 1409 (SEQ ID NO:1409), FIG. 1411 (SEQ ID NO:1411), FIG. 1413 (SEQ ID NO:1413), FIG. 1415 (SEQ ID NO:1415), FIG. 1417 (SEQ ID NO:1417), FIG. 1419 (SEQ ID NO:1419), FIG. 1421 (SEQ ID NO:1421), FIG. 1423 (SEQ ID NO:1423), FIG. 1425 (SEQ ID NO:1425), FIG. 1427 (SEQ ID NO:1427), FIG. 1429 (SEQ ID NO:1429), FIG. 1431 (SEQ ID NO:1431), FIG. 1433 (SEQ ID NO:1433), FIG. 1435 (SEQ ID NO:1435), FIG. 1437 (SEQ ID NO:1437), FIG. 1439 (SEQ ID NO:1439), FIG. 1441 (SEQ ID NO:1441), FIG. 1443 (SEQ ID NO:1443), FIG. 1445 (SEQ ID NO:1445), FIG. 1447 (SEQ ID NO:1447), FIG. 1449 (SEQ ID NO:1449), FIG. 1451 (SEQ ID NO:1451), FIG. 1453 (SEQ ID NO:1453), FIG. 1455 (SEQ ID NO:1455), FIG. 1457 (SEQ ID NO:1457), FIG. 1459 (SEQ ID NO:1459), FIG. 1461 (SEQ ID NO:1461), FIG. 1463 (SEQ ID NO:1463), FIG. 1465 (SEQ ID NO:1465), FIG. 1467 (SEQ ID NO:1467), FIG. 1469 (SEQ ID NO:1469), FIG. 1471 (SEQ ID NO:1471), FIG. 1473 (SEQ ID NO:1473), FIG. 1475 (SEQ ID NO:1475), FIG. 1477 (SEQ ID NO:1477), FIG. 1479 (SEQ ID NO:1479), FIG. 1481 (SEQ ID NO:1481), FIG. 1483 (SEQ ID NO:1483), FIG. 1485 (SEQ ID NO:1485), FIG. 1487 (SEQ ID NO:1487), FIG. 1489 (SEQ ID NO:1489), FIG. 1491 (SEQ ID NO:1491), FIG. 1493 (SEQ ID NO:1493), FIG. 1495 (SEQ ID NO:1495), FIG. 1497 (SEQ ID NO:1497), FIG. 1499 (SEQ ID NO:1499), FIG. 1501 (SEQ ID NO:1501), FIG. 1503 (SEQ ID NO:1503), FIG. 1505 (SEQ ID NO:1505), FIG. 1507 (SEQ ID NO:1507), FIG. 1509 (SEQ ID NO:1509), FIG. 1511 (SEQ ID NO:1511), FIG. 1513 (SEQ ID NO:1513), FIG. 1515 (SEQ ID NO:1515), FIG. 1517 (SEQ ID NO:1517), FIG. 1519 (SEQ ID NO:1519), FIG. 1521 (SEQ ID NO:1521), FIG. 1523 (SEQ ID NO:1523), FIG. 1525 (SEQ ID NO:1525), FIG. 1527 (SEQ ID NO:1527), FIG. 1529 (SEQ ID NO:1529), FIG. 1531 (SEQ ID NO:1531), FIG. 1533 (SEQ ID NO:1533), FIG. 1535 (SEQ ID NO:1535), FIG. 1537 (SEQ ID NO:1537), FIG. 1539 (SEQ ID NO:1539), FIG. 1541 (SEQ ID NO:1541), FIG. 1543 (SEQ ID NO:1543), FIG. 1545 (SEQ ID NO:1545), FIG. 1547 (SEQ ID NO:1547), FIG. 1549 (SEQ ID NO:1549), FIG. 1551 (SEQ ID NO:1551), FIG. 1553 (SEQ ID NO:1553), FIG. 1555 (SEQ ID NO:1555), FIG. 1557 (SEQ ID NO:1557), FIG. 1559 (SEQ ID NO:1559), FIG. 1561 (SEQ ID NO:1561), FIG. 1563 (SEQ ID NO:1563), FIG. 1565 (SEQ ID NO:1565), FIG. 1567 (SEQ ID NO:1567), FIG. 1569 (SEQ ID NO:1569), FIG. 1571 (SEQ ID NO:1571), FIG. 1573 (SEQ ID NO:1573), FIG. 1575 (SEQ ID NO:1575), FIG. 1578 (SEQ ID NO:1578), FIG. 1581 (SEQ ID NO:1581), FIG. 1583 (SEQ ID NO:1583), FIG. 1585 (SEQ ID NO:1585), FIG. 1587 (SEQ ID NO:1587), FIG. 1589 (SEQ ID NO:1589), FIG. 1592 (SEQ ID NO:1592), FIG. 1594 (SEQ ID NO:1594), FIG. 1596 (SEQ ID NO:1596), FIG. 1598 (SEQ ID NO:1598), FIG. 1600 (SEQ ID NO:1600), FIG. 1602 (SEQ ID NO:1602), FIG. 1604 (SEQ ID NO:1604), FIG. 1606 (SEQ ID NO:1606), FIG. 1609 (SEQ ID NO:1609), FIG. 1611 (SEQ ID NO:1611), FIG. 1614 (SEQ ID NO:1614), FIG. 1617 (SEQ ID NO:1617), FIG. 1619 (SEQ ID NO:1619), FIG. 1621 (SEQ ID NO:1621), FIG. 1623 (SEQ ID NO:1623), FIG. 1626 (SEQ ID NO:1626), FIG. 1628 (SEQ ID NO:1628), FIG. 1630 (SEQ ID NO:1630), FIG. 1632 (SEQ ID NO:1632), FIG. 1636 (SEQ ID NO:1636), FIG. 1639 (SEQ ID NO:1639), FIG. 1644 (SEQ ID NO:1644), FIG. 1646 (SEQ ID NO:1646), FIG. 1648 (SEQ ID NO:1648), FIG. 1650 (SEQ ID NO:1650), FIG. 1652 (SEQ ID NO:1652), FIG. 1654 (SEQ ID NO:1654), FIG. 1656 (SEQ ID NO:1656), FIG. 1658 (SEQ ID NO:1658), FIG. 1660 (SEQ ID NO:1660), FIG. 1662 (SEQ ID NO:1662), FIG. 1664 (SEQ ID NO:1664), FIG. 1666 (SEQ ID NO:1666), FIG. 1668 (SEQ ID NO:1668), FIG. 1670 (SEQ ID NO:1670), FIG. 1672 (SEQ ID NO:1672), FIG. 1674 (SEQ ID NO:1674), FIG. 1676 (SEQ ID NO:1676), FIG. 1678 (SEQ ID NO:1678), FIG. 1680 (SEQ ID NO:1680), FIG. 1683 (SEQ ID NO:1683), FIG. 1685 (SEQ ID NO:1685), FIG. 1687 (SEQ ID NO:1687), FIG. 1689 (SEQ ID NO:1689), FIG. 1692 (SEQ ID NO:1692), FIG. 1694 (SEQ ID NO:1694), FIG. 1696 (SEQ ID NO:1696), FIG. 1698 (SEQ ID NO:1698), FIG. 1701 (SEQ ID NO:1701), FIG. 1703 (SEQ ID NO:1703), FIG. 1705 (SEQ ID NO:1705), FIG. 1707 (SEQ ID NO:1707), FIG. 1709 (SEQ ID NO:1709), FIG. 1711 (SEQ ID NO:1711), FIG. 1713 (SEQ ID NO:1713), FIG. 1715 (SEQ ID NO:1715), FIG. 1717 (SEQ ID NO:1717), FIG. 1719 (SEQ ID NO:1719), FIG. 1721 (SEQ ID NO:1721), FIG. 1723 (SEQ ID NO:1723), FIG. 1725 (SEQ ID NO:1725), FIG. 1727 (SEQ ID NO:1727), FIG. 1729 (SEQ ID NO:1729), FIG. 1732 (SEQ ID NO:1732), FIG. 1734 (SEQ ID NO:1734), FIG. 1736 (SEQ ID NO:1736), FIG. 1738 (SEQ ID NO:1738), FIG. 1741 (SEQ ID NO:1741), FIG. 1743 (SEQ ID NO:1743), FIG. 1745 (SEQ ID NO:1745), FIG. 1747 (SEQ ID NO:1747), FIG. 1749 (SEQ ID NO:1749), FIG. 1751 (SEQ ID NO:1751), FIG. 1753 (SEQ ID NO:1753), FIG. 1755 (SEQ ID NO:1755), FIG. 1757 (SEQ ID NO:1757), FIG. 1760 (SEQ ID NO:1760), FIG. 1762 (SEQ ID NO:1762), FIG. 1764 (SEQ ID NO:1764), FIG. 1766 (SEQ ID NO:1766), FIG. 1769 (SEQ ID NO:1769), FIG. 1771 (SEQ ID NO:1771), FIG. 1773 (SEQ ID NO:1773), FIG. 1775 (SEQ ID NO:1775), FIG. 1777 (SEQ ID NO:1777), FIG. 1779 (SEQ ID NO:1779), FIG. 1781 (SEQ ID NO:1781), FIG. 1783 (SEQ ID NO:1783), FIG. 1785 (SEQ ID NO:1785), FIG. 1787 (SEQ ID NO:1787), FIG. 1789 (SEQ ID NO:1789), FIG. 1792 (SEQ ID NO:1792), FIG. 1795 (SEQ ID NO:1795), FIG. 1797 (SEQ ID NO:1797), FIG. 1799 (SEQ ID NO:1799), FIG. 1802 (SEQ ID NO:1802), FIG. 1805 (SEQ ID NO:1805), FIG. 1807 (SEQ ID NO:1807), FIG. 1809 (SEQ ID NO:1809), FIG. 1811 (SEQ ID NO:1811), FIG. 1813 (SEQ ID NO:1813), FIG. 1815 (SEQ ID NO:1815), FIG. 1817 (SEQ ID NO:1817), FIG. 1819 (SEQ ID NO:1819), FIG. 1821 (SEQ ID NO:1821), FIG. 1823 (SEQ ID NO:1823), FIG. 1825 (SEQ ID NO:1825), FIG. 1827 (SEQ ID NO:1827), FIG. 1829 (SEQ ID NO:1829), FIG. 1831 (SEQ ID NO:1831), FIG. 1833 (SEQ ID NO:1833), FIG. 1836 (SEQ ID NO:1836), FIG. 1838 (SEQ ID NO:1838), FIG. 1841 (SEQ ID NO:1841), FIG. 1843 (SEQ ID NO:1843), FIG. 1845 (SEQ ID NO:1845), FIG. 1847 (SEQ ID NO:1847), FIG. 1849 (SEQ ID NO:1849), FIG. 1851 (SEQ ID NO:1851), FIG. 1854 (SEQ ID NO:1854), FIG. 1856 (SEQ ID NO:1856), FIG. 1858 (SEQ ID NO:1858), FIG. 1860 (SEQ ID NO:1860), FIG. 1863 (SEQ ID NO:1863), FIG. 1865 (SEQ ID NO:1865), FIG. 1867 (SEQ ID NO:1867), FIG. 1869 (SEQ ID NO:1869), FIG. 1871 (SEQ ID NO:1871), FIG. 1873 (SEQ ID NO:1873), FIG. 1875 (SEQ ID NO:1875), FIG. 1877 (SEQ ID NO:1877), FIG. 1881 (SEQ ID NO:1881), FIG. 1883 (SEQ ID NO:1883), FIG. 1885 (SEQ ID NO:1885), FIG. 1887 (SEQ ID NO:1887), FIG. 1889 (SEQ ID NO:1889), FIG. 1891 (SEQ ID NO:1891), FIG. 1893 (SEQ ID NO:1893), FIG. 1895 (SEQ ID NO:1895), FIG. 1897 (SEQ ID NO:1897), FIG. 1899 (SEQ ID NO:1899), FIG. 1901 (SEQ ID NO:1901), FIG. 1903 (SEQ ID NO:1903), FIG. 1905 (SEQ ID NO:1905), FIG. 1908 (SEQ ID NO:1908), FIG. 1910 (SEQ ID NO:1910), FIG. 1913 (SEQ ID NO:1913), FIG. 1915 (SEQ ID NO:1915), FIG. 1917 (SEQ ID NO:1917), FIG. 1919 (SEQ ID NO:1919), FIG. 1922 (SEQ ID NO:1922), FIG. 1924 (SEQ ID NO:1924), FIG. 1926 (SEQ ID NO:1926), FIG. 1928 (SEQ ID NO:1928), FIG. 1930 (SEQ ID NO:1930), FIG. 1932 (SEQ ID NO:1932), FIG. 1934 (SEQ ID NO:1934), FIG. 1936 (SEQ ID NO:1936), FIG. 1938 (SEQ ID NO:1938), FIG. 1940 (SEQ ID NO:1940), FIG. 1942 (SEQ ID NO:1942), FIG. 1944 (SEQ ID NO:1944), FIG. 1946 (SEQ ID NO:1946), FIG. 1948 (SEQ ID NO:1948), FIG. 1950 (SEQ ID NO:1950), FIG. 1952 (SEQ ID NO:1952), FIG. 1954 (SEQ ID NO:1954), FIG. 1956 (SEQ ID NO:1956), FIG. 1958 (SEQ ID NO:1958), FIG. 1960 (SEQ ID NO:1960), FIG. 1962 (SEQ ID NO:1962), FIG. 1964 (SEQ ID NO:1964), FIG. 1966 (SEQ ID NO:1966), FIG. 1968 (SEQ ID NO:1968), FIG. 1970 (SEQ ID NO:1970), FIG. 1972 (SEQ ID NO:1972), FIG. 1974 (SEQ ID NO:1974), FIG. 1976 (SEQ ID NO:1976), FIG. 1978 (SEQ ID NO:1978), FIG. 1980 (SEQ ID NO:1980), FIG. 1982 (SEQ ID NO:1982), FIG. 1984 (SEQ ID NO:1984), FIG. 1986 (SEQ ID NO:1986), FIG. 1988 (SEQ ID NO:1988), FIG. 1990 (SEQ ID NO:1990), FIG. 1992 (SEQ ID NO:1992), FIG. 1994 (SEQ ID NO:1994), FIG. 1996 (SEQ ID NO:1996), FIG. 1998 (SEQ ID NO:1998), FIG. 2000 (SEQ ID NO:2000), FIG. 2002 (SEQ ID NO:2002), FIG. 2004 (SEQ ID NO:2004), FIG. 2006 (SEQ ID NO:2006), FIG. 2008 (SEQ ID NO:2008), FIG. 2010 (SEQ ID NO:2010), FIG. 2012 (SEQ ID NO:2012), FIG. 2014 (SEQ ID NO:2014), FIG. 2016 (SEQ ID NO:2016), FIG. 2018 (SEQ ID NO:2018), FIG. 2020 (SEQ ID NO:2020), FIG. 2022 (SEQ ID NO:2022), FIG. 2024 (SEQ ID NO:2024), FIG. 2026 (SEQ ID NO:2026), FIG. 2028 (SEQ ID NO:2028), FIG. 2030 (SEQ ID NO:2030), FIG. 2032 (SEQ ID NO:2032), FIG. 2034 (SEQ ID NO:2034), FIG. 2036 (SEQ ID NO:2036), FIG. 2038 (SEQ ID NO:2038), FIG. 2040 (SEQ ID NO:2040), FIG. 2042 (SEQ ID NO:2042), FIG. 2044 (SEQ ID NO:2044), FIG. 2046 (SEQ ID NO:2046), FIG. 2048 (SEQ ID NO:2048), FIG. 2050 (SEQ ID NO:2050), FIG. 2052 (SEQ ID NO:2052), FIG. 2054 (SEQ ID NO:2054), FIG. 2056 (SEQ ID NO:2056), FIG. 2058 (SEQ ID NO:2058), FIG. 2060 (SEQ ID NO:2060), FIG. 2062 (SEQ ID NO:2062), FIG. 2064 (SEQ ID NO:2064), FIG. 2066 (SEQ ID NO:2066), FIG. 2068 (SEQ ID NO:2068), FIG. 2070 (SEQ ID NO:2070), FIG. 2072 (SEQ ID NO:2072), FIG. 2074 (SEQ ID NO:2074), FIG. 2076 (SEQ ID NO:2076), FIG. 2078 (SEQ ID NO:2078), FIG. 2080 (SEQ ID NO:2080), FIG. 2082 (SEQ ID NO:2082), FIG. 2084 (SEQ ID NO:2084), FIG. 2086 (SEQ ID NO:2086), FIG. 2088 (SEQ ID NO:2088), FIG. 2090 (SEQ ID NO:2090), FIG. 2092 (SEQ ID NO:2092), FIG. 2094 (SEQ ID NO:2094), FIG. 2096 (SEQ ID NO:2096), FIG. 2098 (SEQ ID NO:2098), FIG. 2100 (SEQ ID NO:2100), FIG. 2102 (SEQ ID NO:2102), FIG. 2104 (SEQ ID NO:2104), FIG. 2106 (SEQ ID NO:2106), FIG. 2108 (SEQ ID NO:2108), FIG. 2110 (SEQ ID NO:2110), FIG. 2112 (SEQ ID NO:2112), FIG. 2114 (SEQ ID NO:2114), FIG. 2116 (SEQ ID NO:2116), FIG. 2118 (SEQ ID NO:2118), FIG. 2120 (SEQ ID NO:2120), FIG. 2122 (SEQ ID NO:2122), FIG. 2124 (SEQ ID NO:2124), FIG. 2126 (SEQ ID NO:2126), FIG. 2128 (SEQ ID NO:2128), FIG. 2130 (SEQ ID NO:2130). FIG. 2132 (SEQ ID NO:2132), FIG. 2134 (SEQ ID NO:2134), FIG. 2136 (SEQ ID NO:2136), FIG. 2138 (SEQ ID NO:2138), FIG. 2140 (SEQ ID NO:2140), FIG. 2142 (SEQ ID NO:2142), FIG. 2144 (SEQ ID NO:2144), FIG. 2146 (SEQ ID NO:2146), FIG. 2148 (SEQ ID NO:2148), FIG. 2150 (SEQ ID NO:2150), FIG. 2152 (SEQ ID NO:2152), FIG. 2154 (SEQ ID NO:2154), FIG. 2156 (SEQ ID NO:2156), FIG. 2158 (SEQ ID NO:2158), FIG. 2160 (SEQ ID NO:2160), FIG. 2163 (SEQ ID NO:2163), FIG. 2165 (SEQ ID NO:2165), FIG. 2167 (SEQ ID NO:2167), FIG. 2170 (SEQ ID NO:2170), FIG. 2172 (SEQ ID NO:2172), FIG. 2174 (SEQ ID NO:2174), FIG. 2176 (SEQ ID NO:2176), FIG. 2178 (SEQ ID NO:2178), FIG. 2180 (SEQ ID NO:2180), FIG. 2182 (SEQ ID NO:2182), FIG. 2184 (SEQ ID NO:2184), FIG. 2186 (SEQ ID NO:2186), FIG. 2188 (SEQ ID NO:2188), FIG. 2191 (SEQ ID NO:2191), FIG. 2193 (SEQ ID NO:2193), FIG. 2195 (SEQ ID NO:2195), FIG. 2197 (SEQ ID NO:2197), FIG. 2199 (SEQ ID NO:2199), FIG. 2201 (SEQ ID NO:2201), FIG. 2204 (SEQ ID NO:2204), FIG. 2207 (SEQ ID NO:2207), FIG. 2209 (SEQ ID NO:2209), FIG. 2212 (SEQ ID NO:2212), FIG. 2214 (SEQ ID NO:2214), FIG. 2216 (SEQ ID NO:2216), FIG. 2218 (SEQ ID NO:2218), FIG. 2220 (SEQ ID NO:2220), FIG. 2222 (SEQ ID NO:2222), FIG. 2224 (SEQ ID NO:2224), FIG. 2226 (SEQ ID NO:2226), FIG. 2228 (SEQ ID NO:2228), FIG. 2230 (SEQ ID NO:2230), FIG. 2232 (SEQ ID NO:2232), FIG. 2234 (SEQ ID NO:2234), FIG. 2236 (SEQ ID NO:2236), FIG. 2238 (SEQ ID NO:2238), FIG. 2240 (SEQ ID NO:2240), FIG. 2242 (SEQ ID NO:2242), FIG. 2244 (SEQ ID NO:2244), FIG. 2246 (SEQ ID NO:2246), FIG. 2248 (SEQ ID NO:2248), FIG. 2250 (SEQ ID NO:2250), FIG. 2252 (SEQ ID NO:2252), FIG. 2254 (SEQ ID NO:2254), FIG. 2256 (SEQ ID NO:2256), FIG. 2258 (SEQ ID NO:2258), FIG. 2260 (SEQ ID NO:2260), FIG. 2262 (SEQ ID NO:2262), FIG. 2264 (SEQ ID NO:2264), FIG. 2266 (SEQ ID NO:2266), FIG. 2268 (SEQ ID NO:2268), FIG. 2270 (SEQ ID NO:2270), FIG. 2272 (SEQ ID NO:2272), FIG. 2274 (SEQ ID NO:2274), FIG. 2276 (SEQ ID NO:2276), FIG. 2278 (SEQ ID NO:2278), FIG. 2280 (SEQ ID NO:2280), FIG. 2282 (SEQ ID NO:2282), FIG. 2284 (SEQ ID NO:2284), FIG. 2286 (SEQ ID NO:2286), FIG. 2288 (SEQ ID NO:2288), FIG. 2290 (SEQ ID NO:2290), FIG. 2292 (SEQ ID NO:2292), FIG. 2294 (SEQ ID NO:2294), FIG. 2296 (SEQ ID NO:2296), FIG. 2298 (SEQ ID NO:2298), FIG. 2301 (SEQ ID NO:2301), FIG. 2303 (SEQ ID NO:2303), FIG. 2305 (SEQ ID NO:2305), FIG. 2307 (SEQ ID NO:2307), FIG. 2310 (SEQ ID NO:2310), FIG. 2312 (SEQ ID NO:2312), FIG. 2314 (SEQ ID NO:2314), FIG. 2316 (SEQ ID NO:2316), FIG. 2319 (SEQ ID NO:2319), FIG. 2321 (SEQ ID NO:2321), FIG. 2323 (SEQ ID NO:2323), FIG. 2325 (SEQ ID NO:2325), FIG. 2327 (SEQ ID NO:2327), FIG. 2329 (SEQ ID NO:2329), FIG. 2331 (SEQ ID NO:2331), FIG. 2333 (SEQ ID NO:2333), FIG. 2335 (SEQ ID NO:2335), FIG. 2337 (SEQ ID NO:2337), FIG. 2339 (SEQ ID NO:2339), FIG. 2341 (SEQ ID NO:2341), FIG. 2343 (SEQ ID NO:2343), FIG. 2345 (SEQ ID NO:2345), FIG. 2347 (SEQ ID NO:2347), FIG. 2349 (SEQ ID NO:2349), FIG. 2351 (SEQ ID NO:2351), FIG. 2353 (SEQ ID NO:2353), FIG. 2355 (SEQ ID NO:2355), FIG. 2357 (SEQ ID NO:2357), FIG. 2359 (SEQ ID NO:2359), FIG. 2361 (SEQ ID NO:2361), FIG. 2363 (SEQ ID NO:2363), FIG. 2365 (SEQ ID NO:2365), FIG. 2367 (SEQ ID NO:2367), FIG. 2369 (SEQ ID NO:2369), FIG. 2371 (SEQ ID NO:2371), FIG. 2373 (SEQ ID NO:2373), FIG. 2375 (SEQ ID NO:2375), FIG. 2378 (SEQ ID NO:2378), FIG. 2380 (SEQ ID NO:2380), FIG. 2383 (SEQ ID NO:2383), FIG. 2386 (SEQ ID NO:2386), FIG. 2388 (SEQ ID NO:2388), FIG. 2391 (SEQ ID NO:2391), FIG. 2393 (SEQ ID NO:2393), FIG. 2396 (SEQ ID NO:2396), FIG. 2398 (SEQ ID NO:2398), FIG. 2402 (SEQ ID NO:2402), FIG. 2404 (SEQ ID NO:2404), FIG. 2408 (SEQ ID NO:2408), FIG. 2410 (SEQ ID NO:2410), FIG. 2412 (SEQ ID NO:2412), FIG. 2415 (SEQ ID NO:2415), FIG. 2418 (SEQ ID NO:2418), FIG. 2420 (SEQ ID NO:2420), FIG. 2422 (SEQ ID NO:2422), FIG. 2424 (SEQ ID NO:2424), FIG. 2426 (SEQ ID NO:2426), FIG. 2430 (SEQ ID NO:2430), FIG. 2432 (SEQ ID NO:2432), FIG. 2434 (SEQ ID NO:2434), FIG. 2436 (SEQ ID NO:2436), FIG. 2438 (SEQ ID NO:2438), FIG. 2440 (SEQ ID NO:2440), or FIG. 2442 (SEQ ID NO:2442), in a sample suspected of containing said polypeptide, said method comprising exposing said sample to an anti-PRO antibody, and determining binding of said antibody to a component of said sample.

21. A method of diagnosing an immune related disease in a mammal, said method comprising detecting the level of expression of a gene encoding a PRO polypeptide of the invention as described in FIG. 2 (SEQ ID NO:2), FIG. 4 (SEQ ID NO:4), FIG. 6 (SEQ ID NO:6), FIG. 8 (SEQ ID NO:8), FIG. 10 (SEQ ID NO:10), FIG. 12 (SEQ ID NO:12), FIG. 14 (SEQ ID NO:14), FIG. 16 (SEQ ID NO:16), FIG. 18 (SEQ ID NO:18), FIG. 20 (SEQ ID NO:20), FIG. 22 (SEQ ID NO:22), FIG. 24 (SEQ ID NO:24), FIG. 26 (SEQ ID NO:26), FIG. 28 (SEQ ID NO:28), FIG. 30 (SEQ ID NO:30), FIG. 32 (SEQ ID NO:32), FIG. 34 (SEQ ID NO:34), FIG. 36 (SEQ ID NO:36), FIG. 38 (SEQ ID NO:38), FIG. 40 (SEQ ID NO:40), FIG. 42 (SEQ ID NO:42), FIG. 44 (SEQ ID NO:44), FIG. 46 (SEQ ID NO:46), FIG. 48 (SEQ ID NO:48), FIG. 50 (SEQ ID NO:50), FIG. 52 (SEQ ID NO:52), FIG. 54 (SEQ ID NO:54), FIG. 56 (SEQ ID NO:56), FIG. 58 (SEQ ID NO:58), FIG. 60 (SEQ ID NO:60), FIG. 62 (SEQ ID NO:62), FIG. 64 (SEQ ID NO:64), FIG. 66 (SEQ ID NO:66), FIG. 68 (SEQ ID NO:68), FIG. 70 (SEQ ID NO:70), FIG. 72 (SEQ ID NO:72), FIG. 74 (SEQ ID NO:74), FIG. 76 (SEQ ID NO:76), FIG. 78 (SEQ ID NO:78), FIG. 80 (SEQ ID NO:80), FIG. 82 (SEQ ID NO:82), FIG. 84 (SEQ ID NO:84), FIG. 86 (SEQ ID NO:86), FIG. 88 (SEQ ID NO:88), FIG. 90 (SEQ ID NO:90), FIG. 92 (SEQ ID NO:92), FIG. 94 (SEQ ID NO:94), FIG. 96 (SEQ ID NO:96), FIG. 98 (SEQ ID NO:98), FIG. 100 (SEQ ID NO:100), FIG. 102 (SEQ ID NO:102), FIG. 104 (SEQ ID NO:104), FIG. 106 (SEQ ID NO:106), FIG. 108 (SEQ ID NO:108), FIG. 110 (SEQ ID NO:110), FIG. 112 (SEQ ID NO:112), FIG. 114 (SEQ ID NO:114), FIG. 116 (SEQ ID NO:116), FIG. 118 (SEQ ID NO:118), FIG. 121 (SEQ ID NO:121), FIG. 123 (SEQ ID NO:123), FIG. 125 (SEQ ID NO:125), FIG. 127 (SEQ ID NO:127), FIG. 129 (SEQ ID NO:129), FIG. 131 (SEQ ID NO:131), FIG. 133 (SEQ ID NO:133), FIG. 135 (SEQ ID NO:135), FIG. 137 (SEQ ID NO:137), FIG. 139 (SEQ ID NO:139), FIG. 141 (SEQ ID NO:141), FIG. 143 (SEQ ID NO:143), FIG. 145 (SEQ ID NO:145), FIG. 147 (SEQ ID NO:147), FIG. 149 (SEQ ID NO:149), FIG. 151 (SEQ ID NO:151), FIG. 153 (SEQ ID NO:153), FIG. 155 (SEQ ID NO:155), FIG. 157 (SEQ ID NO:157), FIG. 159 (SEQ ID NO:159), FIG. 161 (SEQ ID NO:161), FIG. 163 (SEQ ID NO:163), FIG. 165 (SEQ ID NO:165), FIG. 167 (SEQ ID NO:167), FIG. 169 (SEQ ID NO:169), FIG. 171 (SEQ ID NO:171), FIG. 173 (SEQ ID NO:173), FIG. 175 (SEQ ID NO:175), FIG. 177 (SEQ ID NO:177), FIG. 179 (SEQ ID NO:179), FIG. 181 (SEQ ID NO:181), FIG. 183 (SEQ ID NO:183), FIG. 185 (SEQ ID NO:185), FIG. 187 (SEQ ID NO:187), FIG. 189 (SEQ ID NO:189), FIG. 191 (SEQ ID NO:191), FIG. 193 (SEQ ID NO:193), FIG. 195 (SEQ ID NO:195), FIG. 197 (SEQ ID NO:197), FIG. 199 (SEQ ID NO:199), FIG. 201 (SEQ ID NO:201), FIG. 203 (SEQ ID NO:203), FIG. 205 (SEQ ID NO:205), FIG. 207 (SEQ ID NO:207), FIG. 209 (SEQ ID NO:209), FIG. 211 (SEQ ID NO:211), FIG. 213 (SEQ ID NO:213), FIG. 215 (SEQ ID NO:215), FIG. 217 (SEQ ID NO:217), FIG. 219 (SEQ ID NO:219), FIG. 221 (SEQ ID NO:221), FIG. 223 (SEQ ID NO:223), FIG. 225 (SEQ ID NO:225), FIG. 227 (SEQ ID NO:227), FIG. 229 (SEQ ID NO:229), FIG. 231 (SEQ ID NO:231), FIG. 233 (SEQ ID NO:233), FIG. 235 (SEQ ID NO:235), FIG. 237 (SEQ ID NO:237), FIG. 239 (SEQ ID NO:239), FIG. 241 (SEQ ID NO:241), FIG. 243 (SEQ ID NO:243), FIG. 245 (SEQ ID NO:245), FIG. 247 (SEQ ID NO:247), FIG. 249 (SEQ ID NO:249), FIG. 251 (SEQ ID NO:251), FIG. 254 (SEQ ID NO:254), FIG. 256 (SEQ ID NO:256), FIG. 258 (SEQ ID NO:258), FIG. 260 (SEQ ID NO:260), FIG. 262 (SEQ ID NO:262), FIG. 264 (SEQ ID NO:264), FIG. 266 (SEQ ID NO:266), FIG. 268 (SEQ ID NO:268), FIG. 270 (SEQ ID NO:270), FIG. 272 (SEQ ID NO:272), FIG. 274 (SEQ ID NO:274), FIG. 276 (SEQ ID NO:276), FIG. 278 (SEQ ID NO:278), FIG. 280 (SEQ ID NO:280), FIG. 282 (SEQ ID NO:282), FIG. 284 (SEQ ID NO:284), FIG. 286 (SEQ ID NO:286), FIG. 288 (SEQ ID NO:288), FIG. 290 (SEQ ID NO:290), FIG. 292 (SEQ ID NO:292), FIG. 294 (SEQ ID NO:294), FIG. 296 (SEQ ID NO:296), FIG. 298 (SEQ ID NO:298), FIG. 300 (SEQ ID NO:300), FIG. 302 (SEQ ID NO:302), FIG. 304 (SEQ ID NO:304), FIG. 306 (SEQ ID NO:306), FIG. 308 (SEQ ID NO:308), FIG. 310 (SEQ ID NO:310), FIG. 312 (SEQ ID NO:312), FIG. 314 (SEQ ID NO:314), FIG. 316 (SEQ ID NO:316), FIG. 318 (SEQ ID NO:318), FIG. 320 (SEQ ID NO:320), FIG. 322 (SEQ ID NO:322), FIG. 324 (SEQ ID NO:324), FIG. 326 (SEQ ID NO:326), FIG. 328 (SEQ ID NO:328), FIG. 330 (SEQ ID NO:330), FIG. 332 (SEQ ID NO:332), FIG. 334 (SEQ ID NO:334), FIG. 336 (SEQ ID NO:336), FIG. 338 (SEQ ID NO:338), FIG. 340 (SEQ ID NO:340), FIG. 342 (SEQ ID NO:342), FIG. 344 (SEQ ID NO:344), FIG. 346 (SEQ ID NO:346), FIG. 348 (SEQ ID NO:348), FIG. 350 (SEQ ID NO:350), FIG. 352 (SEQ ID NO:352), FIG. 354 (SEQ ID NO:354), FIG. 356 (SEQ ID NO:356), FIG. 358 (SEQ ID NO:358), FIG. 360 (SEQ ID NO:360), FIG. 362 (SEQ ID NO:362), FIG. 364 (SEQ ID NO:364), FIG. 366 (SEQ ID NO:366), FIG. 368 (SEQ ID NO:368), FIG. 370 (SEQ ID NO:370), FIG. 372 (SEQ ID NO:372), FIG. 374 (SEQ ID NO:374), FIG. 376 (SEQ ID NO:376), FIG. 378 (SEQ ID NO:378), FIG. 380 (SEQ ID NO:380), FIG. 382 (SEQ ID NO:382), FIG. 384 (SEQ ID NO:384), FIG. 386 (SEQ ID NO:386), FIG. 388 (SEQ ID NO:388), FIG. 390 (SEQ ID NO:390), FIG. 392 (SEQ ID NO:392), FIG. 394 (SEQ ID NO:394), FIG. 396 (SEQ ID NO:396), FIG. 398 (SEQ ID NO:398), FIG. 400 (SEQ ID NO:400), FIG. 402 (SEQ ID NO:402), FIG. 404 (SEQ ID NO:404), FIG. 406 (SEQ ID NO:406), FIG. 408 (SEQ ID NO:408), FIG. 410 (SEQ ID NO:410), FIG. 412 (SEQ ID NO:412), FIG. 414 (SEQ ID NO:414), FIG. 416 (SEQ ID NO:416), FIG. 418 (SEQ ID NO:418), FIG. 420 (SEQ ID NO:420), FIG. 422 (SEQ ID NO:422), FIG. 424 (SEQ ID NO:424), FIG. 426 (SEQ ID NO:426), FIG. 428 (SEQ ID NO:428), FIG. 430 (SEQ ID NO:430), FIG. 432 (SEQ ID NO:432), FIG. 434 (SEQ ID NO:434), FIG. 436 (SEQ ID NO:436), FIG. 438 (SEQ ID NO:438), FIG. 440 (SEQ ID NO:440), FIG. 442 (SEQ ID NO:442), FIG. 444 (SEQ ID NO:444), FIG. 446 (SEQ ID NO:446), FIG. 448 (SEQ ID NO:448), FIG. 450 (SEQ ID NO:450), FIG. 452 (SEQ ID NO:452), FIG. 454 (SEQ ID NO:454), FIG. 456 (SEQ ID NO:456), FIG. 458 (SEQ ID NO:458), FIG. 460 (SEQ ID NO:460), FIG. 462 (SEQ ID NO:462), FIG. 464 (SEQ ID NO:464), FIG. 466 (SEQ ID NO:466), FIG. 468 (SEQ ID NO:468), FIG. 470 (SEQ ID NO:470), FIG. 472 (SEQ ID NO:472), FIG. 474 (SEQ ID NO:474), FIG. 476 (SEQ ID NO:476), FIG. 478 (SEQ ID NO:478), FIG. 480 (SEQ ID NO:480), FIG. 482 (SEQ ID NO:482), FIG. 484 (SEQ ID NO:484), FIG. 486 (SEQ ID NO:486), FIG. 488 (SEQ ID NO:488), FIG. 490 (SEQ ID NO:490), FIG. 492 (SEQ ID NO:492), FIG. 494 (SEQ ID NO:494), FIG. 496 (SEQ ID NO:496), FIG. 498 (SEQ ID NO:498), FIG. 500 (SEQ ID NO:500), FIG. 502 (SEQ ID NO:502), FIG. 504 (SEQ ID NO:504), FIG. 506 (SEQ ID NO:506), FIG. 508 (SEQ ID NO:508), FIG. 510 (SEQ ID NO:510), FIG. 512 (SEQ ID NO:512), FIG. 514 (SEQ ID NO:514), FIG. 516 (SEQ ID NO:516), FIG. 518 (SEQ ID NO:518), FIG. 520 (SEQ ID NO:520), FIG. 522 (SEQ ID NO:522), FIG. 524 (SEQ ID NO:524), FIG. 526 (SEQ ID NO:526), FIG. 528 (SEQ ID NO:528), FIG. 530 (SEQ ID NO:530), FIG. 532 (SEQ ID NO:532), FIG. 534 (SEQ ID NO:534), FIG. 536 (SEQ ID NO:536), FIG. 538 (SEQ ID NO:538), FIG. 540 (SEQ ID NO:540), FIG. 542 (SEQ ID NO:542), FIG. 544 (SEQ ID NO:544), FIG. 546 (SEQ ID NO:546), FIG. 549 (SEQ ID NO:549), FIG. 551 (SEQ ID NO:551), FIG. 553 (SEQ ID NO:553), FIG. 555 (SEQ ID NO:555), FIG. 557 (SEQ ID NO:557), FIG. 559 (SEQ ID NO:559), FIG. 561 (SEQ ID NO:561), FIG. 563 (SEQ ID NO:563), FIG. 565 (SEQ ID NO:565), FIG. 567 (SEQ ID NO:567), FIG. 569 (SEQ ID NO:569), FIG. 571 (SEQ ID NO:571), FIG. 573 (SEQ ID NO:573), FIG. 575 (SEQ ID NO:575), FIG. 577 (SEQ ID NO:577), FIG. 579 (SEQ ID NO:579), FIG. 581 (SEQ ID NO:581), FIG. 583 (SEQ ID NO:583), FIG. 585 (SEQ ID NO:585), FIG. 587 (SEQ ID NO:587), FIG. 589 (SEQ ID NO:589), FIG. 591 (SEQ ID NO:591), FIG. 593 (SEQ ID NO:593), FIG. 595 (SEQ ID NO:595), FIG. 597 (SEQ ID NO:597), FIG. 599 (SEQ ID NO:599), FIG. 601 (SEQ ID NO:601), FIG. 603 (SEQ ID NO:603), FIG. 605 (SEQ ID NO:605), FIG. 607 (SEQ ID NO:607), FIG. 609 (SEQ ID NO:609), FIG. 611 (SEQ ID NO:611), FIG. 613 (SEQ ID NO:613), FIG. 615 (SEQ ID NO:615), FIG. 617 (SEQ ID NO:617), FIG. 619 (SEQ ID NO:619), FIG. 621 (SEQ ID NO:621), FIG. 623 (SEQ ID NO:623), FIG. 625 (SEQ ID NO:625), FIG. 627 (SEQ ID NO:627), FIG. 629 (SEQ ID NO:629), FIG. 631 (SEQ ID NO:631), FIG. 633 (SEQ ID NO:633), FIG. 635 (SEQ ID NO:635), FIG. 637 (SEQ ID NO:637), FIG. 639 (SEQ ID NO:639), FIG. 641 (SEQ ID NO:641), FIG. 643 (SEQ ID NO:643), FIG. 645 (SEQ ID NO:645), FIG. 647 (SEQ ID NO:647), FIG. 649 (SEQ ID NO:649), FIG. 651 (SEQ ID NO:651), FIG. 653 (SEQ ID NO:653), FIG. 655 (SEQ ID NO:655), FIG. 657 (SEQ ID NO:657), FIG. 659 (SEQ ID NO:659), FIG. 661 (SEQ ID NO:661), FIG. 663 (SEQ ID NO:663), FIG. 665 (SEQ ID NO:665), FIG. 667 (SEQ ID NO:667), FIG. 669 (SEQ ID NO:669), FIG. 671 (SEQ ID NO:671), FIG. 673 (SEQ ID NO:673), FIG. 675 (SEQ ID NO:675), FIG. 677 (SEQ ID NO:377), FIG. 679 (SEQ ID NO:679), FIG. 681 (SEQ ID NO:681), FIG. 683 (SEQ ID NO:683), FIG. 685 (SEQ ID NO:685), FIG. 687 (SEQ ID NO:687), FIG. 689 (SEQ ID NO:689), FIG. 691 (SEQ ID NO:691), FIG. 693 (SEQ ID NO:693), FIG. 695 (SEQ ID NO:695), FIG. 697 (SEQ ID NO:697), FIG. 699 (SEQ ID NO:699), FIG. 701 (SEQ ID NO:701), FIG. 703 (SEQ ID NO:703), FIG. 705 (SEQ ID NO:705), FIG. 707 (SEQ ID NO:707), FIG. 709 (SEQ ID NO:709), FIG. 711 (SEQ ID NO:711), FIG. 713 (SEQ ID NO:713), FIG. 715 (SEQ ID NO:715), FIG. 717 (SEQ ID NO:717), FIG. 719 (SEQ ID NO:719), FIG. 721 (SEQ ID NO:721), FIG. 723 (SEQ ID NO:723), FIG. 725 (SEQ ID NO:725), FIG. 727 (SEQ ID NO:727), FIG. 729 (SEQ ID NO:729), FIG. 731 (SEQ ID NO:731), FIG. 733 (SEQ ID NO:733), FIG. 735 (SEQ ID NO:735), FIG. 737 (SEQ ID NO:737), FIG. 739 (SEQ ID NO:739), FIG. 741 (SEQ ID NO:741), FIG. 743 (SEQ ID NO:743), FIG. 745 (SEQ ID NO:745), FIG. 747 (SEQ ID NO:747), FIG. 749 (SEQ ID NO:749), FIG. 751 (SEQ ID NO:751), FIG. 753 (SEQ ID NO:753), FIG. 755 (SEQ ID NO:755), FIG. 757 (SEQ ID NO:757), FIG. 759 (SEQ ID NO:759), FIG. 761 (SEQ ID NO:761), FIG. 763 (SEQ ID NO:763), FIG. 765 (SEQ ID NO:765), FIG. 767 (SEQ ID NO:767), FIG. 769 (SEQ ID NO:769), FIG. 771 (SEQ ID NO:771), FIG. 773 (SEQ ID NO:773), FIG. 775 (SEQ ID NO:775), FIG. 777 (SEQ ID NO:777), FIG. 779 (SEQ ID NO:779), FIG. 781 (SEQ ID NO:781), FIG. 783 (SEQ ID NO:783), FIG. 785 (SEQ ID NO:785), FIG. 787 (SEQ ID NO:787), FIG. 789 (SEQ ID NO:789), FIG. 791 (SEQ ID NO:791), FIG. 793 (SEQ ID NO:793), FIG. 795 (SEQ ID NO:795), FIG. 797 (SEQ ID NO:797), FIG. 799 (SEQ ID NO:799), FIG. 801 (SEQ ID NO:801), FIG. 803 (SEQ ID NO:803), FIG. 805 (SEQ ID NO:805), FIG. 807 (SEQ ID NO:807), FIG. 809 (SEQ ID NO:809), FIG. 811 (SEQ ID NO:811), FIG. 813 (SEQ ID NO:813), FIG. 815 (SEQ ID NO:815), FIG. 817 (SEQ ID NO:817), FIG. 819 (SEQ ID NO:819), FIG. 821 (SEQ ID NO:821), FIG. 823 (SEQ ID NO:823), FIG. 825 (SEQ ID NO:825), FIG. 827 (SEQ ID NO:827), FIG. 829 (SEQ ID NO:829), FIG. 831 (SEQ ID NO:831), FIG. 833 (SEQ ID NO:833), FIG. 835 (SEQ ID NO:835), FIG. 837 (SEQ ID NO:837), FIG. 839 (SEQ ID NO:839), FIG. 841 (SEQ ID NO:841), FIG. 843 (SEQ ID NO:843), FIG. 845 (SEQ ID NO:845), FIG. 847 (SEQ ID NO:847), FIG. 849 (SEQ ID NO:849), FIG. 851 (SEQ ID NO:851), FIG. 853 (SEQ ID NO:853), FIG. 855 (SEQ ID NO:855), FIG. 858 (SEQ ID NO:858), FIG. 860 (SEQ ID NO:860), FIG. 862 (SEQ ID NO:862), FIG. 864 (SEQ ID NO:864), FIG. 866 (SEQ ID NO:866), FIG. 868 (SEQ ID NO:868), FIG. 870 (SEQ ID NO:870), FIG. 872 (SEQ ID NO:872), FIG. 874 (SEQ ID NO:874), FIG. 876 (SEQ ID NO:876), FIG. 878 (SEQ ID NO:878), FIG. 880 (SEQ ID NO:880), FIG. 882 (SEQ ID NO:882), FIG. 884 (SEQ ID NO:884), FIG. 886 (SEQ ID NO:886), FIG. 888 (SEQ ID NO:888), FIG. 890 (SEQ ID NO:890), FIG. 892 (SEQ ID NO:892), FIG. 894 (SEQ ID NO:894), FIG. 896 (SEQ ID NO:896), FIG. 898 (SEQ ID NO:898), FIG. 900 (SEQ ID NO:900), FIG. 902 (SEQ ID NO:902), FIG. 904 (SEQ ID NO:904), FIG. 906 (SEQ ID NO:906), FIG. 908 (SEQ ID NO:908), FIG. 910 (SEQ ID NO:910), FIG. 912 (SEQ ID NO:912), FIG. 914 (SEQ ID NO:914), FIG. 916 (SEQ ID NO:916), FIG. 918 (SEQ ID NO:918), FIG. 920 (SEQ ID NO:920), FIG. 922 (SEQ ID NO:922), FIG. 924 (SEQ ID NO:924), FIG. 926 (SEQ ID NO:926), FIG. 928 (SEQ ID NO:928), FIG. 930 (SEQ ID NO:930), FIG. 932 (SEQ ID NO:932), FIG. 934 (SEQ ID NO:934), FIG. 936 (SEQ ID NO:936), FIG. 938 (SEQ ID NO:938), FIG. 940 (SEQ ID NO:940), FIG. 943 (SEQ ID NO:943), FIG. 945 (SEQ ID NO:945), FIG. 947 (SEQ ID NO:947). FIG. 949 (SEQ ID NO:949), FIG. 951 (SEQ ID NO:951), FIG. 953 (SEQ ID NO:953), FIG. 955 (SEQ ID NO:955), FIG. 958 (SEQ ID NO:958), FIG. 960 (SEQ ID NO:960), FIG. 963 (SEQ ID NO:963), FIG. 965 (SEQ ID NO:965), FIG. 968 (SEQ ID NO:968), FIG. 970 (SEQ ID NO:970), FIG. 972 (SEQ ID NO:972), FIG. 974 (SEQ ID NO:974), FIG. 976 (SEQ ID NO:976), FIG. 978 (SEQ ID NO:978), FIG. 980 (SEQ ID NO:980), FIG. 983 (SEQ ID NO:983), FIG. 985 (SEQ ID NO:985), FIG. 987 (SEQ ID NO:987), FIG. 990 (SEQ ID NO:990), FIG. 992 (SEQ ID NO:992), FIG. 994 (SEQ ID NO:994), FIG. 996 (SEQ ID NO:996), FIG. 998 (SEQ ID NO:998), FIG. 1000 (SEQ ID NO:1000), FIG. 1002 (SEQ ID NO:1002), FIG. 1007 (SEQ ID NO:1007), FIG. 1009 (SEQ ID NO:1009), FIG. 1011 (SEQ ID NO:1011), FIG. 1013 (SEQ ID NO:1013), FIG. 1015 (SEQ ID NO:1015), FIG. 1017 (SEQ ID NO:1017), FIG. 1019 (SEQ ID NO:1019), FIG. 1021 (SEQ ID NO:1021), FIG. 1023 (SEQ ID NO:1023), FIG. 1025 (SEQ ID NO:1025), FIG. 1030 (SEQ ID NO:1030), FIG. 1033 (SEQ ID NO:1033), FIG. 1035 (SEQ ID NO:1035), FIG. 1037 (SEQ ID NO:1037), FIG. 1039 (SEQ ID NO:1039), FIG. 1041 (SEQ ID NO:1041), FIG. 1043 (SEQ ID NO:1043), FIG. 1046 (SEQ ID NO:1046), FIG. 1048 (SEQ ID NO:1048), FIG. 1050 (SEQ ID NO:1050), FIG. 1053 (SEQ ID NO:1053), FIG. 1055 (SEQ ID NO:1055), FIG. 1057 (SEQ ID NO:1057), FIG. 1060 (SEQ ID NO:1060), FIG. 1062 (SEQ ID NO:1062), FIG. 1064 (SEQ ID NO:1064), FIG. 1066 (SEQ ID NO:1066), FIG. 1068 (SEQ ID NO:1068), FIG. 1070 (SEQ ID NO:1070), FIG. 1072 (SEQ ID NO:1072), FIG. 1074 (SEQ ID NO:1074), FIG. 1076 (SEQ ID NO:1076), FIG. 1078 (SEQ ID NO:1078), FIG. 1080 (SEQ ID NO:1080), FIG. 1082 (SEQ ID NO:1082), FIG. 1084 (SEQ ID NO:1084), FIG. 1086 (SEQ ID NO:1086), FIG. 1088 (SEQ ID NO:1088), FIG. 1090 (SEQ ID NO:1090), FIG. 1092 (SEQ ID NO:1092), FIG. 1094 (SEQ ID NO:1094), FIG. 1096 (SEQ ID NO:1096), FIG. 1098 (SEQ ID NO:1098), FIG. 1101 (SEQ ID NO:1101), FIG. 1103 (SEQ ID NO:1103), FIG. 1105 (SEQ ID NO:1105), FIG. 1107 (SEQ ID NO:1107), FIG. 1109 (SEQ ID NO:1109), FIG. 1111 (SEQ ID NO:1111), FIG. 1113 (SEQ ID NO:1113), FIG. 1116 (SEQ ID NO:1116), FIG. 1118 (SEQ ID NO:1118), FIG. 1120 (SEQ ID NO:1120), FIG. 1123 (SEQ ID NO:1123), FIG. 1125 (SEQ ID NO:1125), FIG. 1128 (SEQ ID NO:1128), FIG. 1130 (SEQ ID NO:1130), FIG. 1132 (SEQ ID NO:1132), FIG. 1134 (SEQ ID NO:1134), FIG. 1136 (SEQ ID NO:1136), FIG. 1138 (SEQ ID NO:1138), FIG. 1142 (SEQ ID NO:1142), FIG. 1144 (SEQ ID NO:1144), FIG. 1146 (SEQ ID NO:1146), FIG. 1148 (SEQ ID NO:1148), FIG. 1150 (SEQ ID NO:1150), FIG. 1152 (SEQ ID NO:1152), FIG. 1154 (SEQ ID NO:1154), FIG. 1156 (SEQ ID NO:1156), FIG. 1158 (SEQ ID NO:1158), FIG. 1160 (SEQ ID NO:1160), FIG. 1162 (SEQ ID NO:1162), FIG. 1164 (SEQ ID NO:1164), FIG. 1166 (SEQ ID NO:1166), FIG. 1168 (SEQ ID NO:1168), FIG. 1170 (SEQ ID NO:1170), FIG. 1172 (SEQ ID NO:1172), FIG. 1174 (SEQ ID NO:1174), FIG. 1176 (SEQ ID NO:1176), FIG. 1178 (SEQ ID NO:1178), FIG. 1180 (SEQ ID NO:1180), FIG. 1182 (SEQ ID NO:1182), FIG. 1184 (SEQ ID NO:1184), FIG. 1186 (SEQ ID NO:1186), FIG. 1188 (SEQ ID NO:1188), FIG. 1190 (SEQ ID NO:1190), FIG. 1192 (SEQ ID NO:1192), FIG. 1194 (SEQ ID NO:1194), FIG. 1196 (SEQ ID NO:1196), FIG. 1198 (SEQ ID NO:1198), FIG. 1200 (SEQ ID NO:1200), FIG. 1202 (SEQ ID NO:1202), FIG. 1204 (SEQ ID NO:1204), FIG. 1206 (SEQ ID NO:1206), FIG. 1208 (SEQ ID NO:1208), FIG. 1210 (SEQ ID NO:1210), FIG. 1212 (SEQ ID NO:1212), FIG. 1214 (SEQ ID NO:1214), FIG. 1216 (SEQ ID NO:1216), FIG. 1218 (SEQ ID NO:1218), FIG. 1220 (SEQ ID NO:1220), FIG. 1222 (SEQ ID NO:1222), FIG. 1224 (SEQ ID NO:1224), FIG. 1226 (SEQ ID NO:1226), FIG. 1228 (SEQ ID NO:1228), FIG. 1230 (SEQ ID NO:1230), FIG. 1232 (SEQ ID NO:1232), FIG. 1234 (SEQ ID NO:1234), FIG. 1236 (SEQ ID NO:1236), FIG. 1238 (SEQ ID NO:1238), FIG. 1240 (SEQ ID NO:1240), FIG. 1242 (SEQ ID NO:1242), FIG. 1244 (SEQ ID NO:1244), FIG. 1246 (SEQ ID NO:1246), FIG. 1248 (SEQ ID NO:1248), FIG. 1250 (SEQ ID NO:1250), FIG. 1252 (SEQ ID NO:1252), FIG. 1254 (SEQ ID NO:1254), FIG. 1256 (SEQ ID NO:1256), FIG. 1258 (SEQ ID NO:1258), FIG. 1260 (SEQ ID NO:1260), FIG. 1262 (SEQ ID NO:1262), FIG. 1264 (SEQ ID NO:1264), FIG. 1266 (SEQ ID NO:1266), FIG. 1268 (SEQ ID NO:1268), FIG. 1270 (SEQ ID NO:1270), FIG. 1272 (SEQ ID NO:1272), FIG. 1274 (SEQ ID NO:1274), FIG. 1276 (SEQ ID NO:1276), FIG. 1278 (SEQ ID NO:1278), FIG. 1280 (SEQ ID NO:1280), FIG. 1282 (SEQ ID NO:1282), FIG. 1284 (SEQ ID NO:1284), FIG. 1286 (SEQ ID NO:1286), FIG. 1288 (SEQ ID NO:1288), FIG. 1290 (SEQ ID NO:1290), FIG. 1292 (SEQ ID NO:1292), FIG. 1294 (SEQ ID NO:1294), FIG. 1296 (SEQ ID NO:1296), FIG. 1298 (SEQ ID NO:1298), FIG. 1300 (SEQ ID NO:1300), FIG. 1302 (SEQ ID NO:1302), FIG. 1304 (SEQ ID NO:1304), FIG. 1306 (SEQ ID NO:1306), FIG. 1308 (SEQ ID NO:1308), FIG. 1310 (SEQ ID NO:1310), FIG. 1312 (SEQ ID NO:1312), FIG. 1314 (SEQ ID NO:1314), FIG. 1316 (SEQ ID NO:1316), FIG. 1318 (SEQ ID NO:1318), FIG. 1320 (SEQ ID NO:1320), FIG. 1322 (SEQ ID NO:1322), FIG. 1324 (SEQ ID NO:1324), FIG. 1326 (SEQ ID NO:1326), FIG. 1328 (SEQ ID NO:1328), FIG. 1330 (SEQ ID NO:1330), FIG. 1332 (SEQ ID NO:1332), FIG. 1334 (SEQ ID NO:1334), FIG. 1336 (SEQ ID NO:1336), FIG. 1338 (SEQ ID NO:1338), FIG. 1340 (SEQ ID NO:1340), FIG. 1342 (SEQ ID NO:1342), FIG. 1344 (SEQ ID NO:1344), FIG. 1346 (SEQ ID NO:1346), FIG. 1348 (SEQ ID NO:1348), FIG. 1350 (SEQ ID NO:1350), FIG. 1352 (SEQ ID NO:1352), FIG. 1354 (SEQ ID NO:1354), FIG. 1356 (SEQ ID NO:1356), FIG. 1358 (SEQ ID NO:1358), FIG. 1361 (SEQ ID NO:1361), FIG. 1363 (SEQ ID NO:1363), FIG. 1365 (SEQ ID NO:1365), FIG. 1367 (SEQ ID NO:1367), FIG. 1369 (SEQ ID NO:1369), FIG. 1371 (SEQ ID NO:1371), FIG. 1373 (SEQ ID NO:1373), FIG. 1375 (SEQ ID NO:1375), FIG. 1377 (SEQ ID NO:1377), FIG. 1379 (SEQ ID NO:1379), FIG. 1381 (SEQ ID NO:1381), FIG. 1383 (SEQ ID NO:1383), FIG. 1385 (SEQ ID NO:1385), FIG. 1387 (SEQ ID NO:1387), FIG. 1389 (SEQ ID NO:1389), FIG. 1391 (SEQ ID NO:1391), FIG. 1393 (SEQ ID NO:1393), FIG. 1395 (SEQ ID NO:1395), FIG. 1397 (SEQ ID NO:1397), FIG. 1399 (SEQ ID NO:1399), FIG. 1401 (SEQ ID NO:1401), FIG. 1403 (SEQ ID NO:1403), FIG. 1405 (SEQ ID NO:1405), FIG. 1407 (SEQ ID NO:1407), FIG. 1409 (SEQ ID NO:1409), FIG. 1411 (SEQ ID NO:1411), FIG. 1413 (SEQ ID NO:1413), FIG. 1415 (SEQ ID NO:1415), FIG. 1417 (SEQ ID NO:1417), FIG. 1419 (SEQ ID NO:1419), FIG. 1421 (SEQ ID NO:1421), FIG. 1423 (SEQ ID NO:1423), FIG. 1425 (SEQ ID NO:1425), FIG. 1427 (SEQ ID NO:1427), FIG. 1429 (SEQ ID NO:1429), FIG. 1431 (SEQ ID NO:1431), FIG. 1433 (SEQ ID NO:1433), FIG. 1435 (SEQ ID NO:1435), FIG. 1437 (SEQ ID NO:1437), FIG. 1439 (SEQ ID NO:1439), FIG. 1441 (SEQ ID NO:1441), FIG. 1443 (SEQ ID NO:1443), FIG. 1445 (SEQ ID NO:1445), FIG. 1447 (SEQ ID NO:1447), FIG. 1449 (SEQ ID NO:1449), FIG. 1451 (SEQ ID NO:1451), FIG. 1453 (SEQ ID NO:1453), FIG. 1455 (SEQ ID NO:1455), FIG. 1457 (SEQ ID NO:1457), FIG. 1459 (SEQ ID NO:1459), FIG. 1461 (SEQ ID NO:1461), FIG. 1463 (SEQ ID NO:1463), FIG. 1465 (SEQ ID NO:1465), FIG. 1467 (SEQ ID NO:1467), FIG. 1469 (SEQ ID NO:1469), FIG. 1471 (SEQ ID NO:1471), FIG. 1473 (SEQ ID NO:1473), FIG. 1475 (SEQ ID NO:1475), FIG. 1477 (SEQ ID NO:1477), FIG. 1479 (SEQ ID NO:1479), FIG. 1481 (SEQ ID NO:1481), FIG. 1483 (SEQ ID NO:1483), FIG. 1485 (SEQ ID NO:1485), FIG. 1487 (SEQ ID NO:1487), FIG. 1489 (SEQ ID NO:1489), FIG. 1491 (SEQ ID NO:1491), FIG. 1493 (SEQ ID NO:1493), FIG. 1495 (SEQ ID NO:1495), FIG. 1497 (SEQ ID NO:1497), FIG. 1499 (SEQ ID NO:1499), FIG. 1501 (SEQ ID NO:1501), FIG. 1503 (SEQ ID NO:1503), FIG. 1505 (SEQ ID NO:1505), FIG. 1507 (SEQ ID NO:1507), FIG. 1509 (SEQ ID NO:1509), FIG. 1511 (SEQ ID NO:1511), FIG. 1513 (SEQ ID NO:1513), FIG. 1515 (SEQ ID NO:1515), FIG. 1517 (SEQ ID NO:1517), FIG. 1519 (SEQ ID NO:1519), FIG. 1521 (SEQ ID NO:1521), FIG. 1523 (SEQ ID NO:1523), FIG. 1525 (SEQ ID NO:1525), FIG. 1527 (SEQ ID NO:1527), FIG. 1529 (SEQ ID NO:1529), FIG. 1531 (SEQ ID NO:1531), FIG. 1533 (SEQ ID NO:1533), FIG. 1535 (SEQ ID NO:1535), FIG. 1537 (SEQ ID NO:1537), FIG. 1539 (SEQ ID NO:1539), FIG. 1541 (SEQ ID NO:1541), FIG. 1543 (SEQ ID NO:1543), FIG. 1545 (SEQ ID NO:1545), FIG. 1547 (SEQ ID NO:1547), FIG. 1549 (SEQ ID NO:1549), FIG. 1551 (SEQ ID NO:1551), FIG. 1553 (SEQ ID NO:1553), FIG. 1555 (SEQ ID NO:1555), FIG. 1557 (SEQ ID NO:1557), FIG. 1559 (SEQ ID NO:1559), FIG. 1561 (SEQ ID NO:1561), FIG. 1563 (SEQ ID NO:1563), FIG. 1565 (SEQ ID NO:1565), FIG. 1567 (SEQ ID NO:1567), FIG. 1569 (SEQ ID NO:1569), FIG. 1571 (SEQ ID NO:1571), FIG. 1573 (SEQ ID NO:1573), FIG. 1575 (SEQ ID NO:1575), FIG. 1578 (SEQ ID NO:1578), FIG. 1581 (SEQ ID NO:1581), FIG. 1583 (SEQ ID NO:1583), FIG. 1585 (SEQ ID NO:1585), FIG. 1587 (SEQ ID NO:1587), FIG. 1589 (SEQ ID NO:1589), FIG. 1592 (SEQ ID NO:1592), FIG. 1594 (SEQ ID NO:1594), FIG. 1596 (SEQ ID NO:1596), FIG. 1598 (SEQ ID NO:1598), FIG. 1600 (SEQ ID NO:1600), FIG. 1602 (SEQ ID NO:1602), FIG. 1604 (SEQ ID NO:1604), FIG. 1606 (SEQ ID NO:1606), FIG. 1609 (SEQ ID NO:1609), FIG. 1611 (SEQ ID NO:1611), FIG. 1614 (SEQ ID NO:1614), FIG. 1617 (SEQ ID NO:1617), FIG. 1619 (SEQ ID NO:1619), FIG. 1621 (SEQ ID NO:1621), FIG. 1623 (SEQ ID NO:1623), FIG. 1626 (SEQ ID NO:1626), FIG. 1628 (SEQ ID NO:1628), FIG. 1630 (SEQ ID NO:1630), FIG. 1632 (SEQ ID NO:1632), FIG. 1636 (SEQ ID NO:1636), FIG. 1639 (SEQ ID NO:1639), FIG. 1644 (SEQ ID NO:1644), FIG. 1646 (SEQ ID NO:1646), FIG. 1648 (SEQ ID NO:1648), FIG. 1650 (SEQ ID NO:1650), FIG. 1652 (SEQ ID NO:1652), FIG. 1654 (SEQ ID NO:1654), FIG. 1656 (SEQ ID NO:1656), FIG. 1658 (SEQ ID NO:1658), FIG. 1660 (SEQ ID NO:1660), FIG. 1662 (SEQ ID NO:1662), FIG. 1664 (SEQ ID NO:1664), FIG. 1666 (SEQ ID NO:1666), FIG. 1668 (SEQ ID NO:1668), FIG. 1670 (SEQ ID NO:1670), FIG. 1672 (SEQ ID NO:1672), FIG. 1674 (SEQ ID NO:1674), FIG. 1676 (SEQ ID NO:1676), FIG. 1678 (SEQ ID NO:1678), FIG. 1680 (SEQ ID NO:1680), FIG. 1683 (SEQ ID NO:1683), FIG. 1685 (SEQ ID NO:1685), FIG. 1687 (SEQ ID NO:1687), FIG. 1689 (SEQ ID NO:1689), FIG. 1692 (SEQ ID NO:1692), FIG. 1694 (SEQ ID NO:1694), FIG. 1696 (SEQ ID NO:1696), FIG. 1698 (SEQ ID NO:1698), FIG. 1701 (SEQ ID NO:1701), FIG. 1703 (SEQ ID NO:1703), FIG. 1705 (SEQ ID NO:1705), FIG. 1707 (SEQ ID NO:1707), FIG. 1709 (SEQ ID NO:1709), FIG. 1711 (SEQ ID NO:1711), FIG. 1713 (SEQ ID NO:1713), FIG. 1715 (SEQ ID NO:1715), FIG. 1717 (SEQ ID NO:1717), FIG. 1719 (SEQ ID NO:1719), FIG. 1721 (SEQ ID NO:1721), FIG. 1723 (SEQ ID NO:1723), FIG. 1725 (SEQ ID NO:1725), FIG. 1727 (SEQ ID NO:1727), FIG. 1729 (SEQ ID NO:1729), FIG. 1732 (SEQ ID NO:1732), FIG. 1734 (SEQ ID NO:1734), FIG. 1736 (SEQ ID NO:1736), FIG. 1738 (SEQ ID NO:1738), FIG. 1741 (SEQ ID NO:1741), FIG. 1743 (SEQ ID NO:1743), FIG. 1745 (SEQ ID NO:1745), FIG. 1747 (SEQ ID NO:1747), FIG. 1749 (SEQ ID NO:1749), FIG. 1751 (SEQ ID NO:1751), FIG. 1753 (SEQ ID NO:1753), FIG. 1755 (SEQ ID NO:1755), FIG. 1757 (SEQ ID NO:1757), FIG. 1760 (SEQ ID NO:1760), FIG. 1762 (SEQ ID NO:1762), FIG. 1764 (SEQ ID NO:1764), FIG. 1766 (SEQ ID NO:1766), FIG. 1769 (SEQ ID NO:1769), FIG. 1771 (SEQ ID NO:1771), FIG. 1773 (SEQ ID NO:1773), FIG. 1775 (SEQ ID NO:1775), FIG. 1777 (SEQ ID NO:1777), FIG. 1779 (SEQ ID NO:1779), FIG. 1781 (SEQ ID NO:1781), FIG. 1783 (SEQ ID NO:1783), FIG. 1785 (SEQ ID NO:1785), FIG. 1787 (SEQ ID NO:1787), FIG. 1789 (SEQ ID NO:1789), FIG. 1792 (SEQ ID NO:1792), FIG. 1795 (SEQ ID NO:1795), FIG. 1797 (SEQ ID NO:1797), FIG. 1799 (SEQ ID NO:1799), FIG. 1802 (SEQ ID NO:1802), FIG. 1805 (SEQ ID NO:1805), FIG. 1807 (SEQ ID NO:1807), FIG. 1809 (SEQ ID NO:1809), FIG. 1811 (SEQ ID NO:1811), FIG. 1813 (SEQ ID NO:1813), FIG. 1815 (SEQ ID NO:1815), FIG. 1817 (SEQ ID NO:1817), FIG. 1819 (SEQ ID NO:1819), FIG. 1821 (SEQ ID NO:1821), FIG. 1823 (SEQ ID NO:1823), FIG. 1825 (SEQ ID NO:1825), FIG. 1827 (SEQ ID NO:1827), FIG. 1829 (SEQ ID NO:1829), FIG. 1831 (SEQ ID NO:1831), FIG. 1833 (SEQ ID NO:1833), FIG. 1836 (SEQ ID NO:1836), FIG. 1838 (SEQ ID NO:1838), FIG. 1841 (SEQ ID NO:1841), FIG. 1843 (SEQ ID NO:1843), FIG. 1845 (SEQ ID NO:1845), FIG. 1847 (SEQ ID NO:1847), FIG. 1849 (SEQ ID NO:1849), FIG. 1851 (SEQ ID NO:1851), FIG. 1854 (SEQ ID NO:1854), FIG. 1856 (SEQ ID NO:1856), FIG. 1858 (SEQ ID NO:1858), FIG. 1860 (SEQ ID NO:1860), FIG. 1863 (SEQ ID NO:1863), FIG. 1865 (SEQ ID NO:1865), FIG. 1867 (SEQ ID NO:1867), FIG. 1869 (SEQ ID NO:1869), FIG. 1871 (SEQ ID NO:1871), FIG. 1873 (SEQ ID NO:1873), FIG. 1875 (SEQ ID NO:1875), FIG. 1877 (SEQ ID NO:1877), FIG. 1881 (SEQ ID NO:1881), FIG. 1883 (SEQ ID NO:1883), FIG. 1885 (SEQ ID NO:1885), FIG. 1887 (SEQ ID NO:1887), FIG. 1889 (SEQ ID NO:1889), FIG. 1891 (SEQ ID NO:1891), FIG. 1893 (SEQ ID NO:1893), FIG. 1895 (SEQ ID NO:1895), FIG. 1897 (SEQ ID NO:1897), FIG. 1899 (SEQ ID NO:1899), FIG. 1901 (SEQ ID NO:1901), FIG. 1903 (SEQ ID NO:1903), FIG. 1905 (SEQ ID NO:1905), FIG. 1908 (SEQ ID NO:1908), FIG. 1910 (SEQ ID NO:1910), FIG. 1913 (SEQ ID NO:1913), FIG. 1915 (SEQ ID NO:1915), FIG. 1917 (SEQ ID NO:1917), FIG. 1919 (SEQ ID NO:1919), FIG. 1922 (SEQ ID NO:1922), FIG. 1924 (SEQ ID NO:1924), FIG. 1926 (SEQ ID NO:1926), FIG. 1928 (SEQ ID NO:1928), FIG. 1930 (SEQ ID NO:1930), FIG. 1932 (SEQ ID NO:1932), FIG. 1934 (SEQ ID NO:1934), FIG. 1936 (SEQ ID NO:1936), FIG. 1938 (SEQ ID NO:1938), FIG. 1940 (SEQ ID NO:1940), FIG. 1942 (SEQ ID NO:1942), FIG. 1944 (SEQ ID NO:1944), FIG. 1946 (SEQ ID NO:1946), FIG. 1948 (SEQ ID NO:1948), FIG. 1950 (SEQ ID NO:1950), FIG. 1952 (SEQ ID NO:1952), FIG. 1954 (SEQ ID NO:1954), FIG. 1956 (SEQ ID NO:1956), FIG. 1958 (SEQ ID NO:1958), FIG. 1960 (SEQ ID NO:1960), FIG. 1962 (SEQ ID NO:1962), FIG. 1964 (SEQ ID NO:1964), FIG. 1966 (SEQ ID NO:1966), FIG. 1968 (SEQ ID NO:1968), FIG. 1970 (SEQ ID NO:1970), FIG. 1972 (SEQ ID NO:1972), FIG. 1974 (SEQ ID NO:1974), FIG. 1976 (SEQ ID NO:1976), FIG. 1978 (SEQ ID NO:1978), FIG. 1980 (SEQ ID NO:1980), FIG. 1982 (SEQ ID NO:1982), FIG. 1984 (SEQ ID NO:1984), FIG. 1986 (SEQ ID NO:1986), FIG. 1988 (SEQ ID NO:1988), FIG. 1990 (SEQ ID NO:1990), FIG. 1992 (SEQ ID NO:1992), FIG. 1994 (SEQ ID NO:1994), FIG. 1996 (SEQ ID NO:1996), FIG. 1998 (SEQ ID NO:1998), FIG. 2000 (SEQ ID NO:2000), FIG. 2002 (SEQ ID NO:2002), FIG. 2004 (SEQ ID NO:2004), FIG. 2006 (SEQ ID NO:2006), FIG. 2008 (SEQ ID NO:2008), FIG. 2010 (SEQ ID NO:2010), FIG. 2012 (SEQ ID NO:2012), FIG. 2014 (SEQ ID NO:2014), FIG. 2016 (SEQ ID NO:2016), FIG. 2018 (SEQ ID NO:2018), FIG. 2020 (SEQ ID NO:2020), FIG. 2022 (SEQ ID NO:2022), FIG. 2024 (SEQ ID NO:2024), FIG. 2026 (SEQ ID NO:2026), FIG. 2028 (SEQ ID NO:2028), FIG. 2030 (SEQ ID NO:2030), FIG. 2032 (SEQ ID NO:2032), FIG. 2034 (SEQ ID NO:2034), FIG. 2036 (SEQ ID NO:2036), FIG. 2038 (SEQ ID NO:2038), FIG. 2040 (SEQ ID NO:2040), FIG. 2042 (SEQ ID NO:2042), FIG. 2044 (SEQ ID NO:2044), FIG. 2046 (SEQ ID NO:2046), FIG. 2048 (SEQ ID NO:2048), FIG. 2050 (SEQ ID NO:2050), FIG. 2052 (SEQ ID NO:2052), FIG. 2054 (SEQ ID NO:2054), FIG. 2056 (SEQ ID NO:2056), FIG. 2058 (SEQ ID NO:2058), FIG. 2060 (SEQ ID NO:2060), FIG. 2062 (SEQ ID NO:2062), FIG. 2064 (SEQ ID NO:2064), FIG. 2066 (SEQ ID NO:2066), FIG. 2068 (SEQ ID NO:2068), FIG. 2070 (SEQ ID NO:2070), FIG. 2072 (SEQ ID NO:2072), FIG. 2074 (SEQ ID NO:2074), FIG. 2076 (SEQ ID NO:2076), FIG. 2078 (SEQ ID NO:2078), FIG. 2080 (SEQ ID NO:2080), FIG. 2082 (SEQ ID NO:2082), FIG. 2084 (SEQ ID NO:2084), FIG. 2086 (SEQ ID NO:2086), FIG. 2088 (SEQ ID NO:2088), FIG. 2090 (SEQ ID NO:2090), FIG. 2092 (SEQ ID NO:2092), FIG. 2094 (SEQ ID NO:2094), FIG. 2096 (SEQ ID NO:2096), FIG. 2098 (SEQ ID NO:2098), FIG. 2100 (SEQ ID NO:2100), FIG. 2102 (SEQ ID NO:2102), FIG. 2104 (SEQ ID NO:2104), FIG. 2106 (SEQ ID NO:2106), FIG. 2108 (SEQ ID NO:2108), FIG. 2110 (SEQ ID NO:2110), FIG. 2112 (SEQ ID NO:2112), FIG. 2114 (SEQ ID NO:2114), FIG. 2116 (SEQ ID NO:2116), FIG. 2118 (SEQ ID NO:2118), FIG. 2120 (SEQ ID NO:2120), FIG. 2122 (SEQ ID NO:2122), FIG. 2124 (SEQ ID NO:2124), FIG. 2126 (SEQ ID NO:2126), FIG. 2128 (SEQ ID NO:2128), FIG. 2130 (SEQ ID NO:2130), FIG. 2132 (SEQ ID NO:2132), FIG. 2134 (SEQ ID NO:2134), FIG. 2136 (SEQ ID NO:2136), FIG. 2138 (SEQ ID NO:2138), FIG. 2140 (SEQ ID NO:2140), FIG. 2142 (SEQ ID NO:2142), FIG. 2144 (SEQ ID NO:2144), FIG. 2146 (SEQ ID NO:2146), FIG. 2148 (SEQ ID NO:2148), FIG. 2150 (SEQ ID NO:2150), FIG. 2152 (SEQ ID NO:2152), FIG. 2154 (SEQ ID NO:2154), FIG. 2156 (SEQ ID NO:2156), FIG. 2158 (SEQ ID NO:2158), FIG. 2160 (SEQ ID NO:2160), FIG. 2163 (SEQ ID NO:2163), FIG. 2165 (SEQ ID NO:2165), FIG. 2167 (SEQ ID NO:2167), FIG. 2170 (SEQ ID NO:2170), FIG. 2172 (SEQ ID NO:2172), FIG. 2174 (SEQ ID NO:2174), FIG. 2176 (SEQ ID NO:2176), FIG. 2178 (SEQ ID NO:2178), FIG. 2180 (SEQ ID NO:2180), FIG. 2182 (SEQ ID NO:2182), FIG. 2184 (SEQ ID NO:2184), FIG. 2186 (SEQ ID NO:2186), FIG. 2188 (SEQ ID NO:2188), FIG. 2191 (SEQ ID NO:2191), FIG. 2193 (SEQ ID NO:2193), FIG. 2195 (SEQ ID NO:2195), FIG. 2197 (SEQ ID NO:2197), FIG. 2199 (SEQ ID NO:2199), FIG. 2201 (SEQ ID NO:2201), FIG. 2204 (SEQ ID NO:2204), FIG. 2207 (SEQ ID NO:2207), FIG. 2209 (SEQ ID NO:2209), FIG. 2212 (SEQ ID NO:2212), FIG. 2214 (SEQ ID NO:2214), FIG. 2216 (SEQ ID NO:2216), FIG. 2218 (SEQ ID NO:2218), FIG. 2220 (SEQ ID NO:2220), FIG. 2222 (SEQ ID NO:2222), FIG. 2224 (SEQ ID NO:2224), FIG. 2226 (SEQ ID NO:2226), FIG. 2228 (SEQ ID NO:2228), FIG. 2230 (SEQ ID NO:2230), FIG. 2232 (SEQ ID NO:2232), FIG. 2234 (SEQ ID NO:2234), FIG. 2236 (SEQ ID NO:2236), FIG. 2238 (SEQ ID NO:2238), FIG. 2240 (SEQ ID NO:2240), FIG. 2242 (SEQ ID NO:2242), FIG. 2244 (SEQ ID NO:2244), FIG. 2246 (SEQ ID NO:2246), FIG. 2248 (SEQ ID NO:2248), FIG. 2250 (SEQ ID NO:2250), FIG. 2252 (SEQ ID NO:2252), FIG. 2254 (SEQ ID NO:2254), FIG. 2256 (SEQ ID NO:2256), FIG. 2258 (SEQ ID NO:2258), FIG. 2260 (SEQ ID NO:2260), FIG. 2262 (SEQ ID NO:2262), FIG. 2264 (SEQ ID NO:2264), FIG. 2266 (SEQ ID NO:2266), FIG. 2268 (SEQ ID NO:2268), FIG. 2270 (SEQ ID NO:2270), FIG. 2272 (SEQ ID NO:2272), FIG. 2274 (SEQ ID NO:2274), FIG. 2276 (SEQ ID NO:2276), FIG. 2278 (SEQ ID NO:2278), FIG. 2280 (SEQ ID NO:2280), FIG. 2282 (SEQ ID NO:2282), FIG. 2284 (SEQ ID NO:2284), FIG. 2286 (SEQ ID NO:2286), FIG. 2288 (SEQ ID NO:2288), FIG. 2290 (SEQ ID NO:2290), FIG. 2292 (SEQ ID NO:2292), FIG. 2294 (SEQ ID NO:2294), FIG. 2296 (SEQ ID NO:2296), FIG. 2298 (SEQ ID NO:2298), FIG. 2301 (SEQ ID NO:2301), FIG. 2303 (SEQ ID NO:2303), FIG. 2305 (SEQ ID NO:2305), FIG. 2307 (SEQ ID NO:2307), FIG. 2310 (SEQ ID NO:2310), FIG. 2312 (SEQ ID NO:2312), FIG. 2314 (SEQ ID NO:2314), FIG. 2316 (SEQ ID NO:2316), FIG. 2319 (SEQ ID NO:2319), FIG. 2321 (SEQ ID NO:2321), FIG. 2323 (SEQ ID NO:2323), FIG. 2325 (SEQ ID NO:2325), FIG. 2327 (SEQ ID NO:2327), FIG. 2329 (SEQ ID NO:2329), FIG. 2331 (SEQ ID NO:2331), FIG. 2333 (SEQ ID NO:2333), FIG. 2335 (SEQ ID NO:2335), FIG. 2337 (SEQ ID NO:2337), FIG. 2339 (SEQ ID NO:2339), FIG. 2341 (SEQ ID NO:2341), FIG. 2343 (SEQ ID NO:2343), FIG. 2345 (SEQ ID NO:2345), FIG. 2347 (SEQ ID NO:2347), FIG. 2349 (SEQ ID NO:2349), FIG. 2351 (SEQ ID NO:2351), FIG. 2353 (SEQ ID NO:2353), FIG. 2355 (SEQ ID NO:2355), FIG. 2357 (SEQ ID NO:2357), FIG. 2359 (SEQ ID NO:2359), FIG. 2361 (SEQ ID NO:2361), FIG. 2363 (SEQ ID NO:2363), FIG. 2365 (SEQ ID NO:2365), FIG. 2367 (SEQ ID NO:2367), FIG. 2369 (SEQ ID NO:2369), FIG. 2371 (SEQ ID NO:2371), FIG. 2373 (SEQ ID NO:2373), FIG. 2375 (SEQ ID NO:2375), FIG. 2378 (SEQ ID NO:2378), FIG. 2380 (SEQ ID NO:2380), FIG. 2383 (SEQ ID NO:2383), FIG. 2386 (SEQ ID NO:2386), FIG. 2388 (SEQ ID NO:2388), FIG. 2391 (SEQ ID NO:2391), FIG. 2393 (SEQ ID NO:2393), FIG. 2396 (SEQ ID NO:2396), FIG. 2398 (SEQ ID NO:2398), FIG. 2402 (SEQ ID NO:2402), FIG. 2404 (SEQ ID NO:2404), FIG. 2408 (SEQ ID NO:2408), FIG. 2410 (SEQ ID NO:2410), FIG. 2412 (SEQ ID NO:2412), FIG. 2415 (SEQ ID NO:2415), FIG. 2418 (SEQ ID NO:2418), FIG. 2420 (SEQ ID NO:2420), FIG. 2422 (SEQ ID NO:2422), FIG. 2424 (SEQ ID NO:2424), FIG. 2426 (SEQ ID NO:2426), FIG. 2430 (SEQ ID NO:2430), FIG. 2432 (SEQ ID NO:2432), FIG. 2434 (SEQ ID NO:2434), FIG. 2436 (SEQ ID NO:2436), FIG. 2438 (SEQ ID NO:2438), FIG. 2440 (SEQ ID NO:2440), or FIG. 2442 (SEQ ID NO:2442), (a) in a test sample of tissue cells obtained from the mammal, and (b) in a control sample of known normal tissue cells of the same cell type, wherein a higher or lower level of expression of said gene in the test sample as compared to the control sample is indicative of the presence of an immune related disease in the mammal from which the test tissue cells were obtained.

22. A method of diagnosing an immune related disease in a mammal, said method comprising (a) contacting a PRO polypeptide of the invention as described in FIG. 2 (SEQ ID NO:2), FIG. 4 (SEQ ID NO:4), FIG. 6 (SEQ ID NO:6), FIG. 8 (SEQ ID NO:8), FIG. 10 (SEQ ID NO:10), FIG. 12 (SEQ ID NO:12), FIG. 14 (SEQ ID NO:14), FIG. 16 (SEQ ID NO:16), FIG. 18 (SEQ ID NO:18), FIG. 20 (SEQ ID NO:20), FIG. 22 (SEQ ID NO:22), FIG. 24 (SEQ ID NO:24), FIG. 26 (SEQ ID NO:26), FIG. 28 (SEQ ID NO:28), FIG. 30 (SEQ ID NO:30), FIG. 32 (SEQ ID NO:32), FIG. 34 (SEQ ID NO:34), FIG. 36 (SEQ ID NO:36), FIG. 38 (SEQ ID NO:38), FIG. 40 (SEQ ID NO:40), FIG. 42 (SEQ ID NO:42), FIG. 44 (SEQ ID NO:44), FIG. 46 (SEQ ID NO:46), FIG. 48 (SEQ ID NO:48), FIG. 50 (SEQ ID NO:50), FIG. 52 (SEQ ID NO:52), FIG. 54 (SEQ ID NO:54), FIG. 56 (SEQ ID NO:56), FIG. 58 (SEQ ID NO:58), FIG. 60 (SEQ ID NO:60), FIG. 62 (SEQ ID NO:62), FIG. 64 (SEQ ID NO:64), FIG. 66 (SEQ ID NO:66), FIG. 68 (SEQ ID NO:68), FIG. 70 (SEQ ID NO:70), FIG. 72 (SEQ ID NO:72), FIG. 74 (SEQ ID NO:74), FIG. 76 (SEQ ID NO:76), FIG. 78 (SEQ ID NO:78), FIG. 80 (SEQ ID NO:80), FIG. 82 (SEQ ID NO:82), FIG. 84 (SEQ ID NO:84), FIG. 86 (SEQ ID NO:86), FIG. 88 (SEQ ID NO:88), FIG. 90 (SEQ ID NO:90), FIG. 92 (SEQ ID NO:92), FIG. 94 (SEQ ID NO:94), FIG. 96 (SEQ ID NO:96), FIG. 98 (SEQ ID NO:98), FIG. 100 (SEQ ID NO:100), FIG. 102 (SEQ ID NO:102), FIG. 104 (SEQ ID NO:104), FIG. 106 (SEQ ID NO:106), FIG. 108 (SEQ ID NO:108), FIG. 110 (SEQ ID NO:110), FIG. 112 (SEQ ID NO:112), FIG. 114 (SEQ ID NO:114), FIG. 116 (SEQ ID NO:116), FIG. 118 (SEQ ID NO:118), FIG. 121 (SEQ ID NO:121), FIG. 123 (SEQ ID NO:123), FIG. 125 (SEQ ID NO:125), FIG. 127 (SEQ ID NO:127), FIG. 129 (SEQ ID NO:129), FIG. 131 (SEQ ID NO:131), FIG. 133 (SEQ ID NO:133), FIG. 135 (SEQ ID NO:135), FIG. 137 (SEQ ID NO:137), FIG. 139 (SEQ ID NO:139), FIG. 141 (SEQ ID NO:141), FIG. 143 (SEQ ID NO:143), FIG. 145 (SEQ ID NO:145), FIG. 147 (SEQ ID NO:147), FIG. 149 (SEQ ID NO:149), FIG. 151 (SEQ ID NO:151), FIG. 153 (SEQ ID NO:153), FIG. 155 (SEQ ID NO:155), FIG. 157 (SEQ ID NO:157), FIG. 159 (SEQ ID NO:159), FIG. 161 (SEQ ID NO:161), FIG. 163 (SEQ ID NO:163), FIG. 165 (SEQ ID NO:165), FIG. 167 (SEQ ID NO:167), FIG. 169 (SEQ ID NO:169), FIG. 171 (SEQ ID NO:171), FIG. 173 (SEQ ID NO:173), FIG. 175 (SEQ ID NO:175), FIG. 177 (SEQ ID NO:177), FIG. 179 (SEQ ID NO:179), FIG. 181 (SEQ ID NO:181), FIG. 183 (SEQ ID NO:183), FIG. 185 (SEQ ID NO:185), FIG. 187 (SEQ ID NO:187), FIG. 189 (SEQ ID NO:189), FIG. 191 (SEQ ID NO:191), FIG. 193 (SEQ ID NO:193), FIG. 195 (SEQ ID NO:195), FIG. 197 (SEQ ID NO:197), FIG. 199 (SEQ ID NO:199), FIG. 201 (SEQ ID NO:201), FIG. 203 (SEQ ID NO:203), FIG. 205 (SEQ ID NO:205), FIG. 207 (SEQ ID NO:207), FIG. 209 (SEQ ID NO:209), FIG. 211 (SEQ ID NO:211), FIG. 213 (SEQ ID NO:213), FIG. 215 (SEQ ID NO:215), FIG. 217 (SEQ ID NO:217), FIG. 219 (SEQ ID NO:219), FIG. 221 (SEQ ID NO:221), FIG. 223 (SEQ ID NO:223), FIG. 225 (SEQ ID NO:225), FIG. 227 (SEQ ID NO:227), FIG. 229 (SEQ ID NO:229), FIG. 231 (SEQ ID NO:231), FIG. 233 (SEQ ID NO:233), FIG. 235 (SEQ ID NO:235), FIG. 237 (SEQ ID NO:237), FIG. 239 (SEQ ID NO:239), FIG. 241 (SEQ ID NO:241), FIG. 243 (SEQ ID NO:243), FIG. 245 (SEQ ID NO:245), FIG. 247 (SEQ ID NO:247), FIG. 249 (SEQ ID NO:249), FIG. 251 (SEQ ID NO:251), FIG. 254 (SEQ ID NO:254), FIG. 256 (SEQ ID NO:256), FIG. 258 (SEQ ID NO:258), FIG. 260 (SEQ ID NO:260), FIG. 262 (SEQ ID NO:262), FIG. 264 (SEQ ID NO:264), FIG. 266 (SEQ ID NO:266), FIG. 268 (SEQ ID NO:268), FIG. 270 (SEQ ID NO:270), FIG. 272 (SEQ ID NO:272), FIG. 274 (SEQ ID NO:274), FIG. 276 (SEQ ID NO:276), FIG. 278 (SEQ ID NO:278), FIG. 280 (SEQ ID NO:280), FIG. 282 (SEQ ID NO:282), FIG. 284 (SEQ ID NO:284), FIG. 286 (SEQ ID NO:286), FIG. 288 (SEQ ID NO:288), FIG. 290 (SEQ ID NO:290), FIG. 292 (SEQ ID NO:292), FIG. 294 (SEQ ID NO:294), FIG. 296 (SEQ ID NO:296), FIG. 298 (SEQ ID NO:298), FIG. 300 (SEQ ID NO:300), FIG. 302 (SEQ ID NO:302), FIG. 304 (SEQ ID NO:304), FIG. 306 (SEQ ID NO:306), FIG. 308 (SEQ ID NO:308), FIG. 310 (SEQ ID NO:310), FIG. 312 (SEQ ID NO:312), FIG. 314 (SEQ ID NO:314), FIG. 316 (SEQ ID NO:316), FIG. 318 (SEQ ID NO:318), FIG. 320 (SEQ ID NO:320), FIG. 322 (SEQ ID NO:322), FIG. 324 (SEQ ID NO:324), FIG. 326 (SEQ ID NO:326), FIG. 328 (SEQ ID NO:328), FIG. 330 (SEQ ID NO:330), FIG. 332 (SEQ ID NO:332), FIG. 334 (SEQ ID NO:334), FIG. 336 (SEQ ID NO:336), FIG. 338 (SEQ ID NO:338), FIG. 340 (SEQ ID NO:340), FIG. 342 (SEQ ID NO:342), FIG. 344 (SEQ ID NO:344), FIG. 346 (SEQ ID NO:346), FIG. 348 (SEQ ID NO:348), FIG. 350 (SEQ ID NO:350), FIG. 352 (SEQ ID NO:352), FIG. 354 (SEQ ID NO:354), FIG. 356 (SEQ ID NO:356), FIG. 358 (SEQ ID NO:358), FIG. 360 (SEQ ID NO:360), FIG. 362 (SEQ ID NO:362), FIG. 364 (SEQ ID NO:364), FIG. 366 (SEQ ID NO:366), FIG. 368 (SEQ ID NO:368), FIG. 370 (SEQ ID NO:370), FIG. 372 (SEQ ID NO:372), FIG. 374 (SEQ ID NO:374), FIG. 376 (SEQ ID NO:376), FIG. 378 (SEQ ID NO:378), FIG. 380 (SEQ ID NO:380), FIG. 382 (SEQ ID NO:382), FIG. 384 (SEQ ID NO:384), FIG. 386 (SEQ ID NO:386), FIG. 388 (SEQ ID NO:388), FIG. 390 (SEQ ID NO:390), FIG. 392 (SEQ ID NO:392), FIG. 394 (SEQ ID NO:394), FIG. 396 (SEQ ID NO:396), FIG. 398 (SEQ ID NO:398), FIG. 400 (SEQ ID NO:400), FIG. 402 (SEQ ID NO:402), FIG. 404 (SEQ ID NO:404), FIG. 406 (SEQ ID NO:406), FIG. 408 (SEQ ID NO:408), FIG. 410 (SEQ ID NO:410), FIG. 412 (SEQ ID NO:412), FIG. 414 (SEQ ID NO:414), FIG. 416 (SEQ ID NO:416), FIG. 418 (SEQ ID NO:418), FIG. 420 (SEQ ID NO:420), FIG. 422 (SEQ ID NO:422), FIG. 424 (SEQ ID NO:424), FIG. 426 (SEQ ID NO:426), FIG. 428 (SEQ ID NO:428), FIG. 430 (SEQ ID NO:430), FIG. 432 (SEQ ID NO:432), FIG. 434 (SEQ ID NO:434), FIG. 436 (SEQ ID NO:436), FIG. 438 (SEQ ID NO:438), FIG. 440 (SEQ ID NO:440), FIG. 442 (SEQ ID NO:442), FIG. 444 (SEQ ID NO:444), FIG. 446 (SEQ ID NO:446), FIG. 448 (SEQ ID NO:448), FIG. 450 (SEQ ID NO:450), FIG. 452 (SEQ ID NO:452), FIG. 454 (SEQ ID NO:454), FIG. 456 (SEQ ID NO:456), FIG. 458 (SEQ ID NO:458), FIG. 460 (SEQ ID NO:460), FIG. 462 (SEQ ID NO:462), FIG. 464 (SEQ ID NO:464), FIG. 466 (SEQ ID NO:466), FIG. 468 (SEQ ID NO:468), FIG. 470 (SEQ ID NO:470), FIG. 472 (SEQ ID NO:472), FIG. 474 (SEQ ID NO:474), FIG. 476 (SEQ ID NO:476), FIG. 478 (SEQ ID NO:478), FIG. 480 (SEQ ID NO:480), FIG. 482 (SEQ ID NO:482), FIG. 484 (SEQ ID NO:484), FIG. 486 (SEQ ID NO:486), FIG. 488 (SEQ ID NO:488), FIG. 490 (SEQ ID NO:490), FIG. 492 (SEQ ID NO:492), FIG. 494 (SEQ ID NO:494), FIG. 496 (SEQ ID NO:496), FIG. 498 (SEQ ID NO:498), FIG. 500 (SEQ ID NO:500), FIG. 502 (SEQ ID NO:502), FIG. 504 (SEQ ID NO:504), FIG. 506 (SEQ ID NO:506), FIG. 508 (SEQ ID NO:508), FIG. 510 (SEQ ID NO:510), FIG. 512 (SEQ ID NO:512), FIG. 514 (SEQ ID NO:514), FIG. 516 (SEQ ID NO:516), FIG. 518 (SEQ ID NO:518), FIG. 520 (SEQ ID NO:520), FIG. 522 (SEQ ID NO:522), FIG. 524 (SEQ ID NO:524), FIG. 526 (SEQ ID NO:526), FIG. 528 (SEQ ID NO:528), FIG. 530 (SEQ ID NO:530), FIG. 532 (SEQ ID NO:532), FIG. 534 (SEQ ID NO:534), FIG. 536 (SEQ ID NO:536), FIG. 538 (SEQ ID NO:538), FIG. 540 (SEQ ID NO:540), FIG. 542 (SEQ ID NO:542), FIG. 544 (SEQ ID NO:544), FIG. 546 (SEQ ID NO:546), FIG. 549 (SEQ ID NO:549), FIG. 551 (SEQ ID NO:551), FIG. 553 (SEQ ID NO:553), FIG. 555 (SEQ ID NO:555), FIG. 557 (SEQ ID NO:557), FIG. 559 (SEQ ID NO:559), FIG. 561 (SEQ ID NO:561), FIG. 563 (SEQ ID NO:563), FIG. 565 (SEQ ID NO:565), FIG. 567 (SEQ ID NO:567), FIG. 569 (SEQ ID NO:569), FIG. 571 (SEQ ID NO:571), FIG. 573 (SEQ ID NO:573), FIG. 575 (SEQ ID NO:575), FIG. 577 (SEQ ID NO:577), FIG. 579 (SEQ ID NO:579), FIG. 581 (SEQ ID NO:581), FIG. 583 (SEQ ID NO:583), FIG. 585 (SEQ ID NO:585), FIG. 587 (SEQ ID NO:587), FIG. 589 (SEQ ID NO:589), FIG. 591 (SEQ ID NO:591), FIG. 593 (SEQ ID NO:593), FIG. 595 (SEQ ID NO:595), FIG. 597 (SEQ ID NO:597), FIG. 599 (SEQ ID NO:599), FIG. 601 (SEQ ID NO:601), FIG. 603 (SEQ ID NO:603), FIG. 605 (SEQ ID NO:605), FIG. 607 (SEQ ID NO:607), FIG. 609 (SEQ ID NO:609), FIG. 611 (SEQ ID NO:611), FIG. 613 (SEQ ID NO:613), FIG. 615 (SEQ ID NO:615), FIG. 617 (SEQ ID NO:617), FIG. 619 (SEQ ID NO:619), FIG. 621 (SEQ ID NO:621), FIG. 623 (SEQ ID NO:623), FIG. 625 (SEQ ID NO:625), FIG. 627 (SEQ ID NO:627), FIG. 629 (SEQ ID NO:629), FIG. 631 (SEQ ID NO:631), FIG. 633 (SEQ ID NO:633), FIG. 635 (SEQ ID NO:635), FIG. 637 (SEQ ID NO:637), FIG. 639 (SEQ ID NO:639), FIG. 641 (SEQ ID NO:641), FIG. 643 (SEQ ID NO:643), FIG. 645 (SEQ ID NO:645), FIG. 647 (SEQ ID NO:647), FIG. 649 (SEQ ID NO:649), FIG. 651 (SEQ ID NO:651), FIG. 653 (SEQ ID NO:653), FIG. 655 (SEQ ID NO:655), FIG. 657 (SEQ ID NO:657), FIG. 659 (SEQ ID NO:659), FIG. 661 (SEQ ID NO:661), FIG. 663 (SEQ ID NO:663), FIG. 665 (SEQ ID NO:665), FIG. 667 (SEQ ID NO:667), FIG. 669 (SEQ ID NO:669), FIG. 671 (SEQ ID NO:671), FIG. 673 (SEQ ID NO:673), FIG. 675 (SEQ ID NO:675), FIG. 677 (SEQ ID NO:377), FIG. 679 (SEQ ID NO:679), FIG. 681 (SEQ ID NO:681), FIG. 683 (SEQ ID NO:683), FIG. 685 (SEQ ID NO:685), FIG. 687 (SEQ ID NO:687), FIG. 689 (SEQ ID NO:689), FIG. 691 (SEQ ID NO:691), FIG. 693 (SEQ ID NO:693), FIG. 695 (SEQ ID NO:695), FIG. 697 (SEQ ID NO:697), FIG. 699 (SEQ ID NO:699), FIG. 701 (SEQ ID NO:701), FIG. 703 (SEQ ID NO:703), FIG. 705 (SEQ ID NO:705), FIG. 707 (SEQ ID NO:707), FIG. 709 (SEQ ID NO:709), FIG. 711 (SEQ ID NO:711), FIG. 713 (SEQ ID NO:713), FIG. 715 (SEQ ID NO:715), FIG. 717 (SEQ ID NO:717), FIG. 719 (SEQ ID NO:719), FIG. 721 (SEQ ID NO:721), FIG. 723 (SEQ ID NO:723), FIG. 725 (SEQ ID NO:725), FIG. 727 (SEQ ID NO:727), FIG. 729 (SEQ ID NO:729), FIG. 731 (SEQ ID NO:731), FIG. 733 (SEQ ID NO:733), FIG. 735 (SEQ ID NO:735), FIG. 737 (SEQ ID NO:737), FIG. 739 (SEQ ID NO:739), FIG. 741 (SEQ ID NO:741), FIG. 743 (SEQ ID NO:743), FIG. 745 (SEQ ID NO:745), FIG. 747 (SEQ ID NO:747), FIG. 749 (SEQ ID NO:749), FIG. 751 (SEQ ID NO:751), FIG. 753 (SEQ ID NO:753), FIG. 755 (SEQ ID NO:755), FIG. 757 (SEQ ID NO:757), FIG. 759 (SEQ ID NO:759), FIG. 761 (SEQ ID NO:761), FIG. 763 (SEQ ID NO:763), FIG. 765 (SEQ ID NO:765), FIG. 767 (SEQ ID NO:767), FIG. 769 (SEQ ID NO:769), FIG. 771 (SEQ ID NO:771), FIG. 773 (SEQ ID NO:773), FIG. 775 (SEQ ID NO:775), FIG. 777 (SEQ ID NO:777), FIG. 779 (SEQ ID NO:779), FIG. 781 (SEQ ID NO:781), FIG. 783 (SEQ ID NO:783), FIG. 785 (SEQ ID NO:785), FIG. 787 (SEQ ID NO:787), FIG. 789 (SEQ ID NO:789), FIG. 791 (SEQ ID NO:791), FIG. 793 (SEQ ID NO:793), FIG. 795 (SEQ ID NO:795), FIG. 797 (SEQ ID NO:797), FIG. 799 (SEQ ID NO:799), FIG. 801 (SEQ ID NO:801), FIG. 803 (SEQ ID NO:803), FIG. 805 (SEQ ID NO:805), FIG. 807 (SEQ ID NO:807), FIG. 809 (SEQ ID NO:809), FIG. 811 (SEQ ID NO:811), FIG. 813 (SEQ ID NO:813), FIG. 815 (SEQ ID NO:815), FIG. 817 (SEQ ID NO:817), FIG. 819 (SEQ ID NO:819), FIG. 821 (SEQ ID NO:821), FIG. 823 (SEQ ID NO:823), FIG. 825 (SEQ ID NO:825), FIG. 827 (SEQ ID NO:827), FIG. 829 (SEQ ID NO:829), FIG. 831 (SEQ ID NO:831), FIG. 833 (SEQ ID NO:833), FIG. 835 (SEQ ID NO:835), FIG. 837 (SEQ ID NO:837), FIG. 839 (SEQ ID NO:839), FIG. 841 (SEQ ID NO:841), FIG. 843 (SEQ ID NO:843), FIG. 845 (SEQ ID NO:845), FIG. 847 (SEQ ID NO:847), FIG. 849 (SEQ ID NO:849), FIG. 851 (SEQ ID NO:851), FIG. 853 (SEQ ID NO:853), FIG. 855 (SEQ ID NO:855), FIG. 858 (SEQ ID NO:858), FIG. 860 (SEQ ID NO:860), FIG. 862 (SEQ ID NO:862), FIG. 864 (SEQ ID NO:864), FIG. 866 (SEQ ID NO:866), FIG. 868 (SEQ ID NO:868), FIG. 870 (SEQ ID NO:870), FIG. 872 (SEQ ID NO:872), FIG. 874 (SEQ ID NO:874), FIG. 876 (SEQ ID NO:876), FIG. 878 (SEQ ID NO:878), FIG. 880 (SEQ ID NO:880), FIG. 882 (SEQ ID NO:882), FIG. 884 (SEQ ID NO:884), FIG. 886 (SEQ ID NO:886), FIG. 888 (SEQ ID NO:888), FIG. 890 (SEQ ID NO:890), FIG. 892 (SEQ ID NO:892), FIG. 894 (SEQ ID NO:894), FIG. 896 (SEQ ID NO:896), FIG. 898 (SEQ ID NO:898), FIG. 900 (SEQ ID NO:900), FIG. 902 (SEQ ID NO:902), FIG. 904 (SEQ ID NO:904), FIG. 906 (SEQ ID NO:906), FIG. 908 (SEQ ID NO:908), FIG. 910 (SEQ ID NO:910), FIG. 912 (SEQ ID NO:912), FIG. 914 (SEQ ID NO:914), FIG. 916 (SEQ ID NO:916), FIG. 918 (SEQ ID NO:918), FIG. 920 (SEQ ID NO:920), FIG. 922 (SEQ ID NO:922), FIG. 924 (SEQ ID NO:924), FIG. 926 (SEQ ID NO:926), FIG. 928 (SEQ ID NO:928), FIG. 930 (SEQ ID NO:930), FIG. 932 (SEQ ID NO:932), FIG. 934 (SEQ ID NO:934), FIG. 936 (SEQ ID NO:936), FIG. 938 (SEQ ID NO:938), FIG. 940 (SEQ ID NO:940), FIG. 943 (SEQ ID NO:943), FIG. 945 (SEQ ID NO:945), FIG. 947 (SEQ ID NO:947), FIG. 949 (SEQ ID NO:949), FIG. 951 (SEQ ID NO:951), FIG. 953 (SEQ ID NO:953), FIG. 955 (SEQ ID NO:955), FIG. 958 (SEQ ID NO:958), FIG. 960 (SEQ ID NO:960), FIG. 963 (SEQ ID NO:963), FIG. 965 (SEQ ID NO:965), FIG. 968 (SEQ ID NO:968), FIG. 970 (SEQ ID NO:970), FIG. 972 (SEQ ID NO:972), FIG. 974 (SEQ ID NO:974), FIG. 976 (SEQ ID NO:976), FIG. 978 (SEQ ID NO:978), FIG. 980 (SEQ ID NO:980), FIG. 983 (SEQ ID NO:983), FIG. 985 (SEQ ID NO:985), FIG. 987 (SEQ ID NO:987), FIG. 990 (SEQ ID NO:990), FIG. 992 (SEQ ID NO:992), FIG. 994 (SEQ ID NO:994), FIG. 996 (SEQ ID NO:996), FIG. 998 (SEQ ID NO:998), FIG. 1000 (SEQ ID NO:1000), FIG. 1002 (SEQ ID NO:1002), FIG. 1007 (SEQ ID NO:1007), FIG. 1009 (SEQ ID NO:1009), FIG. 1011 (SEQ ID NO:1011), FIG. 1013 (SEQ ID NO:1013), FIG. 1015 (SEQ ID NO:1015), FIG. 1017 (SEQ ID NO:1017), FIG. 1019 (SEQ ID NO:1019), FIG. 1021 (SEQ ID NO:1021), FIG. 1023 (SEQ ID NO:1023), FIG. 1025 (SEQ ID NO:1025), FIG. 1030 (SEQ ID NO:1030), FIG. 1033 (SEQ ID NO:1033), FIG. 1035 (SEQ ID NO:1035), FIG. 1037 (SEQ ID NO:1037), FIG. 1039 (SEQ ID NO:1039), FIG. 1041 (SEQ ID NO:1041), FIG. 1043 (SEQ ID NO:1043), FIG. 1046 (SEQ ID NO:1046), FIG. 1048 (SEQ ID NO:1048), FIG. 1050 (SEQ ID NO:1050), FIG. 1053 (SEQ ID NO:1053), FIG. 1055 (SEQ ID NO:1055), FIG. 1057 (SEQ ID NO:1057), FIG. 1060 (SEQ ID NO:1060), FIG. 1062 (SEQ ID NO:1062), FIG. 1064 (SEQ ID NO:1064), FIG. 1066 (SEQ ID NO:1066), FIG. 1068 (SEQ ID NO:1068), FIG. 1070 (SEQ ID NO:1070), FIG. 1072 (SEQ ID NO:1072), FIG. 1074 (SEQ ID NO:1074), FIG. 1076 (SEQ ID NO:1076), FIG. 1078 (SEQ ID NO:1078), FIG. 1080 (SEQ ID NO:1080), FIG. 1082 (SEQ ID NO:1082), FIG. 1084 (SEQ ID NO:1084), FIG. 1086 (SEQ ID NO:1086), FIG. 1088 (SEQ ID NO:1088), FIG. 1090 (SEQ ID NO:1090), FIG. 1092 (SEQ ID NO:1092), FIG. 1094 (SEQ ID NO:1094), FIG. 1096 (SEQ ID NO:1096), FIG. 1098 (SEQ ID NO:1098), FIG. 1101 (SEQ ID NO:1101), FIG. 1103 (SEQ ID NO:1103), FIG. 1105 (SEQ ID NO:1105), FIG. 1107 (SEQ ID NO:1107), FIG. 1109 (SEQ ID NO:1109), FIG. 1111 (SEQ ID NO:1111), FIG. 1113 (SEQ ID NO:1113), FIG. 1116 (SEQ ID NO:1116), FIG. 1118 (SEQ ID NO:1118), FIG. 1120 (SEQ ID NO:1120), FIG. 1123 (SEQ ID NO:1123), FIG. 1125 (SEQ ID NO:1125), FIG. 1128 (SEQ ID NO:1128), FIG. 1130 (SEQ ID NO:1130), FIG. 1132 (SEQ ID NO:1132), FIG. 1134 (SEQ ID NO:1134), FIG. 1136 (SEQ ID NO:1136), FIG. 1138 (SEQ ID NO:1138), FIG. 1142 (SEQ ID NO:1142), FIG. 1144 (SEQ ID NO:1144), FIG. 1146 (SEQ ID NO:1146), FIG. 1148 (SEQ ID NO:1148), FIG. 1150 (SEQ ID NO:1150), FIG. 1152 (SEQ ID NO:1152), FIG. 1154 (SEQ ID NO:1154), FIG. 1156 (SEQ ID NO:1156), FIG. 1158 (SEQ ID NO:1158), FIG. 1160 (SEQ ID NO:1160), FIG. 1162 (SEQ ID NO:1162), FIG. 1164 (SEQ ID NO:1164), FIG. 1166 (SEQ ID NO:1166), FIG. 1168 (SEQ ID NO:1168), FIG. 1170 (SEQ ID NO:1170), FIG. 1172 (SEQ ID NO:1172), FIG. 1174 (SEQ ID NO:1174), FIG. 1176 (SEQ ID NO:1176), FIG. 1178 (SEQ ID NO:1178), FIG. 1180 (SEQ ID NO:1180), FIG. 1182 (SEQ ID NO:1182), FIG. 1184 (SEQ ID NO:1184), FIG. 1186 (SEQ ID NO:1186), FIG. 1188 (SEQ ID NO:1188), FIG. 1190 (SEQ ID NO:1190), FIG. 1192 (SEQ ID NO:1192), FIG. 1194 (SEQ ID NO:1194), FIG. 1196 (SEQ ID NO:1196), FIG. 1198 (SEQ ID NO:1198), FIG. 1200 (SEQ ID NO:1200), FIG. 1202 (SEQ ID NO:1202), FIG. 1204 (SEQ ID NO:1204), FIG. 1206 (SEQ ID NO:1206), FIG. 1208 (SEQ ID NO:1208), FIG. 1210 (SEQ ID NO:1210), FIG. 1212 (SEQ ID NO:1212), FIG. 1214 (SEQ ID NO:1214), FIG. 1216 (SEQ ID NO:1216), FIG. 1218 (SEQ ID NO:1218), FIG. 1220 (SEQ ID NO:1220), FIG. 1222 (SEQ ID NO:1222), FIG. 1224 (SEQ ID NO:1224), FIG. 1226 (SEQ ID NO:1226), FIG. 1228 (SEQ ID NO:1228), FIG. 1230 (SEQ ID NO:1230), FIG. 1232 (SEQ ID NO:1232), FIG. 1234 (SEQ ID NO:1234), FIG. 1236 (SEQ ID NO:1236), FIG. 1238 (SEQ ID NO:1238), FIG. 1240 (SEQ ID NO:1240), FIG. 1242 (SEQ ID NO:1242), FIG. 1244 (SEQ ID NO:1244), FIG. 1246 (SEQ ID NO:1246), FIG. 1248 (SEQ ID NO:1248), FIG. 1250 (SEQ ID NO:1250), FIG. 1252 (SEQ ID NO:1252), FIG. 1254 (SEQ ID NO:1254), FIG. 1256 (SEQ ID NO:1256), FIG. 1258 (SEQ ID NO:1258), FIG. 1260 (SEQ ID NO:1260), FIG. 1262 (SEQ ID NO:1262), FIG. 1264 (SEQ ID NO:1264), FIG. 1266 (SEQ ID NO:1266), FIG. 1268 (SEQ ID NO:1268), FIG. 1270 (SEQ ID NO:1270), FIG. 1272 (SEQ ID NO:1272), FIG. 1274 (SEQ ID NO:1274), FIG. 1276 (SEQ ID NO:1276), FIG. 1278 (SEQ ID NO:1278), FIG. 1280 (SEQ ID NO:1280), FIG. 1282 (SEQ ID NO:1282), FIG. 1284 (SEQ ID NO:1284), FIG. 1286 (SEQ ID NO:1286), FIG. 1288 (SEQ ID NO:1288), FIG. 1290 (SEQ ID NO:1290), FIG. 1292 (SEQ ID NO:1292), FIG. 1294 (SEQ ID NO:1294), FIG. 1296 (SEQ ID NO:1296), FIG. 1298 (SEQ ID NO:1298), FIG. 1300 (SEQ ID NO:1300), FIG. 1302 (SEQ ID NO:1302), FIG. 1304 (SEQ ID NO:1304), FIG. 1306 (SEQ ID NO:1306), FIG. 1308 (SEQ ID NO:1308), FIG. 1310 (SEQ ID NO:1310), FIG. 1312 (SEQ ID NO:1312), FIG. 1314 (SEQ ID NO:1314), FIG. 1316 (SEQ ID NO:1316), FIG. 1318 (SEQ ID NO:1318), FIG. 1320 (SEQ ID NO:1320), FIG. 1322 (SEQ ID NO:1322), FIG. 1324 (SEQ ID NO:1324), FIG. 1326 (SEQ ID NO:1326), FIG. 1328 (SEQ ID NO:1328), FIG. 1330 (SEQ ID NO:1330), FIG. 1332 (SEQ ID NO:1332), FIG. 1334 (SEQ ID NO:1334), FIG. 1336 (SEQ ID NO:1336), FIG. 1338 (SEQ ID NO:1338), FIG. 1340 (SEQ ID NO:1340), FIG. 1342 (SEQ ID NO:1342), FIG. 1344 (SEQ ID NO:1344), FIG. 1346 (SEQ ID NO:1346), FIG. 1348 (SEQ ID NO:1348), FIG. 1350 (SEQ ID NO:1350), FIG. 1352 (SEQ ID NO:1352), FIG. 1354 (SEQ ID NO:1354), FIG. 1356 (SEQ ID NO:1356), FIG. 1358 (SEQ ID NO:1358), FIG. 1361 (SEQ ID NO:1361), FIG. 1363 (SEQ ID NO:1363), FIG. 1365 (SEQ ID NO:1365), FIG. 1367 (SEQ ID NO:1367), FIG. 1369 (SEQ ID NO:1369), FIG. 1371 (SEQ ID NO:1371), FIG. 1373 (SEQ ID NO:1373), FIG. 1375 (SEQ ID NO:1375), FIG. 1377 (SEQ ID NO:1377), FIG. 1379 (SEQ ID NO:1379), FIG. 1381 (SEQ ID NO:1381), FIG. 1383 (SEQ ID NO:1383), FIG. 1385 (SEQ ID NO:1385), FIG. 1387 (SEQ ID NO:1387), FIG. 1389 (SEQ ID NO:1389), FIG. 1391 (SEQ ID NO:1391), FIG. 1393 (SEQ ID NO:1393), FIG. 1395 (SEQ ID NO:1395), FIG. 1397 (SEQ ID NO:1397), FIG. 1399 (SEQ ID NO:1399), FIG. 1401 (SEQ ID NO:1401), FIG. 1403 (SEQ ID NO:1403), FIG. 1405 (SEQ ID NO:1405), FIG. 1407 (SEQ ID NO:1407), FIG. 1409 (SEQ ID NO:1409), FIG. 1411 (SEQ ID NO:1411), FIG. 1413 (SEQ ID NO:1413), FIG. 1415 (SEQ ID NO:1415), FIG. 1417 (SEQ ID NO:1417), FIG. 1419 (SEQ ID NO:1419), FIG. 1421 (SEQ ID NO:1421), FIG. 1423 (SEQ ID NO:1423), FIG. 1425 (SEQ ID NO:1425), FIG. 1427 (SEQ ID NO:1427), FIG. 1429 (SEQ ID NO:1429), FIG. 1431 (SEQ ID NO:1431), FIG. 1433 (SEQ ID NO:1433), FIG. 1435 (SEQ ID NO:1435), FIG. 1437 (SEQ ID NO:1437), FIG. 1439 (SEQ ID NO:1439), FIG. 1441 (SEQ ID NO:1441), FIG. 1443 (SEQ ID NO:1443), FIG. 1445 (SEQ ID NO:1445), FIG. 1447 (SEQ ID NO:1447), FIG. 1449 (SEQ ID NO:1449), FIG. 1451 (SEQ ID NO:1451), FIG. 1453 (SEQ ID NO:1453), FIG. 1455 (SEQ ID NO:1455), FIG. 1457 (SEQ ID NO:1457), FIG. 1459 (SEQ ID NO:1459), FIG. 1461 (SEQ ID NO:1461), FIG. 1463 (SEQ ID NO:1463), FIG. 1465 (SEQ ID NO:1465), FIG. 1467 (SEQ ID NO:1467), FIG. 1469 (SEQ ID NO:1469), FIG. 1471 (SEQ ID NO:1471), FIG. 1473 (SEQ ID NO:1473), FIG. 1475 (SEQ ID NO:1475), FIG. 1477 (SEQ ID NO:1477), FIG. 1479 (SEQ ID NO:1479), FIG. 1481 (SEQ ID NO:1481), FIG. 1483 (SEQ ID NO:1483), FIG. 1485 (SEQ ID NO:1485), FIG. 1487 (SEQ ID NO:1487), FIG. 1489 (SEQ ID NO:1489), FIG. 1491 (SEQ ID NO:1491), FIG. 1493 (SEQ ID NO:1493), FIG. 1495 (SEQ ID NO:1495), FIG. 1497 (SEQ ID NO:1497), FIG. 1499 (SEQ ID NO:1499), FIG. 1501 (SEQ ID NO:1501), FIG. 1503 (SEQ ID NO:1503), FIG. 1505 (SEQ ID NO:1505), FIG. 1507 (SEQ ID NO:1507), FIG. 1509 (SEQ ID NO:1509), FIG. 1511 (SEQ ID NO:1511), FIG. 1513 (SEQ ID NO:1513), FIG. 1515 (SEQ ID NO:1515), FIG. 1517 (SEQ ID NO:1517), FIG. 1519 (SEQ ID NO:1519), FIG. 1521 (SEQ ID NO:1521), FIG. 1523 (SEQ ID NO:1523), FIG. 1525 (SEQ ID NO:1525), FIG. 1527 (SEQ ID NO:1527), FIG. 1529 (SEQ ID NO:1529), FIG. 1531 (SEQ ID NO:1531), FIG. 1533 (SEQ ID NO:1533), FIG. 1535 (SEQ ID NO:1535), FIG. 1537 (SEQ ID NO:1537), FIG. 1539 (SEQ ID NO:1539), FIG. 1541 (SEQ ID NO:1541), FIG. 1543 (SEQ ID NO:1543), FIG. 1545 (SEQ ID NO:1545), FIG. 1547 (SEQ ID NO:1547), FIG. 1549 (SEQ ID NO:1549), FIG. 1551 (SEQ ID NO:1551), FIG. 1553 (SEQ ID NO:1553), FIG. 1555 (SEQ ID NO:1555), FIG. 1557 (SEQ ID NO:1557), FIG. 1559 (SEQ ID NO:1559), FIG. 1561 (SEQ ID NO:1561), FIG. 1563 (SEQ ID NO:1563), FIG. 1565 (SEQ ID NO:1565), FIG. 1567 (SEQ ID NO:1567), FIG. 1569 (SEQ ID NO:1569), FIG. 1571 (SEQ ID NO:1571), FIG. 1573 (SEQ ID NO:1573), FIG. 1575 (SEQ ID NO:1575), FIG. 1578 (SEQ ID NO:1578), FIG. 1581 (SEQ ID NO:1581), FIG. 1583 (SEQ ID NO:1583), FIG. 1585 (SEQ ID NO:1585), FIG. 1587 (SEQ ID NO:1587), FIG. 1589 (SEQ ID NO:1589), FIG. 1592 (SEQ ID NO:1592), FIG. 1594 (SEQ ID NO:1594), FIG. 1596 (SEQ ID NO:1596), FIG. 1598 (SEQ ID NO:1598), FIG. 1600 (SEQ ID NO:1600), FIG. 1602 (SEQ ID NO:1602), FIG. 1604 (SEQ ID NO:1604), FIG. 1606 (SEQ ID NO:1606), FIG. 1609 (SEQ ID NO:1609), FIG. 1611 (SEQ ID NO:1611), FIG. 1614 (SEQ ID NO:1614), FIG. 1617 (SEQ ID NO:1617), FIG. 1619 (SEQ ID NO:1619), FIG. 1621 (SEQ ID NO:1621), FIG. 1623 (SEQ ID NO:1623), FIG. 1626 (SEQ ID NO:1626), FIG. 1628 (SEQ ID NO:1628), FIG. 1630 (SEQ ID NO:1630), FIG. 1632 (SEQ ID NO:1632), FIG. 1636 (SEQ ID NO:1636), FIG. 1639 (SEQ ID NO:1639), FIG. 1644 (SEQ ID NO:1644), FIG. 1646 (SEQ ID NO:1646), FIG. 1648 (SEQ ID NO:1648), FIG. 1650 (SEQ ID NO:1650), FIG. 1652 (SEQ ID NO:1652), FIG. 1654 (SEQ ID NO:1654), FIG. 1656 (SEQ ID NO:1656), FIG. 1658 (SEQ ID NO:1658), FIG. 1660 (SEQ ID NO:1660), FIG. 1662 (SEQ ID NO:1662), FIG. 1664 (SEQ ID NO:1664), FIG. 1666 (SEQ ID NO:1666), FIG. 1668 (SEQ ID NO:1668), FIG. 1670 (SEQ ID NO:1670), FIG. 1672 (SEQ ID NO:1672), FIG. 1674 (SEQ ID NO:1674), FIG. 1676 (SEQ ID NO:1676), FIG. 1678 (SEQ ID NO:1678), FIG. 1680 (SEQ ID NO:1680), FIG. 1683 (SEQ ID NO:1683), FIG. 1685 (SEQ ID NO:1685), FIG. 1687 (SEQ ID NO:1687), FIG. 1689 (SEQ ID NO:1689), FIG. 1692 (SEQ ID NO:1692), FIG. 1694 (SEQ ID NO:1694), FIG. 1696 (SEQ ID NO:1696), FIG. 1698 (SEQ ID NO:1698), FIG. 1701 (SEQ ID NO:1701), FIG. 1703 (SEQ ID NO:1703), FIG. 1705 (SEQ ID NO:1705), FIG. 1707 (SEQ ID NO:1707), FIG. 1709 (SEQ ID NO:1709), FIG. 1711 (SEQ ID NO:1711), FIG. 1713 (SEQ ID NO:1713), FIG. 1715 (SEQ ID NO:1715), FIG. 1717 (SEQ ID NO:1717), FIG. 1719 (SEQ ID NO:1719), FIG. 1721 (SEQ ID NO:1721), FIG. 1723 (SEQ ID NO:1723), FIG. 1725 (SEQ ID NO:1725), FIG. 1727 (SEQ ID NO:1727), FIG. 1729 (SEQ ID NO:1729), FIG. 1732 (SEQ ID NO:1732), FIG. 1734 (SEQ ID NO:1734), FIG. 1736 (SEQ ID NO:1736), FIG. 1738 (SEQ ID NO:1738), FIG. 1741 (SEQ ID NO:1741), FIG. 1743 (SEQ ID NO:1743), FIG. 1745 (SEQ ID NO:1745), FIG. 1747 (SEQ ID NO:1747), FIG. 1749 (SEQ ID NO:1749), FIG. 1751 (SEQ ID NO:1751), FIG. 1753 (SEQ ID NO:1753), FIG. 1755 (SEQ ID NO:1755), FIG. 1757 (SEQ ID NO:1757), FIG. 1760 (SEQ ID NO:1760), FIG. 1762 (SEQ ID NO:1762), FIG. 1764 (SEQ ID NO:1764), FIG. 1766 (SEQ ID NO:1766), FIG. 1769 (SEQ ID NO:1769), FIG. 1771 (SEQ ID NO:1771), FIG. 1773 (SEQ ID NO:1773), FIG. 1775 (SEQ ID NO:1775), FIG. 1777 (SEQ ID NO:1777), FIG. 1779 (SEQ ID NO:1779), FIG. 1781 (SEQ ID NO:1781), FIG. 1783 (SEQ ID NO:1783), FIG. 1785 (SEQ ID NO:1785), FIG. 1787 (SEQ ID NO:1787), FIG. 1789 (SEQ ID NO:1789), FIG. 1792 (SEQ ID NO:1792), FIG. 1795 (SEQ ID NO:1795), FIG. 1797 (SEQ ID NO:1797), FIG. 1799 (SEQ ID NO:1799), FIG. 1802 (SEQ ID NO:1802), FIG. 1805 (SEQ ID NO:1805), FIG. 1807 (SEQ ID NO:1807), FIG. 1809 (SEQ ID NO:1809), FIG. 1811 (SEQ ID NO:1811), FIG. 1813 (SEQ ID NO:1813), FIG. 1815 (SEQ ID NO:1815), FIG. 1817 (SEQ ID NO:1817), FIG. 1819 (SEQ ID NO:1819), FIG. 1821 (SEQ ID NO:1821), FIG. 1823 (SEQ ID NO:1823), FIG. 1825 (SEQ ID NO:1825), FIG. 1827 (SEQ ID NO:1827), FIG. 1829 (SEQ ID NO:1829), FIG. 1831 (SEQ ID NO:1831), FIG. 1833 (SEQ ID NO:1833), FIG. 1836 (SEQ ID NO:1836), FIG. 1838 (SEQ ID NO:1838), FIG. 1841 (SEQ ID NO:1841), FIG. 1843 (SEQ ID NO:1843), FIG. 1845 (SEQ ID NO:1845), FIG. 1847 (SEQ ID NO:1847), FIG. 1849 (SEQ ID NO:1849), FIG. 1851 (SEQ ID NO:1851), FIG. 1854 (SEQ ID NO:1854), FIG. 1856 (SEQ ID NO:1856), FIG. 1858 (SEQ ID NO:1858), FIG. 1860 (SEQ ID NO:1860), FIG. 1863 (SEQ ID NO:1863), FIG. 1865 (SEQ ID NO:1865), FIG. 1867 (SEQ ID NO:1867), FIG. 1869 (SEQ ID NO:1869), FIG. 1871 (SEQ ID NO:1871), FIG. 1873 (SEQ ID NO:1873), FIG. 1875 (SEQ ID NO:1875), FIG. 1877 (SEQ ID NO:1877), FIG. 1881 (SEQ ID NO:1881), FIG. 1883 (SEQ ID NO:1883), FIG. 1885 (SEQ ID NO:1885), FIG. 1887 (SEQ ID NO:1887), FIG. 1889 (SEQ ID NO:1889), FIG. 1891 (SEQ ID NO:1891), FIG. 1893 (SEQ ID NO:1893), FIG. 1895 (SEQ ID NO:1895), FIG. 1897 (SEQ ID NO:1897), FIG. 1899 (SEQ ID NO:1899), FIG. 1901 (SEQ ID NO:1901), FIG. 1903 (SEQ ID NO:1903), FIG. 1905 (SEQ ID NO:1905), FIG. 1908 (SEQ ID NO:1908), FIG. 1910 (SEQ ID NO:1910), FIG. 1913 (SEQ ID NO:1913), FIG. 1915 (SEQ ID NO:1915), FIG. 1917 (SEQ ID NO:1917), FIG. 1919 (SEQ ID NO:1919), FIG. 1922 (SEQ ID NO:1922), FIG. 1924 (SEQ ID NO:1924), FIG. 1926 (SEQ ID NO:1926), FIG. 1928 (SEQ ID NO:1928), FIG. 1930 (SEQ ID NO:1930), FIG. 1932 (SEQ ID NO:1932), FIG. 1934 (SEQ ID NO:1934), FIG. 1936 (SEQ ID NO:1936), FIG. 1938 (SEQ ID NO:1938), FIG. 1940 (SEQ ID NO:1940), FIG. 1942 (SEQ ID NO:1942), FIG. 1944 (SEQ ID NO:1944), FIG. 1946 (SEQ ID NO:1946), FIG. 1948 (SEQ ID NO:1948), FIG. 1950 (SEQ ID NO:1950), FIG. 1952 (SEQ ID NO:1952), FIG. 1954 (SEQ ID NO:1954), FIG. 1956 (SEQ ID NO:1956), FIG. 1958 (SEQ ID NO:1958), FIG. 1960 (SEQ ID NO:1960), FIG. 1962 (SEQ ID NO:1962), FIG. 1964 (SEQ ID NO:1964), FIG. 1966 (SEQ ID NO:1966), FIG. 1968 (SEQ ID NO:1968), FIG. 1970 (SEQ ID NO:1970), FIG. 1972 (SEQ ID NO:1972), FIG. 1974 (SEQ ID NO:1974), FIG. 1976 (SEQ ID NO:1976), FIG. 1978 (SEQ ID NO:1978), FIG. 1980 (SEQ ID NO:1980), FIG. 1982 (SEQ ID NO:1982), FIG. 1984 (SEQ ID NO:1984), FIG. 1986 (SEQ ID NO:1986), FIG. 1988 (SEQ ID NO:1988), FIG. 1990 (SEQ ID NO:1990), FIG. 1992 (SEQ ID NO:1992), FIG. 1994 (SEQ ID NO:1994), FIG. 1996 (SEQ ID NO:1996), FIG. 1998 (SEQ ID NO:1998), FIG. 2000 (SEQ ID NO:2000), FIG. 2002 (SEQ ID NO:2002), FIG. 2004 (SEQ ID NO:2004), FIG. 2006 (SEQ ID NO:2006), FIG. 2008 (SEQ ID NO:2008), FIG. 2010 (SEQ ID NO:2010), FIG. 2012 (SEQ ID NO:2012), FIG. 2014 (SEQ ID NO:2014), FIG. 2016 (SEQ ID NO:2016), FIG. 2018 (SEQ ID NO:2018), FIG. 2020 (SEQ ID NO:2020), FIG. 2022 (SEQ ID NO:2022), FIG. 2024 (SEQ ID NO:2024), FIG. 2026 (SEQ ID NO:2026), FIG. 2028 (SEQ ID NO:2028), FIG. 2030 (SEQ ID NO:2030), FIG. 2032 (SEQ ID NO:2032), FIG. 2034 (SEQ ID NO:2034), FIG. 2036 (SEQ ID NO:2036), FIG. 2038 (SEQ ID NO:2038), FIG. 2040 (SEQ ID NO:2040), FIG. 2042 (SEQ ID NO:2042), FIG. 2044 (SEQ ID NO:2044), FIG. 2046 (SEQ ID NO:2046), FIG. 2048 (SEQ ID NO:2048), FIG. 2050 (SEQ ID NO:2050), FIG. 2052 (SEQ ID NO:2052), FIG. 2054 (SEQ ID NO:2054), FIG. 2056 (SEQ ID NO:2056), FIG. 2058 (SEQ ID NO:2058), FIG. 2060 (SEQ ID NO:2060), FIG. 2062 (SEQ ID NO:2062), FIG. 2064 (SEQ ID NO:2064), FIG. 2066 (SEQ ID NO:2066), FIG. 2068 (SEQ ID NO:2068), FIG. 2070 (SEQ ID NO:2070), FIG. 2072 (SEQ ID NO:2072), FIG. 2074 (SEQ ID NO:2074), FIG. 2076 (SEQ ID NO:2076), FIG. 2078 (SEQ ID NO:2078), FIG. 2080 (SEQ ID NO:2080), FIG. 2082 (SEQ ID NO:2082), FIG. 2084 (SEQ ID NO:2084), FIG. 2086 (SEQ ID NO:2086), FIG. 2088 (SEQ ID NO:2088), FIG. 2090 (SEQ ID NO:2090), FIG. 2092 (SEQ ID NO:2092), FIG. 2094 (SEQ ID NO:2094), FIG. 2096 (SEQ ID NO:2096), FIG. 2098 (SEQ ID NO:2098), FIG. 2100 (SEQ ID NO:2100), FIG. 2102 (SEQ ID NO:2102), FIG. 2104 (SEQ ID NO:2104), FIG. 2106 (SEQ ID NO:2106), FIG. 2108 (SEQ ID NO:2108), FIG. 2110 (SEQ ID NO:2110), FIG. 2112 (SEQ ID NO:2112), FIG. 2114 (SEQ ID NO:2114), FIG. 2116 (SEQ ID NO:2116), FIG. 2118 (SEQ ID NO:2118), FIG. 2120 (SEQ ID NO:2120), FIG. 2122 (SEQ ID NO:2122), FIG. 2124 (SEQ ID NO:2124), FIG. 2126 (SEQ ID NO:2126), FIG. 2128 (SEQ ID NO:2128), FIG. 2130 (SEQ ID NO:2130), FIG. 2132 (SEQ ID NO:2132), FIG. 2134 (SEQ ID NO:2134), FIG. 2136 (SEQ ID NO:2136), FIG. 2138 (SEQ ID NO:2138), FIG. 2140 (SEQ ID NO:2140), FIG. 2142 (SEQ ID NO:2142), FIG. 2144 (SEQ ID NO:2144), FIG. 2146 (SEQ ID NO:2146), FIG. 2148 (SEQ ID NO:2148), FIG. 2150 (SEQ ID NO:2150), FIG. 2152 (SEQ ID NO:2152), FIG. 2154 (SEQ ID NO:2154), FIG. 2156 (SEQ ID NO:2156), FIG. 2158 (SEQ ID NO:2158), FIG. 2160 (SEQ ID NO:2160), FIG. 2163 (SEQ ID NO:2163), FIG. 2165 (SEQ ID NO:2165), FIG. 2167 (SEQ ID NO:2167), FIG. 2170 (SEQ ID NO:2170), FIG. 2172 (SEQ ID NO:2172), FIG. 2174 (SEQ ID NO:2174), FIG. 2176 (SEQ ID NO:2176), FIG. 2178 (SEQ ID NO:2178), FIG. 2180 (SEQ ID NO:2180), FIG. 2182 (SEQ ID NO:2182), FIG. 2184 (SEQ ID NO:2184), FIG. 2186 (SEQ ID NO:2186), FIG. 2188 (SEQ ID NO:2188), FIG. 2191 (SEQ ID NO:2191), FIG. 2193 (SEQ ID NO:2193), FIG. 2195 (SEQ ID NO:2195), FIG. 2197 (SEQ ID NO:2197), FIG. 2199 (SEQ ID NO:2199), FIG. 2201 (SEQ ID NO:2201), FIG. 2204 (SEQ ID NO:2204), FIG. 2207 (SEQ ID NO:2207), FIG. 2209 (SEQ ID NO:2209), FIG. 2212 (SEQ ID NO:2212), FIG. 2214 (SEQ ID NO:2214), FIG. 2216 (SEQ ID NO:2216), FIG. 2218 (SEQ ID NO:2218), FIG. 2220 (SEQ ID NO:2220), FIG. 2222 (SEQ ID NO:2222), FIG. 2224 (SEQ ID NO:2224), FIG. 2226 (SEQ ID NO:2226), FIG. 2228 (SEQ ID NO:2228), FIG. 2230 (SEQ ID NO:2230), FIG. 2232 (SEQ ID NO:2232), FIG. 2234 (SEQ ID NO:2234), FIG. 2236 (SEQ ID NO:2236), FIG. 2238 (SEQ ID NO:2238), FIG. 2240 (SEQ ID NO:2240), FIG. 2242 (SEQ ID NO:2242), FIG. 2244 (SEQ ID NO:2244), FIG. 2246 (SEQ ID NO:2246), FIG. 2248 (SEQ ID NO:2248), FIG. 2250 (SEQ ID NO:2250), FIG. 2252 (SEQ ID NO:2252), FIG. 2254 (SEQ ID NO:2254), FIG. 2256 (SEQ ID NO:2256), FIG. 2258 (SEQ ID NO:2258), FIG. 2260 (SEQ ID NO:2260), FIG. 2262 (SEQ ID NO:2262), FIG. 2264 (SEQ ID NO:2264), FIG. 2266 (SEQ ID NO:2266), FIG. 2268 (SEQ ID NO:2268), FIG. 2270 (SEQ ID NO:2270), FIG. 2272 (SEQ ID NO:2272), FIG. 2274 (SEQ ID NO:2274), FIG. 2276 (SEQ ID NO:2276), FIG. 2278 (SEQ ID NO:2278), FIG. 2280 (SEQ ID NO:2280), FIG. 2282 (SEQ ID NO:2282), FIG. 2284 (SEQ ID NO:2284), FIG. 2286 (SEQ ID NO:2286), FIG. 2288 (SEQ ID NO:2288), FIG. 2290 (SEQ ID NO:2290), FIG. 2292 (SEQ ID NO:2292), FIG. 2294 (SEQ ID NO:2294), FIG. 2296 (SEQ ID NO:2296), FIG. 2298 (SEQ ID NO:2298), FIG. 2301 (SEQ ID NO:2301), FIG. 2303 (SEQ ID NO:2303), FIG. 2305 (SEQ ID NO:2305), FIG. 2307 (SEQ ID NO:2307), FIG. 2310 (SEQ ID NO:2310), FIG. 2312 (SEQ ID NO:2312), FIG. 2314 (SEQ ID NO:2314), FIG. 2316 (SEQ ID NO:2316), FIG. 2319 (SEQ ID NO:2319), FIG. 2321 (SEQ ID NO:2321), FIG. 2323 (SEQ ID NO:2323), FIG. 2325 (SEQ ID NO:2325), FIG. 2327 (SEQ ID NO:2327), FIG. 2329 (SEQ ID NO:2329), FIG. 2331 (SEQ ID NO:2331), FIG. 2333 (SEQ ID NO:2333), FIG. 2335 (SEQ ID NO:2335), FIG. 2337 (SEQ ID NO:2337), FIG. 2339 (SEQ ID NO:2339), FIG. 2341 (SEQ ID NO:2341), FIG. 2343 (SEQ ID NO:2343), FIG. 2345 (SEQ ID NO:2345), FIG. 2347 (SEQ ID NO:2347), FIG. 2349 (SEQ ID NO:2349), FIG. 2351 (SEQ ID NO:2351), FIG. 2353 (SEQ ID NO:2353), FIG. 2355 (SEQ ID NO:2355), FIG. 2357 (SEQ ID NO:2357), FIG. 2359 (SEQ ID NO:2359), FIG. 2361 (SEQ ID NO:2361), FIG. 2363 (SEQ ID NO:2363), FIG. 2365 (SEQ ID NO:2365), FIG. 2367 (SEQ ID NO:2367), FIG. 2369 (SEQ ID NO:2369), FIG. 2371 (SEQ ID NO:2371), FIG. 2373 (SEQ ID NO:2373), FIG. 2375 (SEQ ID NO:2375), FIG. 2378 (SEQ ID NO:2378), FIG. 2380 (SEQ ID NO:2380), FIG. 2383 (SEQ ID NO:2383), FIG. 2386 (SEQ ID NO:2386), FIG. 2388 (SEQ ID NO:2388), FIG. 2391 (SEQ ID NO:2391), FIG. 2393 (SEQ ID NO:2393), FIG. 2396 (SEQ ID NO:2396), FIG. 2398 (SEQ ID NO:2398), FIG. 2402 (SEQ ID NO:2402), FIG. 2404 (SEQ ID NO:2404), FIG. 2408 (SEQ ID NO:2408), FIG. 2410 (SEQ ID NO:2410), FIG. 2412 (SEQ ID NO:2412), FIG. 2415 (SEQ ID NO:2415), FIG. 2418 (SEQ ID NO:2418), FIG. 2420 (SEQ ID NO:2420), FIG. 2422 (SEQ ID NO:2422), FIG. 2424 (SEQ ID NO:2424), FIG. 2426 (SEQ ID NO:2426), FIG. 2430 (SEQ ID NO:2430), FIG. 2432 (SEQ ID NO:2432), FIG. 2434 (SEQ ID NO:2434), FIG. 2436 (SEQ ID NO:2436), FIG. 2438 (SEQ ID NO:2438), FIG. 2440 (SEQ ID NO:2440), or FIG. 2442 (SEQ ID NO:2442) anti-PRO antibody with a test sample of tissue cells obtained from said mammal and (b) detecting the formation of a complex between the antibody and the polypeptide in the test sample, wherein formation of said complex is indicative of the presence of an immune related disease in the mammal from which the test tissue cells were obtained.

23. A method of identifying a compound that inhibits the activity of a PRO polypeptide of the invention as described in FIG. 2 (SEQ ID NO:2), FIG. 4 (SEQ ID NO:4), FIG. 6 (SEQ ID NO:6), FIG. 8 (SEQ ID NO:8), FIG. 10 (SEQ ID NO:10), FIG. 12 (SEQ ID NO:12), FIG. 14 (SEQ ID NO:14), FIG. 16 (SEQ ID NO:16), FIG. 18 (SEQ ID NO:18), FIG. 20 (SEQ ID NO:20), FIG. 22 (SEQ ID NO:22), FIG. 24 (SEQ ID NO:24), FIG. 26 (SEQ ID NO:26), FIG. 28 (SEQ ID NO:28), FIG. 30 (SEQ ID NO:30), FIG. 32 (SEQ ID NO:32), FIG. 34 (SEQ ID NO:34), FIG. 36 (SEQ ID NO:36), FIG. 38 (SEQ ID NO:38), FIG. 40 (SEQ ID NO:40), FIG. 42 (SEQ ID NO:42), FIG. 44 (SEQ ID NO:44), FIG. 46 (SEQ ID NO:46), FIG. 48 (SEQ ID NO:48), FIG. 50 (SEQ ID NO:50), FIG. 52 (SEQ ID NO:52), FIG. 54 (SEQ ID NO:54), FIG. 56 (SEQ ID NO:56), FIG. 58 (SEQ ID NO:58), FIG. 60 (SEQ ID NO:60), FIG. 62 (SEQ ID NO:62), FIG. 64 (SEQ ID NO:64), FIG. 66 (SEQ ID NO:66), FIG. 68 (SEQ ID NO:68), FIG. 70 (SEQ ID NO:70), FIG. 72 (SEQ ID NO:72), FIG. 74 (SEQ ID NO:74), FIG. 76 (SEQ ID NO:76), FIG. 78 (SEQ ID NO:78), FIG. 80 (SEQ ID NO:80), FIG. 82 (SEQ ID NO:82), FIG. 84 (SEQ ID NO:84), FIG. 86 (SEQ ID NO:86), FIG. 88 (SEQ ID NO:88), FIG. 90 (SEQ ID NO:90), FIG. 92 (SEQ ID NO:92), FIG. 94 (SEQ ID NO:94), FIG. 96 (SEQ ID NO:96), FIG. 98 (SEQ ID NO:98), FIG. 100 (SEQ ID NO:100), FIG. 102 (SEQ ID NO:102), FIG. 104 (SEQ ID NO:104), FIG. 106 (SEQ ID NO:106), FIG. 108 (SEQ ID NO:108), FIG. 110 (SEQ ID NO:110), FIG. 112 (SEQ ID NO:112), FIG. 114 (SEQ ID NO:114), FIG. 116 (SEQ ID NO:116), FIG. 118 (SEQ ID NO:118), FIG. 121 (SEQ ID NO:121), FIG. 123 (SEQ ID NO:123), FIG. 125 (SEQ ID NO:125), FIG. 127 (SEQ ID NO:127), FIG. 129 (SEQ ID NO:129), FIG. 131 (SEQ ID NO:131), FIG. 133 (SEQ ID NO:133), FIG. 135 (SEQ ID NO:135), FIG. 137 (SEQ ID NO:137), FIG. 139 (SEQ ID NO:139), FIG. 141 (SEQ ID NO:141), FIG. 143 (SEQ ID NO:143), FIG. 145 (SEQ ID NO:145), FIG. 147 (SEQ ID NO:147), FIG. 149 (SEQ ID NO:149), FIG. 151 (SEQ ID NO:151), FIG. 153 (SEQ ID NO:153), FIG. 155 (SEQ ID NO:155), FIG. 157 (SEQ ID NO:157), FIG. 159 (SEQ ID NO:159), FIG. 161 (SEQ ID NO:161), FIG. 163 (SEQ ID NO:163), FIG. 165 (SEQ ID NO:165), FIG. 167 (SEQ ID NO:167), FIG. 169 (SEQ ID NO:169), FIG. 171 (SEQ ID NO:171), FIG. 173 (SEQ ID NO:173), FIG. 175 (SEQ ID NO:175), FIG. 177 (SEQ ID NO:177), FIG. 179 (SEQ ID NO:179), FIG. 181 (SEQ ID NO:181), FIG. 183 (SEQ ID NO:183), FIG. 185 (SEQ ID NO:185), FIG. 187 (SEQ ID NO:187), FIG. 189 (SEQ ID NO:189), FIG. 191 (SEQ ID NO:191), FIG. 193 (SEQ ID NO:193), FIG. 195 (SEQ ID NO:195), FIG. 197 (SEQ ID NO:197), FIG. 199 (SEQ ID NO:199), FIG. 201 (SEQ ID NO:201), FIG. 203 (SEQ ID NO:203), FIG. 205 (SEQ ID NO:205), FIG. 207 (SEQ ID NO:207), FIG. 209 (SEQ ID NO:209), FIG. 211 (SEQ ID NO:211), FIG. 213 (SEQ ID NO:213), FIG. 215 (SEQ ID NO:215), FIG. 217 (SEQ ID NO:217), FIG. 219 (SEQ ID NO:219), FIG. 221 (SEQ ID NO:221), FIG. 223 (SEQ ID NO:223), FIG. 225 (SEQ ID NO:225), FIG. 227 (SEQ ID NO:227), FIG. 229 (SEQ ID NO:229), FIG. 231 (SEQ ID NO:231), FIG. 233 (SEQ ID NO:233), FIG. 235 (SEQ ID NO:235), FIG. 237 (SEQ ID NO:237), FIG. 239 (SEQ ID NO:239), FIG. 241 (SEQ ID NO:241), FIG. 243 (SEQ ID NO:243), FIG. 245 (SEQ ID NO:245), FIG. 247 (SEQ ID NO:247), FIG. 249 (SEQ ID NO:249), FIG. 251 (SEQ ID NO:251), FIG. 254 (SEQ ID NO:254), FIG. 256 (SEQ ID NO:256), FIG. 258 (SEQ ID NO:258), FIG. 260 (SEQ ID NO:260), FIG. 262 (SEQ ID NO:262), FIG. 264 (SEQ ID NO:264), FIG. 266 (SEQ ID NO:266), FIG. 268 (SEQ ID NO:268), FIG. 270 (SEQ ID NO:270), FIG. 272 (SEQ ID NO:272), FIG. 274 (SEQ ID NO:274), FIG. 276 (SEQ ID NO:276), FIG. 278 (SEQ ID NO:278), FIG. 280 (SEQ ID NO:280), FIG. 282 (SEQ ID NO:282), FIG. 284 (SEQ ID NO:284), FIG. 286 (SEQ ID NO:286), FIG. 288 (SEQ ID NO:288), FIG. 290 (SEQ ID NO:290), FIG. 292 (SEQ ID NO:292), FIG. 294 (SEQ ID NO:294), FIG. 296 (SEQ ID NO:296), FIG. 298 (SEQ ID NO:298), FIG. 300 (SEQ ID NO:300), FIG. 302 (SEQ ID NO:302), FIG. 304 (SEQ ID NO:304), FIG. 306 (SEQ ID NO:306), FIG. 308 (SEQ ID NO:308), FIG. 310 (SEQ ID NO:310), FIG. 312 (SEQ ID NO:312), FIG. 314 (SEQ ID NO:314), FIG. 316 (SEQ ID NO:316), FIG. 318 (SEQ ID NO:318), FIG. 320 (SEQ ID NO:320), FIG. 322 (SEQ ID NO:322), FIG. 324 (SEQ ID NO:324), FIG. 326 (SEQ ID NO:326), FIG. 328 (SEQ ID NO:328), FIG. 330 (SEQ ID NO:330), FIG. 332 (SEQ ID NO:332), FIG. 334 (SEQ ID NO:334), FIG. 336 (SEQ ID NO:336), FIG. 338 (SEQ ID NO:338), FIG. 340 (SEQ ID NO:340), FIG. 342 (SEQ ID NO:342), FIG. 344 (SEQ ID NO:344), FIG. 346 (SEQ ID NO:346), FIG. 348 (SEQ ID NO:348), FIG. 350 (SEQ ID NO:350), FIG. 352 (SEQ ID NO:352), FIG. 354 (SEQ ID NO:354), FIG. 356 (SEQ ID NO:356), FIG. 358 (SEQ ID NO:358), FIG. 360 (SEQ ID NO:360), FIG. 362 (SEQ ID NO:362), FIG. 364 (SEQ ID NO:364), FIG. 366 (SEQ ID NO:366), FIG. 368 (SEQ ID NO:368), FIG. 370 (SEQ ID NO:370), FIG. 372 (SEQ ID NO:372), FIG. 374 (SEQ ID NO:374), FIG. 376 (SEQ ID NO:376), FIG. 378 (SEQ ID NO:378), FIG. 380 (SEQ ID NO:380), FIG. 382 (SEQ ID NO:382), FIG. 384 (SEQ ID NO:384), FIG. 386 (SEQ ID NO:386), FIG. 388 (SEQ ID NO:388), FIG. 390 (SEQ ID NO:390), FIG. 392 (SEQ ID NO:392), FIG. 394 (SEQ ID NO:394), FIG. 396 (SEQ ID NO:396), FIG. 398 (SEQ ID NO:398), FIG. 400 (SEQ ID NO:400), FIG. 402 (SEQ ID NO:402), FIG. 404 (SEQ ID NO:404), FIG. 406 (SEQ ID NO:406), FIG. 408 (SEQ ID NO:408), FIG. 410 (SEQ ID NO:410), FIG. 412 (SEQ ID NO:412), FIG. 414 (SEQ ID NO:414), FIG. 416 (SEQ ID NO:416), FIG. 418 (SEQ ID NO:418), FIG. 420 (SEQ ID NO:420), FIG. 422 (SEQ ID NO:422), FIG. 424 (SEQ ID NO:424), FIG. 426 (SEQ ID NO:426), FIG. 428 (SEQ ID NO:428), FIG. 430 (SEQ ID NO:430), FIG. 432 (SEQ ID NO:432), FIG. 434 (SEQ ID NO:434), FIG. 436 (SEQ ID NO:436), FIG. 438 (SEQ ID NO:438), FIG. 440 (SEQ ID NO:440), FIG. 442 (SEQ ID NO:442), FIG. 444 (SEQ ID NO:444), FIG. 446 (SEQ ID NO:446), FIG. 448 (SEQ ID NO:448), FIG. 450 (SEQ ID NO:450), FIG. 452 (SEQ ID NO:452), FIG. 454 (SEQ ID NO:454), FIG. 456 (SEQ ID NO:456), FIG. 458 (SEQ ID NO:458), FIG. 460 (SEQ ID NO:460), FIG. 462 (SEQ ID NO:462), FIG. 464 (SEQ ID NO:464), FIG. 466 (SEQ ID NO:466), FIG. 468 (SEQ ID NO:468), FIG. 470 (SEQ ID NO:470), FIG. 472 (SEQ ID NO:472), FIG. 474 (SEQ ID NO:474), FIG. 476 (SEQ ID NO:476), FIG. 478 (SEQ ID NO:478), FIG. 480 (SEQ ID NO:480), FIG. 482 (SEQ ID NO:482), FIG. 484 (SEQ ID NO:484), FIG. 486 (SEQ ID NO:486), FIG. 488 (SEQ ID NO:488), FIG. 490 (SEQ ID NO:490), FIG. 492 (SEQ ID NO:492), FIG. 494 (SEQ ID NO:494), FIG. 496 (SEQ ID NO:496), FIG. 498 (SEQ ID NO:498), FIG. 500 (SEQ ID NO:500), FIG. 502 (SEQ ID NO:502), FIG. 504 (SEQ ID NO:504), FIG. 506 (SEQ ID NO:506), FIG. 508 (SEQ ID NO:508), FIG. 510 (SEQ ID NO:510), FIG. 512 (SEQ ID NO:512), FIG. 514 (SEQ ID NO:514), FIG. 516 (SEQ ID NO:516), FIG. 518 (SEQ ID NO:518), FIG. 520 (SEQ ID NO:520), FIG. 522 (SEQ ID NO:522), FIG. 524 (SEQ ID NO:524), FIG. 526 (SEQ ID NO:526), FIG. 528 (SEQ ID NO:528), FIG. 530 (SEQ ID NO:530), FIG. 532 (SEQ ID NO:532), FIG. 534 (SEQ ID NO:534), FIG. 536 (SEQ ID NO:536), FIG. 538 (SEQ ID NO:538), FIG. 540 (SEQ ID NO:540), FIG. 542 (SEQ ID NO:542), FIG. 544 (SEQ ID NO:544), FIG. 546 (SEQ ID NO:546), FIG. 549 (SEQ ID NO:549), FIG. 551 (SEQ ID NO:551), FIG. 553 (SEQ ID NO:553), FIG. 555 (SEQ ID NO:555), FIG. 557 (SEQ ID NO:557), FIG. 559 (SEQ ID NO:559), FIG. 561 (SEQ ID NO:561), FIG. 563 (SEQ ID NO:563), FIG. 565 (SEQ ID NO:565), FIG. 567 (SEQ ID NO:567), FIG. 569 (SEQ ID NO:569), FIG. 571 (SEQ ID NO:571), FIG. 573 (SEQ ID NO:573), FIG. 575 (SEQ ID NO:575), FIG. 577 (SEQ ID NO:577), FIG. 579 (SEQ ID NO:579), FIG. 581 (SEQ ID NO:581), FIG. 583 (SEQ ID NO:583), FIG. 585 (SEQ ID NO:585), FIG. 587 (SEQ ID NO:587), FIG. 589 (SEQ ID NO:589), FIG. 591 (SEQ ID NO:591), FIG. 593 (SEQ ID NO:593), FIG. 595 (SEQ ID NO:595), FIG. 597 (SEQ ID NO:597), FIG. 599 (SEQ ID NO:599), FIG. 601 (SEQ ID NO:601), FIG. 603 (SEQ ID NO:603), FIG. 605 (SEQ ID NO:605), FIG. 607 (SEQ ID NO:607), FIG. 609 (SEQ ID NO:609), FIG. 611 (SEQ ID NO:611), FIG. 613 (SEQ ID NO:613), FIG. 615 (SEQ ID NO:615), FIG. 617 (SEQ ID NO:617), FIG. 619 (SEQ ID NO:619), FIG. 621 (SEQ ID NO:621), FIG. 623 (SEQ ID NO:623), FIG. 625 (SEQ ID NO:625), FIG. 627 (SEQ ID NO:627), FIG. 629 (SEQ ID NO:629), FIG. 631 (SEQ ID NO:631), FIG. 633 (SEQ ID NO:633), FIG. 635 (SEQ ID NO:635), FIG. 637 (SEQ ID NO:637), FIG. 639 (SEQ ID NO:639), FIG. 641 (SEQ ID NO:641), FIG. 643 (SEQ ID NO:643), FIG. 645 (SEQ ID NO:645), FIG. 647 (SEQ ID NO:647), FIG. 649 (SEQ ID NO:649), FIG. 651 (SEQ ID NO:651), FIG. 653 (SEQ ID NO:653), FIG. 655 (SEQ ID NO:655), FIG. 657 (SEQ ID NO:657), FIG. 659 (SEQ ID NO:659), FIG. 661 (SEQ ID NO:661), FIG. 663 (SEQ ID NO:663), FIG. 665 (SEQ ID NO:665), FIG. 667 (SEQ ID NO:667), FIG. 669 (SEQ ID NO:669), FIG. 671 (SEQ ID NO:671), FIG. 673 (SEQ ID NO:673), FIG. 675 (SEQ ID NO:675), FIG. 677 (SEQ ID NO:377), FIG. 679 (SEQ ID NO:679), FIG. 681 (SEQ ID NO:681), FIG. 683 (SEQ ID NO:683), FIG. 685 (SEQ ID NO:685), FIG. 687 (SEQ ID NO:687), FIG. 689 (SEQ ID NO:689), FIG. 691 (SEQ ID NO:691), FIG. 693 (SEQ ID NO:693), FIG. 695 (SEQ ID NO:695), FIG. 697 (SEQ ID NO:697), FIG. 699 (SEQ ID NO:699), FIG. 701 (SEQ ID NO:701), FIG. 703 (SEQ ID NO:703), FIG. 705 (SEQ ID NO:705), FIG. 707 (SEQ ID NO:707), FIG. 709 (SEQ ID NO:709), FIG. 711 (SEQ ID NO:711), FIG. 713 (SEQ ID NO:713), FIG. 715 (SEQ ID NO:715), FIG. 717 (SEQ ID NO:717), FIG. 719 (SEQ ID NO:719), FIG. 721 (SEQ ID NO:721), FIG. 723 (SEQ ID NO:723), FIG. 725 (SEQ ID NO:725), FIG. 727 (SEQ ID NO:727), FIG. 729 (SEQ ID NO:729), FIG. 731 (SEQ ID NO:731), FIG. 733 (SEQ ID NO:733), FIG. 735 (SEQ ID NO:735), FIG. 737 (SEQ ID NO:737), FIG. 739 (SEQ ID NO:739), FIG. 741 (SEQ ID NO:741), FIG. 743 (SEQ ID NO:743), FIG. 745 (SEQ ID NO:745), FIG. 747 (SEQ ID NO:747), FIG. 749 (SEQ ID NO:749), FIG. 751 (SEQ ID NO:751), FIG. 753 (SEQ ID NO:753), FIG. 755 (SEQ ID NO:755), FIG. 757 (SEQ ID NO:757), FIG. 759 (SEQ ID NO:759), FIG. 761 (SEQ ID NO:761), FIG. 763 (SEQ ID NO:763), FIG. 765 (SEQ ID NO:765), FIG. 767 (SEQ ID NO:767), FIG. 769 (SEQ ID NO:769), FIG. 771 (SEQ ID NO:771), FIG. 773 (SEQ ID NO:773), FIG. 775 (SEQ ID NO:775), FIG. 777 (SEQ ID NO:777), FIG. 779 (SEQ ID NO:779), FIG. 781 (SEQ ID NO:781), FIG. 783 (SEQ ID NO:783), FIG. 785 (SEQ ID NO:785), FIG. 787 (SEQ ID NO:787), FIG. 789 (SEQ ID NO:789), FIG. 791 (SEQ ID NO:791), FIG. 793 (SEQ ID NO:793), FIG. 795 (SEQ ID NO:795), FIG. 797 (SEQ ID NO:797), FIG. 799 (SEQ ID NO:799), FIG. 801 (SEQ ID NO:801), FIG. 803 (SEQ ID NO:803), FIG. 805 (SEQ ID NO:805), FIG. 807 (SEQ ID NO:807), FIG. 809 (SEQ ID NO:809), FIG. 811 (SEQ ID NO:811), FIG. 813 (SEQ ID NO:813), FIG. 815 (SEQ ID NO:815), FIG. 817 (SEQ ID NO:817), FIG. 819 (SEQ ID NO:819), FIG. 821 (SEQ ID NO:821), FIG. 823 (SEQ ID NO:823), FIG. 825 (SEQ ID NO:825), FIG. 827 (SEQ ID NO:827), FIG. 829 (SEQ ID NO:829), FIG. 831 (SEQ ID NO:831), FIG. 833 (SEQ ID NO:833), FIG. 835 (SEQ ID NO:835), FIG. 837 (SEQ ID NO:837), FIG. 839 (SEQ ID NO:839), FIG. 841 (SEQ ID NO:841), FIG. 843 (SEQ ID NO:843), FIG. 845 (SEQ ID NO:845), FIG. 847 (SEQ ID NO:847), FIG. 849 (SEQ ID NO:849), FIG. 851 (SEQ ID NO:851), FIG. 853 (SEQ ID NO:853), FIG. 855 (SEQ ID NO:855), FIG. 858 (SEQ ID NO:858), FIG. 860 (SEQ ID NO:860), FIG. 862 (SEQ ID NO:862), FIG. 864 (SEQ ID NO:864), FIG. 866 (SEQ ID NO:866), FIG. 868 (SEQ ID NO:868), FIG. 870 (SEQ ID NO:870), FIG. 872 (SEQ ID NO:872), FIG. 874 (SEQ ID NO:874), FIG. 876 (SEQ ID NO:876), FIG. 878 (SEQ ID NO:878), FIG. 880 (SEQ ID NO:880), FIG. 882 (SEQ ID NO:882), FIG. 884 (SEQ ID NO:884), FIG. 886 (SEQ ID NO:886), FIG. 888 (SEQ ID NO:888), FIG. 890 (SEQ ID NO:890), FIG. 892 (SEQ ID NO:892), FIG. 894 (SEQ ID NO:894), FIG. 896 (SEQ ID NO:896), FIG. 898 (SEQ ID NO:898), FIG. 900 (SEQ ID NO:900), FIG. 902 (SEQ ID NO:902), FIG. 904 (SEQ ID NO:904), FIG. 906 (SEQ ID NO:906), FIG. 908 (SEQ ID NO:908), FIG. 910 (SEQ ID NO:910), FIG. 912 (SEQ ID NO:912), FIG. 914 (SEQ ID NO:914), FIG. 916 (SEQ ID NO:916), FIG. 918 (SEQ ID NO:918), FIG. 920 (SEQ ID NO:920), FIG. 922 (SEQ ID NO:922), FIG. 924 (SEQ ID NO:924), FIG. 926 (SEQ ID NO:926), FIG. 928 (SEQ ID NO:928), FIG. 930 (SEQ ID NO:930), FIG. 932 (SEQ ID NO:932), FIG. 934 (SEQ ID NO:934), FIG. 936 (SEQ ID NO:936), FIG. 938 (SEQ ID NO:938), FIG. 940 (SEQ ID NO:940), FIG. 943 (SEQ ID NO:943), FIG. 945 (SEQ ID NO:945), FIG. 947 (SEQ ID NO:947), FIG. 949 (SEQ ID NO:949), FIG. 951 (SEQ ID NO:951), FIG. 953 (SEQ ID NO:953), FIG. 955 (SEQ ID NO:955), FIG. 958 (SEQ ID NO:958), FIG. 960 (SEQ ID NO:960), FIG. 963 (SEQ ID NO:963), FIG. 965 (SEQ ID NO:965), FIG. 968 (SEQ ID NO:968), FIG. 970 (SEQ ID NO:970), FIG. 972 (SEQ ID NO:972), FIG. 974 (SEQ ID NO:974), FIG. 976 (SEQ ID NO:976), FIG. 978 (SEQ ID NO:978), FIG. 980 (SEQ ID NO:980), FIG. 983 (SEQ ID NO:983), FIG. 985 (SEQ ID NO:985), FIG. 987 (SEQ ID NO:987), FIG. 990 (SEQ ID NO:990), FIG. 992 (SEQ ID NO:992), FIG. 994 (SEQ ID NO:994), FIG. 996 (SEQ ID NO:996), FIG. 998 (SEQ ID NO:998), FIG. 1000 (SEQ ID NO:1000), FIG. 1002 (SEQ ID NO:1002), FIG. 1007 (SEQ ID NO:1007), FIG. 1009 (SEQ ID NO:1009), FIG. 1011 (SEQ ID NO:1011), FIG. 1013 (SEQ ID NO:1013), FIG. 1015 (SEQ ID NO:1015), FIG. 1017 (SEQ ID NO:1017), FIG. 1019 (SEQ ID NO:1019), FIG. 1021 (SEQ ID NO:1021), FIG. 1023 (SEQ ID NO:1023), FIG. 1025 (SEQ ID NO:1025), FIG. 1030 (SEQ ID NO:1030), FIG. 1033 (SEQ ID NO:1033), FIG. 1035 (SEQ ID NO:1035), FIG. 1037 (SEQ ID NO:1037), FIG. 1039 (SEQ ID NO:1039), FIG. 1041 (SEQ ID NO:1041), FIG. 1043 (SEQ ID NO:1043), FIG. 1046 (SEQ ID NO:1046), FIG. 1048 (SEQ ID NO:1048), FIG. 1050 (SEQ ID NO:1050), FIG. 1053 (SEQ ID NO:1053), FIG. 1055 (SEQ ID NO:1055), FIG. 1057 (SEQ ID NO:1057), FIG. 1060 (SEQ ID NO:1060), FIG. 1062 (SEQ ID NO:1062), FIG. 1064 (SEQ ID NO:1064), FIG. 1066 (SEQ ID NO:1066), FIG. 1068 (SEQ ID NO:1068), FIG. 1070 (SEQ ID NO:1070), FIG. 1072 (SEQ ID NO:1072), FIG. 1074 (SEQ ID NO:1074), FIG. 1076 (SEQ ID NO:1076), FIG. 1078 (SEQ ID NO:1078), FIG. 1080 (SEQ ID NO:1080), FIG. 1082 (SEQ ID NO:1082), FIG. 1084 (SEQ ID NO:1084), FIG. 1086 (SEQ ID NO:1086), FIG. 1088 (SEQ ID NO:1088), FIG. 1090 (SEQ ID NO:1090), FIG. 1092 (SEQ ID NO:1092), FIG. 1094 (SEQ ID NO:1094), FIG. 1096 (SEQ ID NO:1096), FIG. 1098 (SEQ ID NO:1098), FIG. 1101 (SEQ ID NO:1101), FIG. 1103 (SEQ ID NO:1103), FIG. 1105 (SEQ ID NO:1105), FIG. 1107 (SEQ ID NO:1107), FIG. 1109 (SEQ ID NO:1109), FIG. 1111 (SEQ ID NO:1111), FIG. 1113 (SEQ ID NO:1113), FIG. 1116 (SEQ ID NO:1116), FIG. 1118 (SEQ ID NO:1118), FIG. 1120 (SEQ ID NO:1120), FIG. 1123 (SEQ ID NO:1123), FIG. 1125 (SEQ ID NO:1125), FIG. 1128 (SEQ ID NO:1128), FIG. 1130 (SEQ ID NO:1130), FIG. 1132 (SEQ ID NO:1132), FIG. 1134 (SEQ ID NO:1134), FIG. 1136 (SEQ ID NO:1136), FIG. 1138 (SEQ ID NO:1138), FIG. 1142 (SEQ ID NO:1142), FIG. 1144 (SEQ ID NO:1144), FIG. 1146 (SEQ ID NO:1146), FIG. 1148 (SEQ ID NO:1148), FIG. 1150 (SEQ ID NO:1150), FIG. 1152 (SEQ ID NO:1152), FIG. 1154 (SEQ ID NO:1154), FIG. 1156 (SEQ ID NO:1156), FIG. 1158 (SEQ ID NO:1158), FIG. 1160 (SEQ ID NO:1160), FIG. 1162 (SEQ ID NO:1162), FIG. 1164 (SEQ ID NO:1164), FIG. 1166 (SEQ ID NO:1166), FIG. 1168 (SEQ ID NO:1168), FIG. 1170 (SEQ ID NO:1170), FIG. 1172 (SEQ ID NO:1172), FIG. 1174 (SEQ ID NO:1174), FIG. 1176 (SEQ ID NO:1176), FIG. 1178 (SEQ ID NO:1178), FIG. 1180 (SEQ ID NO:1180), FIG. 1182 (SEQ ID NO:1182), FIG. 1184 (SEQ ID NO:1184), FIG. 1186 (SEQ ID NO:1186), FIG. 1188 (SEQ ID NO:1188), FIG. 1190 (SEQ ID NO:1190), FIG. 1192 (SEQ ID NO:1192), FIG. 1194 (SEQ ID NO:1194), FIG. 1196 (SEQ ID NO:1196), FIG. 1198 (SEQ ID NO:1198), FIG. 1200 (SEQ ID NO:1200), FIG. 1202 (SEQ ID NO:1202), FIG. 1204 (SEQ ID NO:1204), FIG. 1206 (SEQ ID NO:1206), FIG. 1208 (SEQ ID NO:1208), FIG. 1210 (SEQ ID NO:1210), FIG. 1212 (SEQ ID NO:1212), FIG. 1214 (SEQ ID NO:1214), FIG. 1216 (SEQ ID NO:1216), FIG. 1218 (SEQ ID NO:1218), FIG. 1220 (SEQ ID NO:1220), FIG. 1222 (SEQ ID NO:1222), FIG. 1224 (SEQ ID NO:1224), FIG. 1226 (SEQ ID NO:1226), FIG. 1228 (SEQ ID NO:1228), FIG. 1230 (SEQ ID NO:1230), FIG. 1232 (SEQ ID NO:1232), FIG. 1234 (SEQ ID NO:1234), FIG. 1236 (SEQ ID NO:1236), FIG. 1238 (SEQ ID NO:1238), FIG. 1240 (SEQ ID NO:1240), FIG. 1242 (SEQ ID NO:1242), FIG. 1244 (SEQ ID NO:1244), FIG. 1246 (SEQ ID NO:1246), FIG. 1248 (SEQ ID NO:1248), FIG. 1250 (SEQ ID NO:1250), FIG. 1252 (SEQ ID NO:1252), FIG. 1254 (SEQ ID NO:1254), FIG. 1256 (SEQ ID NO:1256), FIG. 1258 (SEQ ID NO:1258), FIG. 1260 (SEQ ID NO:1260), FIG. 1262 (SEQ ID NO:1262), FIG. 1264 (SEQ ID NO:1264), FIG. 1266 (SEQ ID NO:1266), FIG. 1268 (SEQ ID NO:1268), FIG. 1270 (SEQ ID NO:1270), FIG. 1272 (SEQ ID NO:1272), FIG. 1274 (SEQ ID NO:1274), FIG. 1276 (SEQ ID NO:1276), FIG. 1278 (SEQ ID NO:1278), FIG. 1280 (SEQ ID NO:1280), FIG. 1282 (SEQ ID NO:1282), FIG. 1284 (SEQ ID NO:1284), FIG. 1286 (SEQ ID NO:1286), FIG. 1288 (SEQ ID NO:1288), FIG. 1290 (SEQ ID NO:1290), FIG. 1292 (SEQ ID NO:1292), FIG. 1294 (SEQ ID NO:1294), FIG. 1296 (SEQ ID NO:1296), FIG. 1298 (SEQ ID NO:1298), FIG. 1300 (SEQ ID NO:1300), FIG. 1302 (SEQ ID NO:1302), FIG. 1304 (SEQ ID NO:1304), FIG. 1306 (SEQ ID NO:1306), FIG. 1308 (SEQ ID NO:1308), FIG. 1310 (SEQ ID NO:1310), FIG. 1312 (SEQ ID NO:1312), FIG. 1314 (SEQ ID NO:1314), FIG. 1316 (SEQ ID NO:1316), FIG. 1318 (SEQ ID NO:1318), FIG. 1320 (SEQ ID NO:1320), FIG. 1322 (SEQ ID NO:1322), FIG. 1324 (SEQ ID NO:1324), FIG. 1326 (SEQ ID NO:1326), FIG. 1328 (SEQ ID NO:1328), FIG. 1330 (SEQ ID NO:1330), FIG. 1332 (SEQ ID NO:1332), FIG. 1334 (SEQ ID NO:1334), FIG. 1336 (SEQ ID NO:1336), FIG. 1338 (SEQ ID NO:1338), FIG. 1340 (SEQ ID NO:1340), FIG. 1342 (SEQ ID NO:1342), FIG. 1344 (SEQ ID NO:1344), FIG. 1346 (SEQ ID NO:1346), FIG. 1348 (SEQ ID NO:1348), FIG. 1350 (SEQ ID NO:1350), FIG. 1352 (SEQ ID NO:1352), FIG. 1354 (SEQ ID NO:1354), FIG. 1356 (SEQ ID NO:1356), FIG. 1358 (SEQ ID NO:1358), FIG. 1361 (SEQ ID NO:1361), FIG. 1363 (SEQ ID NO:1363), FIG. 1365 (SEQ ID NO:1365), FIG. 1367 (SEQ ID NO:1367), FIG. 1369 (SEQ ID NO:1369), FIG. 1371 (SEQ ID NO:1371), FIG. 1373 (SEQ ID NO:1373), FIG. 1375 (SEQ ID NO:1375), FIG. 1377 (SEQ ID NO:1377), FIG. 1379 (SEQ ID NO:1379), FIG. 1381 (SEQ ID NO:1381), FIG. 1383 (SEQ ID NO:1383), FIG. 1385 (SEQ ID NO:1385), FIG. 1387 (SEQ ID NO:1387), FIG. 1389 (SEQ ID NO:1389), FIG. 1391 (SEQ ID NO:1391), FIG. 1393 (SEQ ID NO:1393), FIG. 1395 (SEQ ID NO:1395), FIG. 1397 (SEQ ID NO:1397), FIG. 1399 (SEQ ID NO:1399), FIG. 1401 (SEQ ID NO:1401), FIG. 1403 (SEQ ID NO:1403), FIG. 1405 (SEQ ID NO:1405), FIG. 1407 (SEQ ID NO:1407), FIG. 1409 (SEQ ID NO:1409), FIG. 1411 (SEQ ID NO:1411), FIG. 1413 (SEQ ID NO:1413), FIG. 1415 (SEQ ID NO:1415), FIG. 1417 (SEQ ID NO:1417), FIG. 1419 (SEQ ID NO:1419), FIG. 1421 (SEQ ID NO:1421), FIG. 1423 (SEQ ID NO:1423), FIG. 1425 (SEQ ID NO:1425), FIG. 1427 (SEQ ID NO:1427), FIG. 1429 (SEQ ID NO:1429), FIG. 1431 (SEQ ID NO:1431), FIG. 1433 (SEQ ID NO:1433), FIG. 1435 (SEQ ID NO:1435), FIG. 1437 (SEQ ID NO:1437), FIG. 1439 (SEQ ID NO:1439), FIG. 1441 (SEQ ID NO:1441), FIG. 1443 (SEQ ID NO:1443), FIG. 1445 (SEQ ID NO:1445), FIG. 1447 (SEQ ID NO:1447), FIG. 1449 (SEQ ID NO:1449), FIG. 1451 (SEQ ID NO:1451), FIG. 1453 (SEQ ID NO:1453), FIG. 1455 (SEQ ID NO:1455), FIG. 1457 (SEQ ID NO:1457), FIG. 1459 (SEQ ID NO:1459), FIG. 1461 (SEQ ID NO:1461), FIG. 1463 (SEQ ID NO:1463), FIG. 1465 (SEQ ID NO:1465), FIG. 1467 (SEQ ID NO:1467), FIG. 1469 (SEQ ID NO:1469), FIG. 1471 (SEQ ID NO:1471), FIG. 1473 (SEQ ID NO:1473), FIG. 1475 (SEQ ID NO:1475), FIG. 1477 (SEQ ID NO:1477), FIG. 1479 (SEQ ID NO:1479), FIG. 1481 (SEQ ID NO:1481), FIG. 1483 (SEQ ID NO:1483), FIG. 1485 (SEQ ID NO:1485), FIG. 1487 (SEQ ID NO:1487), FIG. 1489 (SEQ ID NO:1489), FIG. 1491 (SEQ ID NO:1491), FIG. 1493 (SEQ ID NO:1493), FIG. 1495 (SEQ ID NO:1495), FIG. 1497 (SEQ ID NO:1497), FIG. 1499 (SEQ ID NO:1499), FIG. 1501 (SEQ ID NO:1501), FIG. 1503 (SEQ ID NO:1503), FIG. 1505 (SEQ ID NO:1505), FIG. 1507 (SEQ ID NO:1507), FIG. 1509 (SEQ ID NO:1509), FIG. 1511 (SEQ ID NO:1511), FIG. 1513 (SEQ ID NO:1513), FIG. 1515 (SEQ ID NO:1515), FIG. 1517 (SEQ ID NO:1517), FIG. 1519 (SEQ ID NO:1519), FIG. 1521 (SEQ ID NO:1521), FIG. 1523 (SEQ ID NO:1523), FIG. 1525 (SEQ ID NO:1525), FIG. 1527 (SEQ ID NO:1527), FIG. 1529 (SEQ ID NO:1529), FIG. 1531 (SEQ ID NO:1531), FIG. 1533 (SEQ ID NO:1533), FIG. 1535 (SEQ ID NO:1535), FIG. 1537 (SEQ ID NO:1537), FIG. 1539 (SEQ ID NO:1539), FIG. 1541 (SEQ ID NO:1541), FIG. 1543 (SEQ ID NO:1543), FIG. 1545 (SEQ ID NO:1545), FIG. 1547 (SEQ ID NO:1547), FIG. 1549 (SEQ ID NO:1549), FIG. 1551 (SEQ ID NO:1551), FIG. 1553 (SEQ ID NO:1553), FIG. 1555 (SEQ ID NO:1555), FIG. 1557 (SEQ ID NO:1557), FIG. 1559 (SEQ ID NO:1559), FIG. 1561 (SEQ ID NO:1561), FIG. 1563 (SEQ ID NO:1563), FIG. 1565 (SEQ ID NO:1565), FIG. 1567 (SEQ ID NO:1567), FIG. 1569 (SEQ ID NO:1569), FIG. 1571 (SEQ ID NO:1571), FIG. 1573 (SEQ ID NO:1573), FIG. 1575 (SEQ ID NO:1575), FIG. 1578 (SEQ ID NO:1578), FIG. 1581 (SEQ ID NO:1581), FIG. 1583 (SEQ ID NO:1583), FIG. 1585 (SEQ ID NO:1585), FIG. 1587 (SEQ ID NO:1587), FIG. 1589 (SEQ ID NO:1589), FIG. 1592 (SEQ ID NO:1592), FIG. 1594 (SEQ ID NO:1594), FIG. 1596 (SEQ ID NO:1596), FIG. 1598 (SEQ ID NO:1598), FIG. 1600 (SEQ ID NO:1600), FIG. 1602 (SEQ ID NO:1602), FIG. 1604 (SEQ ID NO:1604), FIG. 1606 (SEQ ID NO:1606), FIG. 1609 (SEQ ID NO:1609), FIG. 1611 (SEQ ID NO:1611), FIG. 1614 (SEQ ID NO:1614), FIG. 1617 (SEQ ID NO:1617), FIG. 1619 (SEQ ID NO:1619), FIG. 1621 (SEQ ID NO:1621), FIG. 1623 (SEQ ID NO:1623), FIG. 1626 (SEQ ID NO:1626), FIG. 1628 (SEQ ID NO:1628), FIG. 1630 (SEQ ID NO:1630), FIG. 1632 (SEQ ID NO:1632), FIG. 1636 (SEQ ID NO:1636), FIG. 1639 (SEQ ID NO:1639), FIG. 1644 (SEQ ID NO:1644), FIG. 1646 (SEQ ID NO:1646), FIG. 1648 (SEQ ID NO:1648), FIG. 1650 (SEQ ID NO:1650), FIG. 1652 (SEQ ID NO:1652), FIG. 1654 (SEQ ID NO:1654), FIG. 1656 (SEQ ID NO:1656), FIG. 1658 (SEQ ID NO:1658), FIG. 1660 (SEQ ID NO:1660), FIG. 1662 (SEQ ID NO:1662), FIG. 1664 (SEQ ID NO:1664), FIG. 1666 (SEQ ID NO:1666), FIG. 1668 (SEQ ID NO:1668), FIG. 1670 (SEQ ID NO:1670), FIG. 1672 (SEQ ID NO:1672), FIG. 1674 (SEQ ID NO:1674), FIG. 1676 (SEQ ID NO:1676), FIG. 1678 (SEQ ID NO:1678), FIG. 1680 (SEQ ID NO:1680), FIG. 1683 (SEQ ID NO:1683), FIG. 1685 (SEQ ID NO:1685), FIG. 1687 (SEQ ID NO:1687), FIG. 1689 (SEQ ID NO:1689), FIG. 1692 (SEQ ID NO:1692), FIG. 1694 (SEQ ID NO:1694), FIG. 1696 (SEQ ID NO:1696), FIG. 1698 (SEQ ID NO:1698), FIG. 1701 (SEQ ID NO:1701), FIG. 1703 (SEQ ID NO:1703), FIG. 1705 (SEQ ID NO:1705), FIG. 1707 (SEQ ID NO:1707), FIG. 1709 (SEQ ID NO:1709), FIG. 1711 (SEQ ID NO:1711), FIG. 1713 (SEQ ID NO:1713), FIG. 1715 (SEQ ID NO:1715), FIG. 1717 (SEQ ID NO:1717), FIG. 1719 (SEQ ID NO:1719), FIG. 1721 (SEQ ID NO:1721), FIG. 1723 (SEQ ID NO:1723), FIG. 1725 (SEQ ID NO:1725), FIG. 1727 (SEQ ID NO:1727), FIG. 1729 (SEQ ID NO:1729), FIG. 1732 (SEQ ID NO:1732), FIG. 1734 (SEQ ID NO:1734), FIG. 1736 (SEQ ID NO:1736), FIG. 1738 (SEQ ID NO:1738), FIG. 1741 (SEQ ID NO:1741), FIG. 1743 (SEQ ID NO:1743), FIG. 1745 (SEQ ID NO:1745), FIG. 1747 (SEQ ID NO:1747), FIG. 1749 (SEQ ID NO:1749), FIG. 1751 (SEQ ID NO:1751), FIG. 1753 (SEQ ID NO:1753), FIG. 1755 (SEQ ID NO:1755), FIG. 1757 (SEQ ID NO:1757), FIG. 1760 (SEQ ID NO:1760), FIG. 1762 (SEQ ID NO:1762), FIG. 1764 (SEQ ID NO:1764), FIG. 1766 (SEQ ID NO:1766), FIG. 1769 (SEQ ID NO:1769), FIG. 1771 (SEQ ID NO:1771), FIG. 1773 (SEQ ID NO:1773), FIG. 1775 (SEQ ID NO:1775), FIG. 1777 (SEQ ID NO:1777), FIG. 1779 (SEQ ID NO:1779), FIG. 1781 (SEQ ID NO:1781), FIG. 1783 (SEQ ID NO:1783), FIG. 1785 (SEQ ID NO:1785), FIG. 1787 (SEQ ID NO:1787), FIG. 1789 (SEQ ID NO:1789), FIG. 1792 (SEQ ID NO:1792), FIG. 1795 (SEQ ID NO:1795), FIG. 1797 (SEQ ID NO:1797), FIG. 1799 (SEQ ID NO:1799), FIG. 1802 (SEQ ID NO:1802), FIG. 1805 (SEQ ID NO:1805), FIG. 1807 (SEQ ID NO:1807), FIG. 1809 (SEQ ID NO:1809), FIG. 1811 (SEQ ID NO:1811), FIG. 1813 (SEQ ID NO:1813), FIG. 1815 (SEQ ID NO:1815), FIG. 1817 (SEQ ID NO:1817), FIG. 1819 (SEQ ID NO:1819), FIG. 1821 (SEQ ID NO:1821), FIG. 1823 (SEQ ID NO:1823), FIG. 1825 (SEQ ID NO:1825), FIG. 1827 (SEQ ID NO:1827), FIG. 1829 (SEQ ID NO:1829), FIG. 1831 (SEQ ID NO:1831), FIG. 1833 (SEQ ID NO:1833), FIG. 1836 (SEQ ID NO:1836), FIG. 1838 (SEQ ID NO:1838), FIG. 1841 (SEQ ID NO:1841), FIG. 1843 (SEQ ID NO:1843), FIG. 1845 (SEQ ID NO:1845), FIG. 1847 (SEQ ID NO:1847), FIG. 1849 (SEQ ID NO:1849), FIG. 1851 (SEQ ID NO:1851), FIG. 1854 (SEQ ID NO:1854), FIG. 1856 (SEQ ID NO:1856), FIG. 1858 (SEQ ID NO:1858), FIG. 1860 (SEQ ID NO:1860), FIG. 1863 (SEQ ID NO:1863), FIG. 1865 (SEQ ID NO:1865), FIG. 1867 (SEQ ID NO:1867), FIG. 1869 (SEQ ID NO:1869), FIG. 1871 (SEQ ID NO:1871), FIG. 1873 (SEQ ID NO:1873), FIG. 1875 (SEQ ID NO:1875), FIG. 1877 (SEQ ID NO:1877), FIG. 1881 (SEQ ID NO:1881), FIG. 1883 (SEQ ID NO:1883), FIG. 1885 (SEQ ID NO:1885), FIG. 1887 (SEQ ID NO:1887), FIG. 1889 (SEQ ID NO:1889), FIG. 1891 (SEQ ID NO:1891), FIG. 1893 (SEQ ID NO:1893), FIG. 1895 (SEQ ID NO:1895), FIG. 1897 (SEQ ID NO:1897), FIG. 1899 (SEQ ID NO:1899), FIG. 1901 (SEQ ID NO:1901), FIG. 1903 (SEQ ID NO:1903), FIG. 1905 (SEQ ID NO:1905), FIG. 1908 (SEQ ID NO:1908), FIG. 1910 (SEQ ID NO:1910), FIG. 1913 (SEQ ID NO:1913), FIG. 1915 (SEQ ID NO:1915), FIG. 1917 (SEQ ID NO:1917), FIG. 1919 (SEQ ID NO:1919), FIG. 1922 (SEQ ID NO:1922), FIG. 1924 (SEQ ID NO:1924), FIG. 1926 (SEQ ID NO:1926), FIG. 1928 (SEQ ID NO:1928), FIG. 1930 (SEQ ID NO:1930), FIG. 1932 (SEQ ID NO:1932), FIG. 1934 (SEQ ID NO:1934), FIG. 1936 (SEQ ID NO:1936), FIG. 1938 (SEQ ID NO:1938), FIG. 1940 (SEQ ID NO:1940), FIG. 1942 (SEQ ID NO:1942), FIG. 1944 (SEQ ID NO:1944), FIG. 1946 (SEQ ID NO:1946), FIG. 1948 (SEQ ID NO:1948), FIG. 1950 (SEQ ID NO:1950), FIG. 1952 (SEQ ID NO:1952), FIG. 1954 (SEQ ID NO:1954), FIG. 1956 (SEQ ID NO:1956), FIG. 1958 (SEQ ID NO:1958), FIG. 1960 (SEQ ID NO:1960), FIG. 1962 (SEQ ID NO:1962), FIG. 1964 (SEQ ID NO:1964), FIG. 1966 (SEQ ID NO:1966), FIG. 1968 (SEQ ID NO:1968), FIG. 1970 (SEQ ID NO:1970), FIG. 1972 (SEQ ID NO:1972), FIG. 1974 (SEQ ID NO:1974), FIG. 1976 (SEQ ID NO:1976), FIG. 1978 (SEQ ID NO:1978), FIG. 1980 (SEQ ID NO:1980), FIG. 1982 (SEQ ID NO:1982), FIG. 1984 (SEQ ID NO:1984), FIG. 1986 (SEQ ID NO:1986), FIG. 1988 (SEQ ID NO:1988), FIG. 1990 (SEQ ID NO:1990), FIG. 1992 (SEQ ID NO:1992), FIG. 1994 (SEQ ID NO:1994), FIG. 1996 (SEQ ID NO:1996), FIG. 1998 (SEQ ID NO:1998), FIG. 2000 (SEQ ID NO:2000), FIG. 2002 (SEQ ID NO:2002), FIG. 2004 (SEQ ID NO:2004), FIG. 2006 (SEQ ID NO:2006), FIG. 2008 (SEQ ID NO:2008), FIG. 2010 (SEQ ID NO:2010), FIG. 2012 (SEQ ID NO:2012), FIG. 2014 (SEQ ID NO:2014), FIG. 2016 (SEQ ID NO:2016), FIG. 2018 (SEQ ID NO:2018), FIG. 2020 (SEQ ID NO:2020), FIG. 2022 (SEQ ID NO:2022), FIG. 2024 (SEQ ID NO:2024), FIG. 2026 (SEQ ID NO:2026), FIG. 2028 (SEQ ID NO:2028), FIG. 2030 (SEQ ID NO:2030), FIG. 2032 (SEQ ID NO:2032), FIG. 2034 (SEQ ID NO:2034), FIG. 2036 (SEQ ID NO:2036), FIG. 2038 (SEQ ID NO:2038), FIG. 2040 (SEQ ID NO:2040), FIG. 2042 (SEQ ID NO:2042), FIG. 2044 (SEQ ID NO:2044), FIG. 2046 (SEQ ID NO:2046), FIG. 2048 (SEQ ID NO:2048), FIG. 2050 (SEQ ID NO:2050), FIG. 2052 (SEQ ID NO:2052), FIG. 2054 (SEQ ID NO:2054), FIG. 2056 (SEQ ID NO:2056), FIG. 2058 (SEQ ID NO:2058), FIG. 2060 (SEQ ID NO:2060), FIG. 2062 (SEQ ID NO:2062), FIG. 2064 (SEQ ID NO:2064), FIG. 2066 (SEQ ID NO:2066), FIG. 2068 (SEQ ID NO:2068), FIG. 2070 (SEQ ID NO:2070), FIG. 2072 (SEQ ID NO:2072), FIG. 2074 (SEQ ID NO:2074), FIG. 2076 (SEQ ID NO:2076), FIG. 2078 (SEQ ID NO:2078), FIG. 2080 (SEQ ID NO:2080), FIG. 2082 (SEQ ID NO:2082), FIG. 2084 (SEQ ID NO:2084), FIG. 2086 (SEQ ID NO:2086), FIG. 2088 (SEQ ID NO:2088), FIG. 2090 (SEQ ID NO:2090), FIG. 2092 (SEQ ID NO:2092), FIG. 2094 (SEQ ID NO:2094), FIG. 2096 (SEQ ID NO:2096), FIG. 2098 (SEQ ID NO:2098), FIG. 2100 (SEQ ID NO:2100), FIG. 2102 (SEQ ID NO:2102), FIG. 2104 (SEQ ID NO:2104), FIG. 2106 (SEQ ID NO:2106), FIG. 2108 (SEQ ID NO:2108), FIG. 2110 (SEQ ID NO:2110), FIG. 2112 (SEQ ID NO:2112), FIG. 2114 (SEQ ID NO:2114), FIG. 2116 (SEQ ID NO:2116), FIG. 2118 (SEQ ID NO:2118), FIG. 2120 (SEQ ID NO:2120), FIG. 2122 (SEQ ID NO:2122), FIG. 2124 (SEQ ID NO:2124), FIG. 2126 (SEQ ID NO:2126), FIG. 2128 (SEQ ID NO:2128), FIG. 2130 (SEQ ID NO:2130), FIG. 2132 (SEQ ID NO:2132), FIG. 2134 (SEQ ID NO:2134), FIG. 2136 (SEQ ID NO:2136), FIG. 2138 (SEQ ID NO:2138), FIG. 2140 (SEQ ID NO:2140), FIG. 2142 (SEQ ID NO:2142), FIG. 2144 (SEQ ID NO:2144), FIG. 2146 (SEQ ID NO:2146), FIG. 2148 (SEQ ID NO:2148), FIG. 2150 (SEQ ID NO:2150), FIG. 2152 (SEQ ID NO:2152), FIG. 2154 (SEQ ID NO:2154), FIG. 2156 (SEQ ID NO:2156), FIG. 2158 (SEQ ID NO:2158), FIG. 2160 (SEQ ID NO:2160), FIG. 2163 (SEQ ID NO:2163), FIG. 2165 (SEQ ID NO:2165), FIG. 2167 (SEQ ID NO:2167), FIG. 2170 (SEQ ID NO:2170), FIG. 2172 (SEQ ID NO:2172), FIG. 2174 (SEQ ID NO:2174), FIG. 2176 (SEQ ID NO:2176), FIG. 2178 (SEQ ID NO:2178), FIG. 2180 (SEQ ID NO:2180), FIG. 2182 (SEQ ID NO:2182), FIG. 2184 (SEQ ID NO:2184), FIG. 2186 (SEQ ID NO:2186), FIG. 2188 (SEQ ID NO:2188), FIG. 2191 (SEQ ID NO:2191), FIG. 2193 (SEQ ID NO:2193), FIG. 2195 (SEQ ID NO:2195), FIG. 2197 (SEQ ID NO:2197), FIG. 2199 (SEQ ID NO:2199), FIG. 2201 (SEQ ID NO:2201), FIG. 2204 (SEQ ID NO:2204), FIG. 2207 (SEQ ID NO:2207), FIG. 2209 (SEQ ID NO:2209), FIG. 2212 (SEQ ID NO:2212), FIG. 2214 (SEQ ID NO:2214), FIG. 2216 (SEQ ID NO:2216), FIG. 2218 (SEQ ID NO:2218), FIG. 2220 (SEQ ID NO:2220), FIG. 2222 (SEQ ID NO:2222), FIG. 2224 (SEQ ID NO:2224), FIG. 2226 (SEQ ID NO:2226), FIG. 2228 (SEQ ID NO:2228), FIG. 2230 (SEQ ID NO:2230), FIG. 2232 (SEQ ID NO:2232), FIG. 2234 (SEQ ID NO:2234), FIG. 2236 (SEQ ID NO:2236), FIG. 2238 (SEQ ID NO:2238), FIG. 2240 (SEQ ID NO:2240), FIG. 2242 (SEQ ID NO:2242), FIG. 2244 (SEQ ID NO:2244), FIG. 2246 (SEQ ID NO:2246), FIG. 2248 (SEQ ID NO:2248), FIG. 2250 (SEQ ID NO:2250), FIG. 2252 (SEQ ID NO:2252), FIG. 2254 (SEQ ID NO:2254), FIG. 2256 (SEQ ID NO:2256), FIG. 2258 (SEQ ID NO:2258), FIG. 2260 (SEQ ID NO:2260), FIG. 2262 (SEQ ID NO:2262), FIG. 2264 (SEQ ID NO:2264), FIG. 2266 (SEQ ID NO:2266), FIG. 2268 (SEQ ID NO:2268), FIG. 2270 (SEQ ID NO:2270), FIG. 2272 (SEQ ID NO:2272), FIG. 2274 (SEQ ID NO:2774), FIG. 2276 (SEQ ID NO:2276), FIG. 2278 (SEQ ID NO:2278), FIG. 2280 (SEQ ID NO:2280), FIG. 2282 (SEQ ID NO:2282), FIG. 2284 (SEQ ID NO:2284), FIG. 2286 (SEQ ID NO:2286), FIG. 2288 (SEQ ID NO:2288), FIG. 2290 (SEQ ID NO:2290), FIG. 2292 (SEQ ID NO:2292), FIG. 2294 (SEQ ID NO:2294), FIG. 2296 (SEQ ID NO:2296), FIG. 2298 (SEQ ID NO:2298), FIG. 2301 (SEQ ID NO:2301), FIG. 2303 (SEQ ID NO:2303), FIG. 2305 (SEQ ID NO:2305), FIG. 2307 (SEQ ID NO:2307), FIG. 2310 (SEQ ID NO:2310), FIG. 2312 (SEQ ID NO:2312), FIG. 2314 (SEQ ID NO:2314), FIG. 2316 (SEQ ID NO:2316), FIG. 2319 (SEQ ID NO:2319), FIG. 2321 (SEQ ID NO:2321), FIG. 2323 (SEQ ID NO:2323), FIG. 2325 (SEQ ID NO:2325), FIG. 2327 (SEQ ID NO:2327), FIG. 2329 (SEQ ID NO:2329), FIG. 2331 (SEQ ID NO:2331), FIG. 2333 (SEQ ID NO:2333), FIG. 2335 (SEQ ID NO:2335), FIG. 2337 (SEQ ID NO:2337), FIG. 2339 (SEQ ID NO:2339), FIG. 2341 (SEQ ID NO:2341), FIG. 2343 (SEQ ID NO:2343), FIG. 2345 (SEQ ID NO:2345), FIG. 2347 (SEQ ID NO:2347), FIG. 2349 (SEQ ID NO:2349), FIG. 2351 (SEQ ID NO:2351), FIG. 2353 (SEQ ID NO:2353), FIG. 2355 (SEQ ID NO:2355), FIG. 2357 (SEQ ID NO:2357), FIG. 2359 (SEQ ID NO:2359), FIG. 2361 (SEQ ID NO:2361), FIG. 2363 (SEQ ID NO:2363), FIG. 2365 (SEQ ID NO:2365), FIG. 2367 (SEQ ID NO:2367), FIG. 2369 (SEQ ID NO:2369), FIG. 2371 (SEQ ID NO:2371), FIG. 2373 (SEQ ID NO:2373), FIG. 2375 (SEQ ID NO:2375), FIG. 2378 (SEQ ID NO:2378), FIG. 2380 (SEQ ID NO:2380), FIG. 2383 (SEQ ID NO:2383), FIG. 2386 (SEQ ID NO:2386), FIG. 2388 (SEQ ID NO:2388), FIG. 2391 (SEQ ID NO:2391), FIG. 2393 (SEQ ID NO:2393), FIG. 2396 (SEQ ID NO:2396), FIG. 2398 (SEQ ID NO:2398), FIG. 2402 (SEQ ID NO:2402), FIG. 2404 (SEQ ID NO:2404), FIG. 2408 (SEQ ID NO:2408), FIG. 2410 (SEQ ID NO:2410), FIG. 2412 (SEQ ID NO:2412), FIG. 2415 (SEQ ID NO:2415), FIG. 2418 (SEQ ID NO:2418), FIG. 2420 (SEQ ID NO:2420), FIG. 2422 (SEQ ID NO:2422), FIG. 2424 (SEQ ID NO:2424), FIG. 2426 (SEQ ID NO:2426), FIG. 2430 (SEQ ID NO:2430), FIG. 2432 (SEQ ID NO:2432), FIG. 2434 (SEQ ID NO:2434), FIG. 2436 (SEQ ID NO:2436), FIG. 2438 (SEQ ID NO:2438), FIG. 2440 (SEQ ID NO:2440), or FIG. 2442 (SEQ ID NO:2442) said method comprising contacting cells which normally respond to said polypeptide with (a) said polypeptide and (b) a candidate compound, and determining the lack responsiveness by said cell to (a).

24. A method of identifying a compound that inhibits the expression of a gene encoding a PRO polypeptide of the invention as described in FIG. 2 (SEQ ID NO:2), FIG. 4 (SEQ ID NO:4), FIG. 6 (SEQ ID NO:6), FIG. 8 (SEQ ID NO:8), FIG. 10 (SEQ ID NO:10), FIG. 12 (SEQ ID NO:12), FIG. 14 (SEQ ID NO:14), FIG. 16 (SEQ ID NO:16), FIG. 18 (SEQ ID NO:18), FIG. 20 (SEQ ID NO:20), FIG. 22 (SEQ ID NO:22), FIG. 24 (SEQ ID NO:24), FIG. 26 (SEQ ID NO:26), FIG. 28 (SEQ ID NO:28), FIG. 30 (SEQ ID NO:30), FIG. 32 (SEQ ID NO:32), FIG. 34 (SEQ ID NO:34), FIG. 36 (SEQ ID NO:36), FIG. 38 (SEQ ID NO:38), FIG. 40 (SEQ ID NO:40), FIG. 42 (SEQ ID NO:42), FIG. 44 (SEQ ID NO:44), FIG. 46 (SEQ ID NO:46), FIG. 48 (SEQ ID NO:48), FIG. 50 (SEQ ID NO:50), FIG. 52 (SEQ ID NO:52), FIG. 54 (SEQ ID NO:54), FIG. 56 (SEQ ID NO:56), FIG. 58 (SEQ ID NO:58), FIG. 60 (SEQ ID NO:60), FIG. 62 (SEQ ID NO:62), FIG. 64 (SEQ ID NO:64), FIG. 66 (SEQ ID NO:66), FIG. 68 (SEQ ID NO:68), FIG. 70 (SEQ ID NO:70), FIG. 72 (SEQ ID NO:72), FIG. 74 (SEQ ID NO:74), FIG. 76 (SEQ ID NO:76), FIG. 78 (SEQ ID NO:78), FIG. 80 (SEQ ID NO:80), FIG. 82 (SEQ ID NO:82), FIG. 84 (SEQ ID NO:84), FIG. 86 (SEQ ID NO:86), FIG. 88 (SEQ ID NO:88), FIG. 90 (SEQ ID NO:90), FIG. 92 (SEQ ID NO:92), FIG. 94 (SEQ ID NO:94), FIG. 96 (SEQ ID NO:96), FIG. 98 (SEQ ID NO:98), FIG. 100 (SEQ ID NO:100), FIG. 102 (SEQ ID NO:102), FIG. 104 (SEQ ID NO:104), FIG. 106 (SEQ ID NO:106), FIG. 108 (SEQ ID NO:108), FIG. 110 (SEQ ID NO:110), FIG. 112 (SEQ ID NO:112), FIG. 114 (SEQ ID NO:114), FIG. 116 (SEQ ID NO:116), FIG. 118 (SEQ ID NO:118), FIG. 121 (SEQ ID NO:121), FIG. 123 (SEQ ID NO:123), FIG. 125 (SEQ ID NO:125), FIG. 127 (SEQ ID NO:127), FIG. 129 (SEQ ID NO:129), FIG. 131 (SEQ ID NO:131), FIG. 133 (SEQ ID NO:133), FIG. 135 (SEQ ID NO:135), FIG. 137 (SEQ ID NO:137), FIG. 139 (SEQ ID NO:139), FIG. 141 (SEQ ID NO:141), FIG. 143 (SEQ ID NO:143), FIG. 145 (SEQ ID NO:145), FIG. 147 (SEQ ID NO:147), FIG. 149 (SEQ ID NO:149), FIG. 151 (SEQ ID NO:151), FIG. 153 (SEQ ID NO:153), FIG. 155 (SEQ ID NO:155), FIG. 157 (SEQ ID NO:157), FIG. 159 (SEQ ID NO:159), FIG. 161 (SEQ ID NO:161), FIG. 163 (SEQ ID NO:163), FIG. 165 (SEQ ID NO:165), FIG. 167 (SEQ ID NO:167), FIG. 169 (SEQ ID NO:169), FIG. 171 (SEQ ID NO:171), FIG. 173 (SEQ ID NO:173), FIG. 175 (SEQ ID NO:175), FIG. 177 (SEQ ID NO:177), FIG. 179 (SEQ ID NO:179), FIG. 181 (SEQ ID NO:181), FIG. 183 (SEQ ID NO:183), FIG. 185 (SEQ ID NO:185), FIG. 187 (SEQ ID NO:187), FIG. 189 (SEQ ID NO:189), FIG. 191 (SEQ ID NO:191), FIG. 193 (SEQ ID NO:193), FIG. 195 (SEQ ID NO:195), FIG. 197 (SEQ ID NO:197), FIG. 199 (SEQ ID NO:199), FIG. 201 (SEQ ID NO:201), FIG. 203 (SEQ ID NO:203), FIG. 205 (SEQ ID NO:205), FIG. 207 (SEQ ID NO:207), FIG. 209 (SEQ ID NO:209), FIG. 211 (SEQ ID NO:211), FIG. 213 (SEQ ID NO:213), FIG. 215 (SEQ ID NO:215), FIG. 217 (SEQ ID NO:217), FIG. 219 (SEQ ID NO:219), FIG. 221 (SEQ ID NO:221), FIG. 223 (SEQ ID NO:223), FIG. 225 (SEQ ID NO:225), FIG. 227 (SEQ ID NO:227), FIG. 229 (SEQ ID NO:229), FIG. 231 (SEQ ID NO:231), FIG. 233 (SEQ ID NO:233), FIG. 235 (SEQ ID NO:235), FIG. 237 (SEQ ID NO:237), FIG. 239 (SEQ ID NO:239), FIG. 241 (SEQ ID NO:241), FIG. 243 (SEQ ID NO:243), FIG. 245 (SEQ ID NO:245), FIG. 247 (SEQ ID NO:247), FIG. 249 (SEQ ID NO:249), FIG. 251 (SEQ ID NO:251), FIG. 254 (SEQ ID NO:254), FIG. 256 (SEQ ID NO:256), FIG. 258 (SEQ ID NO:258), FIG. 260 (SEQ ID NO:260), FIG. 262 (SEQ ID NO:262), FIG. 264 (SEQ ID NO:264), FIG. 266 (SEQ ID NO:266), FIG. 268 (SEQ ID NO:268), FIG. 270 (SEQ ID NO:270), FIG. 272 (SEQ ID NO:272), FIG. 274 (SEQ ID NO:274), FIG. 276 (SEQ ID NO:276), FIG. 278 (SEQ ID NO:278), FIG. 280 (SEQ ID NO:280), FIG. 282 (SEQ ID NO:282), FIG. 284 (SEQ ID NO:284), FIG. 286 (SEQ ID NO:286), FIG. 288 (SEQ ID NO:288), FIG. 290 (SEQ ID NO:290), FIG. 292 (SEQ ID NO:292), FIG. 294 (SEQ ID NO:294), FIG. 296 (SEQ ID NO:296), FIG. 298 (SEQ ID NO:298), FIG. 300 (SEQ ID NO:300), FIG. 302 (SEQ ID NO:302), FIG. 304 (SEQ ID NO:304), FIG. 306 (SEQ ID NO:306), FIG. 308 (SEQ ID NO:308), FIG. 310 (SEQ ID NO:310), FIG. 312 (SEQ ID NO:312), FIG. 314 (SEQ ID NO:314), FIG. 316 (SEQ ID NO:316), FIG. 318 (SEQ ID NO:318), FIG. 320 (SEQ ID NO:320), FIG. 322 (SEQ ID NO:322), FIG. 324 (SEQ ID NO:324), FIG. 326 (SEQ ID NO:326), FIG. 328 (SEQ ID NO:328), FIG. 330 (SEQ ID NO:330), FIG. 332 (SEQ ID NO:332), FIG. 334 (SEQ ID NO:334), FIG. 336 (SEQ ID NO:336), FIG. 338 (SEQ ID NO:338), FIG. 340 (SEQ ID NO:340), FIG. 342 (SEQ ID NO:342), FIG. 344 (SEQ ID NO:344), FIG. 346 (SEQ ID NO:346), FIG. 348 (SEQ ID NO:348), FIG. 350 (SEQ ID NO:350), FIG. 352 (SEQ ID NO:352), FIG. 354 (SEQ ID NO:354), FIG. 356 (SEQ ID NO:356), FIG. 358 (SEQ ID NO:358), FIG. 360 (SEQ ID NO:360), FIG. 362 (SEQ ID NO:362), FIG. 364 (SEQ ID NO:364), FIG. 366 (SEQ ID NO:366), FIG. 368 (SEQ ID NO:368), FIG. 370 (SEQ ID NO:370), FIG. 372 (SEQ ID NO:372), FIG. 374 (SEQ ID NO:374), FIG. 376 (SEQ ID NO:376), FIG. 378 (SEQ ID NO:378), FIG. 380 (SEQ ID NO:380), FIG. 382 (SEQ ID NO:382), FIG. 384 (SEQ ID NO:384), FIG. 386 (SEQ ID NO:386), FIG. 388 (SEQ ID NO:388), FIG. 390 (SEQ ID NO:390), FIG. 392 (SEQ ID NO:392), FIG. 394 (SEQ ID NO:394), FIG. 396 (SEQ ID NO:396), FIG. 398 (SEQ ID NO:398), FIG. 400 (SEQ ID NO:400), FIG. 402 (SEQ ID NO:402), FIG. 404 (SEQ ID NO:404), FIG. 406 (SEQ ID NO:406), FIG. 408 (SEQ ID NO:408), FIG. 410 (SEQ ID NO:410), FIG. 412 (SEQ ID NO:412), FIG. 414 (SEQ ID NO:414), FIG. 416 (SEQ ID NO:416), FIG. 418 (SEQ ID NO:418), FIG. 420 (SEQ ID NO:420), FIG. 422 (SEQ ID NO:422), FIG. 424 (SEQ ID NO:424), FIG. 426 (SEQ ID NO:426), FIG. 428 (SEQ ID NO:428), FIG. 430 (SEQ ID NO:430), FIG. 432 (SEQ ID NO:432), FIG. 434 (SEQ ID NO:434), FIG. 436 (SEQ ID NO:436), FIG. 438 (SEQ ID NO:438), FIG. 440 (SEQ ID NO:440), FIG. 442 (SEQ ID NO:442), FIG. 444 (SEQ ID NO:444), FIG. 446 (SEQ ID NO:446), FIG. 448 (SEQ ID NO:448), FIG. 450 (SEQ ID NO:450), FIG. 452 (SEQ ID NO:452), FIG. 454 (SEQ ID NO:454), FIG. 456 (SEQ ID NO:456), FIG. 458 (SEQ ID NO:458), FIG. 460 (SEQ ID NO:460), FIG. 462 (SEQ ID NO:462), FIG. 464 (SEQ ID NO:464), FIG. 466 (SEQ ID NO:466), FIG. 468 (SEQ ID NO:468), FIG. 470 (SEQ ID NO:470), FIG. 472 (SEQ ID NO:472), FIG. 474 (SEQ ID NO:474), FIG. 476 (SEQ ID NO:476), FIG. 478 (SEQ ID NO:478), FIG. 480 (SEQ ID NO:480), FIG. 482 (SEQ ID NO:482), FIG. 484 (SEQ ID NO:484), FIG. 486 (SEQ ID NO:486), FIG. 488 (SEQ ID NO:488), FIG. 490 (SEQ ID NO:490), FIG. 492 (SEQ ID NO:492), FIG. 494 (SEQ ID NO:494), FIG. 496 (SEQ ID NO:496), FIG. 498 (SEQ ID NO:498), FIG. 500 (SEQ ID NO:500), FIG. 502 (SEQ ID NO:502), FIG. 504 (SEQ ID NO:504), FIG. 506 (SEQ ID NO:506), FIG. 508 (SEQ ID NO:508), FIG. 510 (SEQ ID NO:510), FIG. 512 (SEQ ID NO:512), FIG. 514 (SEQ ID NO:514), FIG. 516 (SEQ ID NO:516), FIG. 518 (SEQ ID NO:518), FIG. 520 (SEQ ID NO:520), FIG. 522 (SEQ ID NO:522), FIG. 524 (SEQ ID NO:524), FIG. 526 (SEQ ID NO:526), FIG. 528 (SEQ ID NO:528), FIG. 530 (SEQ ID NO:530), FIG. 532 (SEQ ID NO:532), FIG. 534 (SEQ ID NO:534), FIG. 536 (SEQ ID NO:536), FIG. 538 (SEQ ID NO:538), FIG. 540 (SEQ ID NO:540), FIG. 542 (SEQ ID NO:542), FIG. 544 (SEQ ID NO:544), FIG. 546 (SEQ ID NO:546), FIG. 549 (SEQ ID NO:549), FIG. 551 (SEQ ID NO:551), FIG. 553 (SEQ ID NO:553), FIG. 555 (SEQ ID NO:555), FIG. 557 (SEQ ID NO:557), FIG. 559 (SEQ ID NO:559), FIG. 561 (SEQ ID NO:561), FIG. 563 (SEQ ID NO:563), FIG. 565 (SEQ ID NO:565), FIG. 567 (SEQ ID NO:567), FIG. 569 (SEQ ID NO:569), FIG. 571 (SEQ ID NO:571), FIG. 573 (SEQ ID NO:573), FIG. 575 (SEQ ID NO:575), FIG. 577 (SEQ ID NO:577), FIG. 579 (SEQ ID NO:579), FIG. 581 (SEQ ID NO:581), FIG. 583 (SEQ ID NO:583), FIG. 585 (SEQ ID NO:585), FIG. 587 (SEQ ID NO:587), FIG. 589 (SEQ ID NO:589), FIG. 591 (SEQ ID NO:591), FIG. 593 (SEQ ID NO:593), FIG. 595 (SEQ ID NO:595), FIG. 597 (SEQ ID NO:597), FIG. 599 (SEQ ID NO:599), FIG. 601 (SEQ ID NO:601), FIG. 603 (SEQ ID NO:603), FIG. 605 (SEQ ID NO:605), FIG. 607 (SEQ ID NO:607), FIG. 609 (SEQ ID NO:609), FIG. 611 (SEQ ID NO:611), FIG. 613 (SEQ ID NO:613), FIG. 615 (SEQ ID NO:615), FIG. 617 (SEQ ID NO:617), FIG. 619 (SEQ ID NO:619), FIG. 621 (SEQ ID NO:621), FIG. 623 (SEQ ID NO:623), FIG. 625 (SEQ ID NO:625), FIG. 627 (SEQ ID NO:627), FIG. 629 (SEQ ID NO:629), FIG. 631 (SEQ ID NO:631), FIG. 633 (SEQ ID NO:633), FIG. 635 (SEQ ID NO:635), FIG. 637 (SEQ ID NO:637), FIG. 639 (SEQ ID NO:639), FIG. 641 (SEQ ID NO:641), FIG. 643 (SEQ ID NO:643), FIG. 645 (SEQ ID NO:645), FIG. 647 (SEQ ID NO:647), FIG. 649 (SEQ ID NO:649), FIG. 651 (SEQ ID NO:651), FIG. 653 (SEQ ID NO:653), FIG. 655 (SEQ ID NO:655), FIG. 657 (SEQ ID NO:657), FIG. 659 (SEQ ID NO:659), FIG. 661 (SEQ ID NO:661), FIG. 663 (SEQ ID NO:663), FIG. 665 (SEQ ID NO:665), FIG. 667 (SEQ ID NO:667), FIG. 669 (SEQ ID NO:669), FIG. 671 (SEQ ID NO:671), FIG. 673 (SEQ ID NO:673), FIG. 675 (SEQ ID NO:675), FIG. 677 (SEQ ID NO:377), FIG. 679 (SEQ ID NO:679), FIG. 681 (SEQ ID NO:681), FIG. 683 (SEQ ID NO:683), FIG. 685 (SEQ ID NO:685), FIG. 687 (SEQ ID NO:687), FIG. 689 (SEQ ID NO:689), FIG. 691 (SEQ ID NO:691), FIG. 693 (SEQ ID NO:693), FIG. 695 (SEQ ID NO:695), FIG. 697 (SEQ ID NO:697), FIG. 699 (SEQ ID NO:699), FIG. 701 (SEQ ID NO:701), FIG. 703 (SEQ ID NO:703), FIG. 705 (SEQ ID NO:705), FIG. 707 (SEQ ID NO:707), FIG. 709 (SEQ ID NO:709), FIG. 711 (SEQ ID NO:711), FIG. 713 (SEQ ID NO:713), FIG. 715 (SEQ ID NO:715), FIG. 717 (SEQ ID NO:717), FIG. 719 (SEQ ID NO:719), FIG. 721 (SEQ ID NO:721), FIG. 723 (SEQ ID NO:723), FIG. 725 (SEQ ID NO:725), FIG. 727 (SEQ ID NO:727), FIG. 729 (SEQ ID NO:729), FIG. 731 (SEQ ID NO:731), FIG. 733 (SEQ ID NO:733), FIG. 735 (SEQ ID NO:735), FIG. 737 (SEQ ID NO:737), FIG. 739 (SEQ ID NO:739), FIG. 741 (SEQ ID NO:741), FIG. 743 (SEQ ID NO:743), FIG. 745 (SEQ ID NO:745), FIG. 747 (SEQ ID NO:747), FIG. 749 (SEQ ID NO:749), FIG. 751 (SEQ ID NO:751), FIG. 753 (SEQ ID NO:753), FIG. 755 (SEQ ID NO:755), FIG. 757 (SEQ ID NO:757), FIG. 759 (SEQ ID NO:759), FIG. 761 (SEQ ID NO:761), FIG. 763 (SEQ ID NO:763), FIG. 765 (SEQ ID NO:765), FIG. 767 (SEQ ID NO:767), FIG. 769 (SEQ ID NO:769), FIG. 771 (SEQ ID NO:771), FIG. 773 (SEQ ID NO:773), FIG. 775 (SEQ ID NO:775), FIG. 777 (SEQ ID NO:777), FIG. 779 (SEQ ID NO:779), FIG. 781 (SEQ ID NO:781), FIG. 783 (SEQ ID NO:783), FIG. 785 (SEQ ID NO:785), FIG. 787 (SEQ ID NO:787), FIG. 789 (SEQ ID NO:789), FIG. 791 (SEQ ID NO:791), FIG. 793 (SEQ ID NO:793), FIG. 795 (SEQ ID NO:795), FIG. 797 (SEQ ID NO:797), FIG. 799 (SEQ ID NO:799), FIG. 801 (SEQ ID NO:801), FIG. 803 (SEQ ID NO:803), FIG. 805 (SEQ ID NO:805), FIG. 807 (SEQ ID NO:807), FIG. 809 (SEQ ID NO:809), FIG. 811 (SEQ ID NO:811), FIG. 813 (SEQ ID NO:813), FIG. 815 (SEQ ID NO:815), FIG. 817 (SEQ ID NO:817), FIG. 819 (SEQ ID NO:819), FIG. 821 (SEQ ID NO:821), FIG. 823 (SEQ ID NO:823), FIG. 825 (SEQ ID NO:825), FIG. 827 (SEQ ID NO:827), FIG. 829 (SEQ ID NO:829), FIG. 831 (SEQ ID NO:831), FIG. 833 (SEQ ID NO:833), FIG. 835 (SEQ ID NO:835), FIG. 837 (SEQ ID NO:837), FIG. 839 (SEQ ID NO:839), FIG. 841 (SEQ ID NO:841), FIG. 843 (SEQ ID NO:843), FIG. 845 (SEQ ID NO:845), FIG. 847 (SEQ ID NO:847), FIG. 849 (SEQ ID NO:849), FIG. 851 (SEQ ID NO:851), FIG. 853 (SEQ ID NO:853), FIG. 855 (SEQ ID NO:855), FIG. 858 (SEQ ID NO:858), FIG. 860 (SEQ ID NO:860), FIG. 862 (SEQ ID NO:862), FIG. 864 (SEQ ID NO:864), FIG. 866 (SEQ ID NO:866), FIG. 868 (SEQ ID NO:868), FIG. 870 (SEQ ID NO:870), FIG. 872 (SEQ ID NO:872), FIG. 874 (SEQ ID NO:874), FIG. 876 (SEQ ID NO:876), FIG. 878 (SEQ ID NO:878), FIG. 880 (SEQ ID NO:880), FIG. 882 (SEQ ID NO:882), FIG. 884 (SEQ ID NO:884), FIG. 886 (SEQ ID NO:886), FIG. 888 (SEQ ID NO:888), FIG. 890 (SEQ ID NO:890), FIG. 892 (SEQ ID NO:892), FIG. 894 (SEQ ID NO:894), FIG. 896 (SEQ ID NO:896), FIG. 898 (SEQ ID NO:898), FIG. 900 (SEQ ID NO:900), FIG. 902 (SEQ ID NO:902), FIG. 904 (SEQ ID NO:904), FIG. 906 (SEQ ID NO:906), FIG. 908 (SEQ ID NO:908), FIG. 910 (SEQ ID NO:910), FIG. 912 (SEQ ID NO:912), FIG. 914 (SEQ ID NO:914), FIG. 916 (SEQ ID NO:916), FIG. 918 (SEQ ID NO:918), FIG. 920 (SEQ ID NO:920), FIG. 922 (SEQ ID NO:922), FIG. 924 (SEQ ID NO:924), FIG. 926 (SEQ ID NO:926), FIG. 928 (SEQ ID NO:928), FIG. 930 (SEQ ID NO:930), FIG. 932 (SEQ ID NO:932), FIG. 934 (SEQ ID NO:934), FIG. 936 (SEQ ID NO:936), FIG. 938 (SEQ ID NO:938), FIG. 940 (SEQ ID NO:940), FIG. 943 (SEQ ID NO:943), FIG. 945 (SEQ ID NO:945), FIG. 947 (SEQ ID NO:947), FIG. 949 (SEQ ID NO:949), FIG. 951 (SEQ ID NO:951), FIG. 953 (SEQ ID NO:953), FIG. 955 (SEQ ID NO:955), FIG. 958 (SEQ ID NO:958), FIG. 960 (SEQ ID NO:960), FIG. 963 (SEQ ID NO:963), FIG. 965 (SEQ ID NO:965), FIG. 968 (SEQ ID NO:968), FIG. 970 (SEQ ID NO:970), FIG. 972 (SEQ ID NO:972), FIG. 974 (SEQ ID NO:974), FIG. 976 (SEQ ID NO:976), FIG. 978 (SEQ ID NO:978), FIG. 980 (SEQ ID NO:980), FIG. 983 (SEQ ID NO:983), FIG. 985 (SEQ ID NO:985), FIG. 987 (SEQ ID NO:987), FIG. 990 (SEQ ID NO:990), FIG. 992 (SEQ ID NO:992), FIG. 994 (SEQ ID NO:994), FIG. 996 (SEQ ID NO:996), FIG. 998 (SEQ ID NO:998), FIG. 1000 (SEQ ID NO:1000), FIG. 1002 (SEQ ID NO:1002), FIG. 1007 (SEQ ID NO:1007), FIG. 1009 (SEQ ID NO:1009), FIG. 1011 (SEQ ID NO:1011), FIG. 1013 (SEQ ID NO:1013), FIG. 1015 (SEQ ID NO:1015), FIG. 1017 (SEQ ID NO:1017), FIG. 1019 (SEQ ID NO:1019), FIG. 1021 (SEQ ID NO:1021), FIG. 1023 (SEQ ID NO:1023), FIG. 1025 (SEQ ID NO:1025), FIG. 1030 (SEQ ID NO:1030), FIG. 1033 (SEQ ID NO:1033), FIG. 1035 (SEQ ID NO:1035), FIG. 1037 (SEQ ID NO:1037), FIG. 1039 (SEQ ID NO:1039), FIG. 1041 (SEQ ID NO:1041), FIG. 1043 (SEQ ID NO:1043), FIG. 1046 (SEQ ID NO:1046), FIG. 1048 (SEQ ID NO:1048), FIG. 1050 (SEQ ID NO:1050), FIG. 1053 (SEQ ID NO:1053), FIG. 1055 (SEQ ID NO:1055), FIG. 1057 (SEQ ID NO:1057), FIG. 1060 (SEQ ID NO:1060), FIG. 1062 (SEQ ID NO:1062), FIG. 1064 (SEQ ID NO:1064), FIG. 1066 (SEQ ID NO:1066), FIG. 1068 (SEQ ID NO:1068), FIG. 1070 (SEQ ID NO:1070), FIG. 1072 (SEQ ID NO:1072), FIG. 1074 (SEQ ID NO:1074), FIG. 1076 (SEQ ID NO:1076), FIG. 1078 (SEQ ID NO:1078), FIG. 1080 (SEQ ID NO:1080), FIG. 1082 (SEQ ID NO:1082), FIG. 1084 (SEQ ID NO:1084), FIG. 1086 (SEQ ID NO:1086), FIG. 1088 (SEQ ID NO:1088), FIG. 1090 (SEQ ID NO:1090), FIG. 1092 (SEQ ID NO:1092), FIG. 1094 (SEQ ID NO:1094), FIG. 1096 (SEQ ID NO:1096), FIG. 1098 (SEQ ID NO:1098), FIG. 1101 (SEQ ID NO:1101), FIG. 1103 (SEQ ID NO:1103), FIG. 1105 (SEQ ID NO:1105), FIG. 1107 (SEQ ID NO:1107), FIG. 1109 (SEQ ID NO:1109), FIG. 1111 (SEQ ID NO:1111), FIG. 1113 (SEQ ID NO:1113), FIG. 1116 (SEQ ID NO:1116), FIG. 1118 (SEQ ID NO:1118), FIG. 1120 (SEQ ID NO:1120), FIG. 1123 (SEQ ID NO:1123), FIG. 1125 (SEQ ID NO:1125), FIG. 1128 (SEQ ID NO:1128), FIG. 1130 (SEQ ID NO:1130), FIG. 1132 (SEQ ID NO:1132), FIG. 1134 (SEQ ID NO:1134), FIG. 1136 (SEQ ID NO:1136), FIG. 1138 (SEQ ID NO:1138), FIG. 1142 (SEQ ID NO:1142), FIG. 1144 (SEQ ID NO:1144), FIG. 1146 (SEQ ID NO:1146), FIG. 1148 (SEQ ID NO:1148), FIG. 1150 (SEQ ID NO:1150), FIG. 1152 (SEQ ID NO:1152), FIG. 1154 (SEQ ID NO:1154), FIG. 1156 (SEQ ID NO:1156), FIG. 1158 (SEQ ID NO:1158), FIG. 1160 (SEQ ID NO:1160), FIG. 1162 (SEQ ID NO:1162), FIG. 1164 (SEQ ID NO:1164), FIG. 1166 (SEQ ID NO:1166), FIG. 1168 (SEQ ID NO:1168), FIG. 1170 (SEQ ID NO:1170), FIG. 1172 (SEQ ID NO:1172), FIG. 1174 (SEQ ID NO:1174), FIG. 1176 (SEQ ID NO:1176), FIG. 1178 (SEQ ID NO:1178), FIG. 1180 (SEQ ID NO:1180), FIG. 1182 (SEQ ID NO:1182), FIG. 1184 (SEQ ID NO:1184), FIG. 1186 (SEQ ID NO:1186), FIG. 1188 (SEQ ID NO:1188), FIG. 1190 (SEQ ID NO:1190), FIG. 1192 (SEQ ID NO:1192), FIG. 1194 (SEQ ID NO:1194), FIG. 1196 (SEQ ID NO:1196), FIG. 1198 (SEQ ID NO:1198), FIG. 1200 (SEQ ID NO:1200), FIG. 1202 (SEQ ID NO:1202), FIG. 1204 (SEQ ID NO:1204), FIG. 1206 (SEQ ID NO:1206), FIG. 1208 (SEQ ID NO:1208), FIG. 1210 (SEQ ID NO:1210), FIG. 1212 (SEQ ID NO:1212), FIG. 1214 (SEQ ID NO:1214), FIG. 1216 (SEQ ID NO:1216), FIG. 1218 (SEQ ID NO:1218), FIG. 1220 (SEQ ID NO:1220), FIG. 1222 (SEQ ID NO:1222), FIG. 1224 (SEQ ID NO:1224), FIG. 1226 (SEQ ID NO:1226), FIG. 1228 (SEQ ID NO:1228), FIG. 1230 (SEQ ID NO:1230), FIG. 1232 (SEQ ID NO:1232), FIG. 1234 (SEQ ID NO:1234), FIG. 1236 (SEQ ID NO:1236), FIG. 1238 (SEQ ID NO:1238), FIG. 1240 (SEQ ID NO:1240), FIG. 1242 (SEQ ID NO:1242), FIG. 1244 (SEQ ID NO:1244), FIG. 1246 (SEQ ID NO:1246), FIG. 1248 (SEQ ID NO:1248), FIG. 1250 (SEQ ID NO:1250), FIG. 1252 (SEQ ID NO:1252), FIG. 1254 (SEQ ID NO:1254), FIG. 1256 (SEQ ID NO:1256), FIG. 1258 (SEQ ID NO:1258), FIG. 1260 (SEQ ID NO:1260), FIG. 1262 (SEQ ID NO:1262), FIG. 1264 (SEQ ID NO:1264), FIG. 1266 (SEQ ID NO:1266), FIG. 1268 (SEQ ID NO:1268), FIG. 1270 (SEQ ID NO:1270), FIG. 1272 (SEQ ID NO:1272), FIG. 1274 (SEQ ID NO:1274), FIG. 1276 (SEQ ID NO:1276), FIG. 1278 (SEQ ID NO:1278), FIG. 1280 (SEQ ID NO:1280), FIG. 1282 (SEQ ID NO:1282), FIG. 1284 (SEQ ID NO:1284), FIG. 1286 (SEQ ID NO:1286), FIG. 1288 (SEQ ID NO:1288), FIG. 1290 (SEQ ID NO:1290), FIG. 1292 (SEQ ID NO:1292), FIG. 1294 (SEQ ID NO:1294), FIG. 1296 (SEQ ID NO:1296), FIG. 1298 (SEQ ID NO:1298), FIG. 1300 (SEQ ID NO:1300), FIG. 1302 (SEQ ID NO:1302), FIG. 1304 (SEQ ID NO:1304), FIG. 1306 (SEQ ID NO:1306), FIG. 1308 (SEQ ID NO:1308), FIG. 1310 (SEQ ID NO:1310), FIG. 1312 (SEQ ID NO:1312), FIG. 1314 (SEQ ID NO:1314), FIG. 1316 (SEQ ID NO:1316), FIG. 1318 (SEQ ID NO:1318), FIG. 1320 (SEQ ID NO:1320), FIG. 1322 (SEQ ID NO:1322), FIG. 1324 (SEQ ID NO:1324), FIG. 1326 (SEQ ID NO:1326), FIG. 1328 (SEQ ID NO:1328), FIG. 1330 (SEQ ID NO:1330), FIG. 1332 (SEQ ID NO:1332), FIG. 1334 (SEQ ID NO:1334), FIG. 1336 (SEQ ID NO:1336), FIG. 1338 (SEQ ID NO:1338), FIG. 1340 (SEQ ID NO:1340), FIG. 1342 (SEQ ID NO:1342), FIG. 1344 (SEQ ID NO:1344), FIG. 1346 (SEQ ID NO:1346), FIG. 1348 (SEQ ID NO:1348), FIG. 1350 (SEQ ID NO:1350), FIG. 1352 (SEQ ID NO:1352), FIG. 1354 (SEQ ID NO:1354), FIG. 1356 (SEQ ID NO:1356), FIG. 1358 (SEQ ID NO:1358), FIG. 1361 (SEQ ID NO:1361), FIG. 1363 (SEQ ID NO:1363), FIG. 1365 (SEQ ID NO:1365), FIG. 1367 (SEQ ID NO:1367), FIG. 1369 (SEQ ID NO:1369), FIG. 1371 (SEQ ID NO:1371), FIG. 1373 (SEQ ID NO:1373), FIG. 1375 (SEQ ID NO:1375), FIG. 1377 (SEQ ID NO:1377), FIG. 1379 (SEQ ID NO:1379), FIG. 1381 (SEQ ID NO:1381), FIG. 1383 (SEQ ID NO:1383), FIG. 1385 (SEQ ID NO:1385), FIG. 1387 (SEQ ID NO:1387), FIG. 1389 (SEQ ID NO:1389), FIG. 1391 (SEQ ID NO:1391), FIG. 1393 (SEQ ID NO:1393), FIG. 1395 (SEQ ID NO:1395), FIG. 1397 (SEQ ID NO:1397), FIG. 1399 (SEQ ID NO:1399), FIG. 1401 (SEQ ID NO:1401), FIG. 1403 (SEQ ID NO:1403), FIG. 1405 (SEQ ID NO:1405), FIG. 1407 (SEQ ID NO:1407), FIG. 1409 (SEQ ID NO:1409), FIG. 1411 (SEQ ID NO:1411), FIG. 1413 (SEQ ID NO:1413), FIG. 1415 (SEQ ID NO:1415), FIG. 1417 (SEQ ID NO:1417), FIG. 1419 (SEQ ID NO:1419), FIG. 1421 (SEQ ID NO:1421), FIG. 1423 (SEQ ID NO:1423), FIG. 1425 (SEQ ID NO:1425), FIG. 1427 (SEQ ID NO:1427), FIG. 1429 (SEQ ID NO:1429), FIG. 1431 (SEQ ID NO:1431), FIG. 1433 (SEQ ID NO:1433), FIG. 1435 (SEQ ID NO:1435), FIG. 1437 (SEQ ID NO:1437), FIG. 1439 (SEQ ID NO:1439), FIG. 1441 (SEQ ID NO:1441), FIG. 1443 (SEQ ID NO:1443), FIG. 1445 (SEQ ID NO:1445), FIG. 1447 (SEQ ID NO:1447), FIG. 1449 (SEQ ID NO:1449), FIG. 1451 (SEQ ID NO:1451), FIG. 1453 (SEQ ID NO:1453), FIG. 1455 (SEQ ID NO:1455), FIG. 1457 (SEQ ID NO:1457), FIG. 1459 (SEQ ID NO:1459), FIG. 1461 (SEQ ID NO:1461), FIG. 1463 (SEQ ID NO:1463), FIG. 1465 (SEQ ID NO:1465), FIG. 1467 (SEQ ID NO:1467), FIG. 1469 (SEQ ID NO:1469), FIG. 1471 (SEQ ID NO:1471), FIG. 1473 (SEQ ID NO:1473), FIG. 1475 (SEQ ID NO:1475), FIG. 1477 (SEQ ID NO:1477), FIG. 1479 (SEQ ID NO:1479), FIG. 1481 (SEQ ID NO:1481), FIG. 1483 (SEQ ID NO:1483), FIG. 1485 (SEQ ID NO:1485), FIG. 1487 (SEQ ID NO:1487), FIG. 1489 (SEQ ID NO:1489), FIG. 1491 (SEQ ID NO:1491), FIG. 1493 (SEQ ID NO:1493), FIG. 1495 (SEQ ID NO:1495), FIG. 1497 (SEQ ID NO:1497), FIG. 1499 (SEQ ID NO:1499), FIG. 1501 (SEQ ID NO:1501), FIG. 1503 (SEQ ID NO:1503), FIG. 1505 (SEQ ID NO:1505), FIG. 1507 (SEQ ID NO:1507), FIG. 1509 (SEQ ID NO:1509), FIG. 1511 (SEQ ID NO:1511), FIG. 1513 (SEQ ID NO:1513), FIG. 1515 (SEQ ID NO:1515), FIG. 1517 (SEQ ID NO:1517), FIG. 1519 (SEQ ID NO:1519), FIG. 1521 (SEQ ID NO:1521), FIG. 1523 (SEQ ID NO:1523), FIG. 1525 (SEQ ID NO:1525), FIG. 1527 (SEQ ID NO:1527), FIG. 1529 (SEQ ID NO:1529), FIG. 1531 (SEQ ID NO:1531), FIG. 1533 (SEQ ID NO:1533), FIG. 1535 (SEQ ID NO:1535), FIG. 1537 (SEQ ID NO:1537), FIG. 1539 (SEQ ID NO:1539), FIG. 1541 (SEQ ID NO:1541), FIG. 1543 (SEQ ID NO:1543), FIG. 1545 (SEQ ID NO:1545), FIG. 1547 (SEQ ID NO:1547), FIG. 1549 (SEQ ID NO:1549), FIG. 1551 (SEQ ID NO:1551), FIG. 1553 (SEQ ID NO:1553), FIG. 1555 (SEQ ID NO:1555), FIG. 1557 (SEQ ID NO:1557), FIG. 1559 (SEQ ID NO:1559), FIG. 1561 (SEQ ID NO:1561), FIG. 1563 (SEQ ID NO:1563), FIG. 1565 (SEQ ID NO:1565), FIG. 1567 (SEQ ID NO:1567), FIG. 1569 (SEQ ID NO:1569), FIG. 1571 (SEQ ID NO:1571), FIG. 1573 (SEQ ID NO:1573), FIG. 1575 (SEQ ID NO:1575), FIG. 1578 (SEQ ID NO:1578), FIG. 1581 (SEQ ID NO:1581), FIG. 1583 (SEQ ID NO:1583), FIG. 1585 (SEQ ID NO:1585), FIG. 1587 (SEQ ID NO:1587), FIG. 1589 (SEQ ID NO:1589), FIG. 1592 (SEQ ID NO:1592), FIG. 1594 (SEQ ID NO:1594), FIG. 1596 (SEQ ID NO:1596), FIG. 1598 (SEQ ID NO:1598), FIG. 1600 (SEQ ID NO:1600), FIG. 1602 (SEQ ID NO:1602), FIG. 1604 (SEQ ID NO:1604), FIG. 1606 (SEQ ID NO:1606), FIG. 1609 (SEQ ID NO:1609), FIG. 1611 (SEQ ID NO:1611), FIG. 1614 (SEQ ID NO:1614), FIG. 1617 (SEQ ID NO:1617), FIG. 1619 (SEQ ID NO:1619), FIG. 1621 (SEQ ID NO:1621), FIG. 1623 (SEQ ID NO:1623), FIG. 1626 (SEQ ID NO:1626), FIG. 1628 (SEQ ID NO:1628), FIG. 1630 (SEQ ID NO:1630), FIG. 1632 (SEQ ID NO:1632), FIG. 1636 (SEQ ID NO:1636), FIG. 1639 (SEQ ID NO:1639), FIG. 1644 (SEQ ID NO:1644), FIG. 1646 (SEQ ID NO:1646), FIG. 1648 (SEQ ID NO:1648), FIG. 1650 (SEQ ID NO:1650), FIG. 1652 (SEQ ID NO:1652), FIG. 1654 (SEQ ID NO:1654), FIG. 1656 (SEQ ID NO:1656), FIG. 1658 (SEQ ID NO:1658), FIG. 1660 (SEQ ID NO:1660), FIG. 1662 (SEQ ID NO:1662), FIG. 1664 (SEQ ID NO:1664), FIG. 1666 (SEQ ID NO:1666), FIG. 1668 (SEQ ID NO:1668), FIG. 1670 (SEQ ID NO:1670), FIG. 1672 (SEQ ID NO:1672), FIG. 1674 (SEQ ID NO:1674), FIG. 1676 (SEQ ID NO:1676), FIG. 1678 (SEQ ID NO:1678), FIG. 1680 (SEQ ID NO:1680), FIG. 1683 (SEQ ID NO:1683), FIG. 1685 (SEQ ID NO:1685), FIG. 1687 (SEQ ID NO:1687), FIG. 1689 (SEQ ID NO:1689), FIG. 1692 (SEQ ID NO:1692), FIG. 1694 (SEQ ID NO:1694), FIG. 1696 (SEQ ID NO:1696), FIG. 1698 (SEQ ID NO:1698), FIG. 1701 (SEQ ID NO:1701), FIG. 1703 (SEQ ID NO:1703), FIG. 1705 (SEQ ID NO:1705), FIG. 1707 (SEQ ID NO:1707), FIG. 1709 (SEQ ID NO:1709), FIG. 1711 (SEQ ID NO:1711), FIG. 1713 (SEQ ID NO:1713), FIG. 1715 (SEQ ID NO:1715), FIG. 1717 (SEQ ID NO:1717), FIG. 1719 (SEQ ID NO:1719), FIG. 1721 (SEQ ID NO:1721), FIG. 1723 (SEQ ID NO:1723), FIG. 1725 (SEQ ID NO:1725), FIG. 1727 (SEQ ID NO:1727), FIG. 1729 (SEQ ID NO:1729), FIG. 1732 (SEQ ID NO:1732), FIG. 1734 (SEQ ID NO:1734), FIG. 1736 (SEQ ID NO:1736), FIG. 1738 (SEQ ID NO:1738), FIG. 1741 (SEQ ID NO:1741), FIG. 1743 (SEQ ID NO:1743), FIG. 1745 (SEQ ID NO:1745), FIG. 1747 (SEQ ID NO:1747), FIG. 1749 (SEQ ID NO:1749), FIG. 1751 (SEQ ID NO:1751), FIG. 1753 (SEQ ID NO:1753), FIG. 1755 (SEQ ID NO:1755), FIG. 1757 (SEQ ID NO:1757), FIG. 1760 (SEQ ID NO:1760), FIG. 1762 (SEQ ID NO:1762), FIG. 1764 (SEQ ID NO:1764), FIG. 1766 (SEQ ID NO:1766), FIG. 1769 (SEQ ID NO:1769), FIG. 1771 (SEQ ID NO:1771), FIG. 1773 (SEQ ID NO:1773), FIG. 1775 (SEQ ID NO:1775), FIG. 1777 (SEQ ID NO:1777), FIG. 1779 (SEQ ID NO:1779), FIG. 1781 (SEQ ID NO:1781), FIG. 1783 (SEQ ID NO:1783), FIG. 1785 (SEQ ID NO:1785), FIG. 1787 (SEQ ID NO:1787), FIG. 1789 (SEQ ID NO:1789), FIG. 1792 (SEQ ID NO:1792), FIG. 1795 (SEQ ID NO:1795), FIG. 1797 (SEQ ID NO:1797), FIG. 1799 (SEQ ID NO:1799), FIG. 1802 (SEQ ID NO:1802), FIG. 1805 (SEQ ID NO:1805), FIG. 1807 (SEQ ID NO:1807), FIG. 1809 (SEQ ID NO:1809), FIG. 1811 (SEQ ID NO:1811), FIG. 1813 (SEQ ID NO:1813), FIG. 1815 (SEQ ID NO:1815), FIG. 1817 (SEQ ID NO:1817), FIG. 1819 (SEQ ID NO:1819), FIG. 1821 (SEQ ID NO:1821), FIG. 1823 (SEQ ID NO:1823), FIG. 1825 (SEQ ID NO:1825), FIG. 1827 (SEQ ID NO:1827), FIG. 1829 (SEQ ID NO:1829), FIG. 1831 (SEQ ID NO:1831), FIG. 1833 (SEQ ID NO:1833), FIG. 1836 (SEQ ID NO:1836), FIG. 1838 (SEQ ID NO:1838), FIG. 1841 (SEQ ID NO:1841), FIG. 1843 (SEQ ID NO:1843), FIG. 1845 (SEQ ID NO:1845), FIG. 1847 (SEQ ID NO:1847), FIG. 1849 (SEQ ID NO:1849), FIG. 1851 (SEQ ID NO:1851), FIG. 1854 (SEQ ID NO:1854), FIG. 1856 (SEQ ID NO:1856), FIG. 1858 (SEQ ID NO:1858), FIG. 1860 (SEQ ID NO:1860), FIG. 1863 (SEQ ID NO:1863), FIG. 1865 (SEQ ID NO:1865), FIG. 1867 (SEQ ID NO:1867), FIG. 1869 (SEQ ID NO:1869), FIG. 1871 (SEQ ID NO:1871), FIG. 1873 (SEQ ID NO:1873), FIG. 1875 (SEQ ID NO:1875), FIG. 1877 (SEQ ID NO:1877), FIG. 1881 (SEQ ID NO:1881), FIG. 1883 (SEQ ID NO:1883), FIG. 1885 (SEQ ID NO:1885), FIG. 1887 (SEQ ID NO:1887), FIG. 1889 (SEQ ID NO:1889), FIG. 1891 (SEQ ID NO:1891), FIG. 1893 (SEQ ID NO:1893), FIG. 1895 (SEQ ID NO:1895), FIG. 1897 (SEQ ID NO:1897), FIG. 1899 (SEQ ID NO:1899), FIG. 1901 (SEQ ID NO:1901), FIG. 1903 (SEQ ID NO:1903), FIG. 1905 (SEQ ID NO:1905), FIG. 1908 (SEQ ID NO:1908), FIG. 1910 (SEQ ID NO:1910), FIG. 1913 (SEQ ID NO:1913), FIG. 1915 (SEQ ID NO:1915), FIG. 1917 (SEQ ID NO:1917), FIG. 1919 (SEQ ID NO:1919), FIG. 1922 (SEQ ID NO:1922), FIG. 1924 (SEQ ID NO:1924), FIG. 1926 (SEQ ID NO:1926), FIG. 1928 (SEQ ID NO:1928), FIG. 1930 (SEQ ID NO:1930), FIG. 1932 (SEQ ID NO:1932), FIG. 1934 (SEQ ID NO:1934), FIG. 1936 (SEQ ID NO:1936), FIG. 1938 (SEQ ID NO:1938), FIG. 1940 (SEQ ID NO:1940), FIG. 1942 (SEQ ID NO:1942), FIG. 1944 (SEQ ID NO:1944), FIG. 1946 (SEQ ID NO:1946), FIG. 1948 (SEQ ID NO:1948), FIG. 1950 (SEQ ID NO:1950), FIG. 1952 (SEQ ID NO:1952), FIG. 1954 (SEQ ID NO:1954), FIG. 1956 (SEQ ID NO:1956), FIG. 1958 (SEQ ID NO:1958), FIG. 1960 (SEQ ID NO:1960), FIG. 1962 (SEQ ID NO:1962), FIG. 1964 (SEQ ID NO:1964), FIG. 1966 (SEQ ID NO:1966), FIG. 1968 (SEQ ID NO:1968), FIG. 1970 (SEQ ID NO:1970), FIG. 1972 (SEQ ID NO:1972), FIG. 1974 (SEQ ID NO:1974), FIG. 1976 (SEQ ID NO:1976), FIG. 1978 (SEQ ID NO:1978), FIG. 1980 (SEQ ID NO:1980), FIG. 1982 (SEQ ID NO:1982), FIG. 1984 (SEQ ID NO:1984), FIG. 1986 (SEQ ID NO:1986), FIG. 1988 (SEQ ID NO:1988), FIG. 1990 (SEQ ID NO:1990), FIG. 1992 (SEQ ID NO:1992), FIG. 1994 (SEQ ID NO:1994), FIG. 1996 (SEQ ID NO:1996), FIG. 1998 (SEQ ID NO:1998), FIG. 2000 (SEQ ID NO:2000), FIG. 2002 (SEQ ID NO:2002), FIG. 2004 (SEQ ID NO:2004), FIG. 2006 (SEQ ID NO:2006), FIG. 2008 (SEQ ID NO:2008), FIG. 2010 (SEQ ID NO:2010), FIG. 2012 (SEQ ID NO:2012), FIG. 2014 (SEQ ID NO:2014), FIG. 2016 (SEQ ID NO:2016), FIG. 2018 (SEQ ID NO:2018), FIG. 2020 (SEQ ID NO:2020), FIG. 2022 (SEQ ID NO:2022), FIG. 2024 (SEQ ID NO:2024), FIG. 2026 (SEQ ID NO:2026), FIG. 2028 (SEQ ID NO:2028), FIG. 2030 (SEQ ID NO:2030), FIG. 2032 (SEQ ID NO:2032), FIG. 2034 (SEQ ID NO:2034), FIG. 2036 (SEQ ID NO:2036), FIG. 2038 (SEQ ID NO:2038), FIG. 2040 (SEQ ID NO:2040), FIG. 2042 (SEQ ID NO:2042), FIG. 2044 (SEQ ID NO:2044), FIG. 2046 (SEQ ID NO:2046), FIG. 2048 (SEQ ID NO:2048), FIG. 2050 (SEQ ID NO:2050), FIG. 2052 (SEQ ID NO:2052), FIG. 2054 (SEQ ID NO:2054), FIG. 2056 (SEQ ID NO:2056), FIG. 2058 (SEQ ID NO:2058), FIG. 2060 (SEQ ID NO:2060), FIG. 2062 (SEQ ID NO:2062), FIG. 2064 (SEQ ID NO:2064), FIG. 2066 (SEQ ID NO:2066), FIG. 2068 (SEQ ID NO:2068), FIG. 2070 (SEQ ID NO:2070), FIG. 2072 (SEQ ID NO:2072), FIG. 2074 (SEQ ID NO:2074), FIG. 2076 (SEQ ID NO:2076), FIG. 2078 (SEQ ID NO:2078), FIG. 2080 (SEQ ID NO:2080), FIG. 2082 (SEQ ID NO:2082), FIG. 2084 (SEQ ID NO:2084), FIG. 2086 (SEQ ID NO:2086), FIG. 2088 (SEQ ID NO:2088), FIG. 2090 (SEQ ID NO:2090), FIG. 2092 (SEQ ID NO:2092), FIG. 2094 (SEQ ID NO:2094), FIG. 2096 (SEQ ID NO:2096), FIG. 2098 (SEQ ID NO:2098), FIG. 2100 (SEQ ID NO:2100), FIG. 2102 (SEQ ID NO:2102), FIG. 2104 (SEQ ID NO:2104), FIG. 2106 (SEQ ID NO:2106), FIG. 2108 (SEQ ID NO:2108), FIG. 2110 (SEQ ID NO:2110), FIG. 2112 (SEQ ID NO:2112), FIG. 2114 (SEQ ID NO:2114), FIG. 2116 (SEQ ID NO:2116), FIG. 2118 (SEQ ID NO:2118), FIG. 2120 (SEQ ID NO:2120), FIG. 2122 (SEQ ID NO:2122), FIG. 2124 (SEQ ID NO:2124), FIG. 2126 (SEQ ID NO:2126), FIG. 2128 (SEQ ID NO:2128), FIG. 2130 (SEQ ID NO:2130), FIG. 2132 (SEQ ID NO:2132), FIG. 2134 (SEQ ID NO:2134), FIG. 2136 (SEQ ID NO:2136), FIG. 2138 (SEQ ID NO:2138), FIG. 2140 (SEQ ID NO:2140), FIG. 2142 (SEQ ID NO:2142), FIG. 2144 (SEQ ID NO:2144), FIG. 2146 (SEQ ID NO:2146), FIG. 2148 (SEQ ID NO:2148), FIG. 2150 (SEQ ID NO:2150), FIG. 2152 (SEQ ID NO:2152), FIG. 2154 (SEQ ID NO:2154), FIG. 2156 (SEQ ID NO:2156), FIG. 2158 (SEQ ID NO:2158), FIG. 2160 (SEQ ID NO:2160), FIG. 2163 (SEQ ID NO:2163), FIG. 2165 (SEQ ID NO:2165), FIG. 2167 (SEQ ID NO:2167), FIG. 2170 (SEQ ID NO:2170), FIG. 2172 (SEQ ID NO:2172), FIG. 2174 (SEQ ID NO:2174), FIG. 2176 (SEQ ID NO:2176), FIG. 2178 (SEQ ID NO:2178), FIG. 2180 (SEQ ID NO:2180), FIG. 2182 (SEQ ID NO:2182), FIG. 2184 (SEQ ID NO:2184), FIG. 2186 (SEQ ID NO:2186), FIG. 2188 (SEQ ID NO:2188), FIG. 2191 (SEQ ID NO:2191), FIG. 2193 (SEQ ID NO:2193), FIG. 2195 (SEQ ID NO:2195), FIG. 2197 (SEQ ID NO:2197), FIG. 2199 (SEQ ID NO:2199), FIG. 2201 (SEQ ID NO:2201), FIG. 2204 (SEQ ID NO:2204), FIG. 2207 (SEQ ID NO:2207), FIG. 2209 (SEQ ID NO:2209), FIG. 2212 (SEQ ID NO:2212), FIG. 2214 (SEQ ID NO:2214), FIG. 2216 (SEQ ID NO:2216), FIG. 2218 (SEQ ID NO:2218), FIG. 2220 (SEQ ID NO:2220), FIG. 2222 (SEQ ID NO:2222), FIG. 2224 (SEQ ID NO:2224), FIG. 2226 (SEQ ID NO:2226), FIG. 2228 (SEQ ID NO:2228), FIG. 2230 (SEQ ID NO:2230), FIG. 2232 (SEQ ID NO:2232), FIG. 2234 (SEQ ID NO:2234), FIG. 2236 (SEQ ID NO:2236), FIG. 2238 (SEQ ID NO:2238), FIG. 2240 (SEQ ID NO:2240), FIG. 2242 (SEQ ID NO:2242), FIG. 2244 (SEQ ID NO:2244), FIG. 2246 (SEQ ID NO:2246), FIG. 2248 (SEQ ID NO:2248), FIG. 2250 (SEQ ID NO:2250), FIG. 2252 (SEQ ID NO:2252), FIG. 2254 (SEQ ID NO:2254), FIG. 2256 (SEQ ID NO:2256), FIG. 2258 (SEQ ID NO:2258), FIG. 2260 (SEQ ID NO:2260), FIG. 2262 (SEQ ID NO:2262), FIG. 2264 (SEQ ID NO:2264), FIG. 2266 (SEQ ID NO:2266), FIG. 2268 (SEQ ID NO:2268), FIG. 2270 (SEQ ID NO:2270), FIG. 2272 (SEQ ID NO:2272), FIG. 2274 (SEQ ID NO:2274), FIG. 2276 (SEQ ID NO:2276), FIG. 2278 (SEQ ID NO:2278), FIG. 2280 (SEQ ID NO:2280), FIG. 2282 (SEQ ID NO:2282), FIG. 2284 (SEQ ID NO:2284), FIG. 2286 (SEQ ID NO:2286), FIG. 2288 (SEQ ID NO:2288), FIG. 2290 (SEQ ID NO:2290), FIG. 2292 (SEQ ID NO:2292), FIG. 2294 (SEQ ID NO:2294), FIG. 2296 (SEQ ID NO:2296), FIG. 2298 (SEQ ID NO:2298), FIG. 2301 (SEQ ID NO:2301), FIG. 2303 (SEQ ID NO:2303), FIG. 2305 (SEQ ID NO:2305), FIG. 2307 (SEQ ID NO:2307), FIG. 2310 (SEQ ID NO:2310), FIG. 2312 (SEQ ID NO:2312), FIG. 2314 (SEQ ID NO:2314), FIG. 2316 (SEQ ID NO:2316), FIG. 2319 (SEQ ID NO:2319), FIG. 2321 (SEQ ID NO:2321), FIG. 2323 (SEQ ID NO:2323), FIG. 2325 (SEQ ID NO:2325), FIG. 2327 A (SEQ ID NO:2327), FIG. 2329 (SEQ ID NO:2329), FIG. 2331 (SEQ ID NO:2331), FIG. 2333 (SEQ ID NO:2333), FIG. 2335 (SEQ ID NO:2335), FIG. 2337 (SEQ ID NO:2337), FIG. 2339 (SEQ ID NO:2339), FIG. 2341 (SEQ ID NO:2341), FIG. 2343 (SEQ ID NO:2343), FIG. 2345 (SEQ ID NO:2345), FIG. 2347 (SEQ ID NO:2347), FIG. 2349 (SEQ ID NO:2349), FIG. 2351 (SEQ ID NO:2351), FIG. 2353 (SEQ ID NO:2353), FIG. 2355 (SEQ ID NO:2355), FIG. 2357 (SEQ ID NO:2357), FIG. 2359 (SEQ ID NO:2359), FIG. 2361 (SEQ ID NO:2361), FIG. 2363 (SEQ ID NO:2363), FIG. 2365 (SEQ ID NO:2365), FIG. 2367 (SEQ ID NO:2367), FIG. 2369 (SEQ ID NO:2369), FIG. 2371 (SEQ ID NO:2371), FIG. 2373 (SEQ ID NO:2373), FIG. 2375 (SEQ ID NO:2375), FIG. 2378 (SEQ ID NO:2378), FIG. 2380 (SEQ ID NO:2380), FIG. 2383 (SEQ ID NO:2383), FIG. 2386 (SEQ ID NO:2386), FIG. 2388 (SEQ ID NO:2388), FIG. 2391 (SEQ ID NO:2391), FIG. 2393 (SEQ ID NO:2393), FIG. 2396 (SEQ ID NO:2396), FIG. 2398 (SEQ ID NO:2398), FIG. 2402 (SEQ ID NO:2402), FIG. 2404 (SEQ ID NO:2404), FIG. 2408 (SEQ ID NO:2408), FIG. 2410 (SEQ ID NO:2410), FIG. 2412 (SEQ ID NO:2412), FIG. 2415 (SEQ ID NO:2415), FIG. 2418 (SEQ ID NO:2418), FIG. 2420 (SEQ ID NO:2420), FIG. 2422 (SEQ ID NO:2422), FIG. 2424 (SEQ ID NO:2424), FIG. 2426 (SEQ ID NO:2426), FIG. 2430 (SEQ ID NO:2430), FIG. 2432 (SEQ ID NO:2432), FIG. 2434 (SEQ ID NO:2434), FIG. 2436 (SEQ ID NO:2436), FIG. 2438 (SEQ ID NO:2438), FIG. 2440 (SEQ ID NO:2440) or FIG. 2442 (SEQ ID NO:2442) said method comprising contacting cells which normally express said polypeptide with a candidate compound, and determining the lack of expression said gene.

25. The method of claim 24, wherein said candidate compound is an antisense nucleic acid.

26. A method of identifying a compound that mimics the activity of a PRO polypeptide of the invention as described in FIG. 2 (SEQ ID NO:2), FIG. 4 (SEQ ID NO:4), FIG. 6 (SEQ ID NO:6), FIG. 8 (SEQ ID NO:8), FIG. 10 (SEQ ID NO:10), FIG. 12 (SEQ ID NO:12), FIG. 14 (SEQ ID NO:14), FIG. 16 (SEQ ID NO:16), FIG. 18 (SEQ ID NO:18), FIG. 20 (SEQ ID NO:20), FIG. 22 (SEQ ID NO:22), FIG. 24 (SEQ ID NO:24), FIG. 26 (SEQ ID NO:26), FIG. 28 (SEQ ID NO:28), FIG. 30 (SEQ ID NO:30), FIG. 32 (SEQ ID NO:32), FIG. 34 (SEQ ID NO:34), FIG. 36 (SEQ ID NO:36), FIG. 38 (SEQ ID NO:38), FIG. 40 (SEQ ID NO:40), FIG. 42 (SEQ ID NO:42), FIG. 44 (SEQ ID NO:44), FIG. 46 (SEQ ID NO:46), FIG. 48 (SEQ ID NO:48), FIG. 50 (SEQ ID NO:50), FIG. 52 (SEQ ID NO:52), FIG. 54 (SEQ ID NO:54), FIG. 56 (SEQ ID NO:56), FIG. 58 (SEQ ID NO:58), FIG. 60 (SEQ ID NO:60), FIG. 62 (SEQ ID NO:62), FIG. 64 (SEQ ID NO:64), FIG. 66 (SEQ ID NO:66), FIG. 68 (SEQ ID NO:68), FIG. 70 (SEQ ID NO:70), FIG. 72 (SEQ ID NO:72), FIG. 74 (SEQ ID NO:74), FIG. 76 (SEQ ID NO:76), FIG. 78 (SEQ ID NO:78), FIG. 80 (SEQ ID NO:80), FIG. 82 (SEQ ID NO:82), FIG. 84 (SEQ ID NO:84), FIG. 86 (SEQ ID NO:86), FIG. 88 (SEQ ID NO:88), FIG. 90 (SEQ ID NO:90), FIG. 92 (SEQ ID NO:92), FIG. 94 (SEQ ID NO:94), FIG. 96 (SEQ ID NO:96), FIG. 98 (SEQ ID NO:98), FIG. 100 (SEQ ID NO:100), FIG. 102 (SEQ ID NO:102), FIG. 104 (SEQ ID NO:104), FIG. 106 (SEQ ID NO:106), FIG. 108 (SEQ ID NO:108), FIG. 110 (SEQ ID NO:110), FIG. 112 (SEQ ID NO:112), FIG. 114 (SEQ ID NO:114), FIG. 116 (SEQ ID NO:116), FIG. 118 (SEQ ID NO:118), FIG. 121 (SEQ ID NO:121), FIG. 123 (SEQ ID NO:123), FIG. 125 (SEQ ID NO:125), FIG. 127 (SEQ ID NO:127), FIG. 129 (SEQ ID NO:129), FIG. 131 (SEQ ID NO:131), FIG. 133 (SEQ ID NO:133), FIG. 135 (SEQ ID NO:135), FIG. 137 (SEQ ID NO:137), FIG. 139 (SEQ ID NO:139), FIG. 141 (SEQ ID NO:141), FIG. 143 (SEQ ID NO:143), FIG. 145 (SEQ ID NO:145), FIG. 147 (SEQ ID NO:147), FIG. 149 (SEQ ID NO:149), FIG. 151 (SEQ ID NO:151), FIG. 153 (SEQ ID NO:153), FIG. 155 (SEQ ID NO:155), FIG. 157 (SEQ ID NO:157), FIG. 159 (SEQ ID NO:159), FIG. 161 (SEQ ID NO:161), FIG. 163 (SEQ ID NO:163), FIG. 165 (SEQ ID NO:165), FIG. 167 (SEQ ID NO:167), FIG. 169 (SEQ ID NO:169), FIG. 171 (SEQ ID NO:171), FIG. 173 (SEQ ID NO:173), FIG. 175 (SEQ ID NO:175), FIG. 177 (SEQ ID NO:177), FIG. 179 (SEQ ID NO:179), FIG. 181 (SEQ ID NO:181), FIG. 183 (SEQ ID NO:183), FIG. 185 (SEQ ID NO:185), FIG. 187 (SEQ ID NO:187), FIG. 189 (SEQ ID NO:189), FIG. 191 (SEQ ID NO:191), FIG. 193 (SEQ ID NO:193), FIG. 195 (SEQ ID NO:195), FIG. 197 (SEQ ID NO:197), FIG. 199 (SEQ ID NO:199), FIG. 201 (SEQ ID NO:201), FIG. 203 (SEQ ID NO:203), FIG. 205 (SEQ ID NO:205), FIG. 207 (SEQ ID NO:207), FIG. 209 (SEQ ID NO:209), FIG. 211 (SEQ ID NO:211), FIG. 213 (SEQ ID NO:213), FIG. 215 (SEQ ID NO:215), FIG. 217 (SEQ ID NO:217), FIG. 219 (SEQ ID NO:219), FIG. 221 (SEQ ID NO:221), FIG. 223 (SEQ ID NO:223), FIG. 225 (SEQ ID NO:225), FIG. 227 (SEQ ID NO:227), FIG. 229 (SEQ ID NO:229), FIG. 231 (SEQ ID NO:231), FIG. 233 (SEQ ID NO:233), FIG. 235 (SEQ ID NO:235), FIG. 237 (SEQ ID NO:237), FIG. 239 (SEQ ID NO:239), FIG. 241 (SEQ ID NO:241), FIG. 243 (SEQ ID NO:243), FIG. 245 (SEQ ID NO:245), FIG. 247 (SEQ ID NO:247), FIG. 249 (SEQ ID NO:249), FIG. 251 (SEQ ID NO:251), FIG. 254 (SEQ ID NO:254), FIG. 256 (SEQ ID NO:256), FIG. 258 (SEQ ID NO:258), FIG. 260 (SEQ ID NO:260), FIG. 262 (SEQ ID NO:262), FIG. 264 (SEQ ID NO:264), FIG. 266 (SEQ ID NO:266), FIG. 268 (SEQ ID NO:268), FIG. 270 (SEQ ID NO:270), FIG. 272 (SEQ ID NO:272), FIG. 274 (SEQ ID NO:274), FIG. 276 (SEQ ID NO:276), FIG. 278 (SEQ ID NO:278), FIG. 280 (SEQ ID NO:280), FIG. 282 (SEQ ID NO:282), FIG. 284 (SEQ ID NO:284), FIG. 286 (SEQ ID NO:286), FIG. 288 (SEQ ID NO:288), FIG. 290 (SEQ ID NO:290), FIG. 292 (SEQ ID NO:292), FIG. 294 (SEQ ID NO:294), FIG. 296 (SEQ ID NO:296), FIG. 298 (SEQ ID NO:298), FIG. 300 (SEQ ID NO:300), FIG. 302 (SEQ ID NO:302), FIG. 304 (SEQ ID NO:304), FIG. 306 (SEQ ID NO:306), FIG. 308 (SEQ ID NO:308), FIG. 310 (SEQ ID NO:310), FIG. 312 (SEQ ID NO:312), FIG. 314 (SEQ ID NO:314), FIG. 316 (SEQ ID NO:316), FIG. 318 (SEQ ID NO:318), FIG. 320 (SEQ ID NO:320), FIG. 322 (SEQ ID NO:322), FIG. 324 (SEQ ID NO:324), FIG. 326 (SEQ ID NO:326), FIG. 328 (SEQ ID NO:328), FIG. 330 (SEQ ID NO:330), FIG. 332 (SEQ ID NO:332), FIG. 334 (SEQ ID NO:334), FIG. 336 (SEQ ID NO:336), FIG. 338 (SEQ ID NO:338), FIG. 340 (SEQ ID NO:340), FIG. 342 (SEQ ID NO:342), FIG. 344 (SEQ ID NO:344), FIG. 346 (SEQ ID NO:346), FIG. 348 (SEQ ID NO:348), FIG. 350 (SEQ ID NO:350), FIG. 352 (SEQ ID NO:352), FIG. 354 (SEQ ID NO:354), FIG. 356 (SEQ ID NO:356), FIG. 358 (SEQ ID NO:358), FIG. 360 (SEQ ID NO:360), FIG. 362 (SEQ ID NO:362), FIG. 364 (SEQ ID NO:364), FIG. 366 (SEQ ID NO:366), FIG. 368 (SEQ ID NO:368), FIG. 370 (SEQ ID NO:370), FIG. 372 (SEQ ID NO:372), FIG. 374 (SEQ ID NO:374), FIG. 376 (SEQ ID NO:376), FIG. 378 (SEQ ID NO:378), FIG. 380 (SEQ ID NO:380), FIG. 382 (SEQ ID NO:382), FIG. 384 (SEQ ID NO:384), FIG. 386 (SEQ ID NO:386), FIG. 388 (SEQ ID NO:388), FIG. 390 (SEQ ID NO:390), FIG. 392 (SEQ ID NO:392), FIG. 394 (SEQ ID NO:394), FIG. 396 (SEQ ID NO:396), FIG. 398 (SEQ ID NO:398), FIG. 400 (SEQ ID NO:400), FIG. 402 (SEQ ID NO:402), FIG. 404 (SEQ ID NO:404), FIG. 406 (SEQ ID NO:406), FIG. 408 (SEQ ID NO:408), FIG. 410 (SEQ ID NO:410), FIG. 412 (SEQ ID NO:412), FIG. 414 (SEQ ID NO:414), FIG. 416 (SEQ ID NO:416), FIG. 418 (SEQ ID NO:418), FIG. 420 (SEQ ID NO:420), FIG. 422 (SEQ ID NO:422), FIG. 424 (SEQ ID NO:424), FIG. 426 (SEQ ID NO:426), FIG. 428 (SEQ ID NO:428), FIG. 430 (SEQ ID NO:430), FIG. 432 (SEQ ID NO:432), FIG. 434 (SEQ ID NO:434), FIG. 436 (SEQ ID NO:436), FIG. 438 (SEQ ID NO:438), FIG. 440 (SEQ ID NO:440), FIG. 442 (SEQ ID NO:442), FIG. 444 (SEQ ID NO:444), FIG. 446 (SEQ ID NO:446), FIG. 448 (SEQ ID NO:448), FIG. 450 (SEQ ID NO:450), FIG. 452 (SEQ ID NO:452), FIG. 454 (SEQ ID NO:454), FIG. 456 (SEQ ID NO:456), FIG. 458 (SEQ ID NO:458), FIG. 460 (SEQ ID NO:460), FIG. 462 (SEQ ID NO:462), FIG. 464 (SEQ ID NO:464), FIG. 466 (SEQ ID NO:466), FIG. 468 (SEQ ID NO:468), FIG. 470 (SEQ ID NO:470), FIG. 472 (SEQ ID NO:472), FIG. 474 (SEQ ID NO:474), FIG. 476 (SEQ ID NO:476), FIG. 478 (SEQ ID NO:478), FIG. 480 (SEQ ID NO:480), FIG. 482 (SEQ ID NO:482), FIG. 484 (SEQ ID NO:484), FIG. 486 (SEQ ID NO:486), FIG. 488 (SEQ ID NO:488), FIG. 490 (SEQ ID NO:490), FIG. 492 (SEQ ID NO:492), FIG. 494 (SEQ ID NO:494), FIG. 496 (SEQ ID NO:496), FIG. 498 (SEQ ID NO:498), FIG. 500 (SEQ ID NO:500), FIG. 502 (SEQ ID NO:502), FIG. 504 (SEQ ID NO:504), FIG. 506 (SEQ ID NO:506), FIG. 508 (SEQ ID NO:508), FIG. 510 (SEQ ID NO:510), FIG. 512 (SEQ ID NO:512), FIG. 514 (SEQ ID NO:514), FIG. 516 (SEQ ID NO:516), FIG. 518 (SEQ ID NO:518), FIG. 520 (SEQ ID NO:520), FIG. 522 (SEQ ID NO:522), FIG. 524 (SEQ ID NO:524), FIG. 526 (SEQ ID NO:526), FIG. 528 (SEQ ID NO:528), FIG. 530 (SEQ ID NO:530), FIG. 532 (SEQ ID NO:532), FIG. 534 (SEQ ID NO:534), FIG. 536 (SEQ ID NO:536), FIG. 538 (SEQ ID NO:538), FIG. 540 (SEQ ID NO:540), FIG. 542 (SEQ ID NO:542), FIG. 544 (SEQ ID NO:544), FIG. 546 (SEQ ID NO:546), FIG. 549 (SEQ ID NO:549), FIG. 551 (SEQ ID NO:551), FIG. 553 (SEQ ID NO:553), FIG. 555 (SEQ ID NO:555), FIG. 557 (SEQ ID NO:557), FIG. 559 (SEQ ID NO:559), FIG. 561 (SEQ ID NO:561), FIG. 563 (SEQ ID NO:563), FIG. 565 (SEQ ID NO:565), FIG. 567 (SEQ ID NO:567), FIG. 569 (SEQ ID NO:569), FIG. 571 (SEQ ID NO:571), FIG. 573 (SEQ ID NO:573), FIG. 575 (SEQ ID NO:575), FIG. 577 (SEQ ID NO:577), FIG. 579 (SEQ ID NO:579), FIG. 581 (SEQ ID NO:581), FIG. 583 (SEQ ID NO:583), FIG. 585 (SEQ ID NO:585), FIG. 587 (SEQ ID NO:587), FIG. 589 (SEQ ID NO:589), FIG. 591 (SEQ ID NO:591), FIG. 593 (SEQ ID NO:593), FIG. 595 (SEQ ID NO:595), FIG. 597 (SEQ ID NO:597), FIG. 599 (SEQ ID NO:599), FIG. 601 (SEQ ID NO:601), FIG. 603 (SEQ ID NO:603), FIG. 605 (SEQ ID NO:605), FIG. 607 (SEQ ID NO:607), FIG. 609 (SEQ ID NO:609), FIG. 611 (SEQ ID NO:611), FIG. 613 (SEQ ID NO:613), FIG. 615 (SEQ ID NO:615), FIG. 617 (SEQ ID NO:617), FIG. 619 (SEQ ID NO:619), FIG. 621 (SEQ ID NO:621), FIG. 623 (SEQ ID NO:623), FIG. 625 (SEQ ID NO:625), FIG. 627 (SEQ ID NO:627), FIG. 629 (SEQ ID NO:629), FIG. 631 (SEQ ID NO:631), FIG. 633 (SEQ ID NO:633), FIG. 635 (SEQ ID NO:635), FIG. 637 (SEQ ID NO:637), FIG. 639 (SEQ ID NO:639), FIG. 641 (SEQ ID NO:641), FIG. 643 (SEQ ID NO:643), FIG. 645 (SEQ ID NO:645), FIG. 647 (SEQ ID NO:647), FIG. 649 (SEQ ID NO:649), FIG. 651 (SEQ ID NO:651), FIG. 653 (SEQ ID NO:653), FIG. 655 (SEQ ID NO:655), FIG. 657 (SEQ ID NO:657), FIG. 659 (SEQ ID NO:659), FIG. 661 (SEQ ID NO:661), FIG. 663 (SEQ ID NO:663), FIG. 665 (SEQ ID NO:665), FIG. 667 (SEQ ID NO:667), FIG. 669 (SEQ ID NO:669), FIG. 671 (SEQ ID NO:671), FIG. 673 (SEQ ID NO:673), FIG. 675 (SEQ ID NO:675), FIG. 677 (SEQ ID NO:377), FIG. 679 (SEQ ID NO:679), FIG. 681 (SEQ ID NO:681), FIG. 683 (SEQ ID NO:683), FIG. 685 (SEQ ID NO:685), FIG. 687 (SEQ ID NO:687), FIG. 689 (SEQ ID NO:689), FIG. 691 (SEQ ID NO:691), FIG. 693 (SEQ ID NO:693), FIG. 695 (SEQ ID NO:695), FIG. 697 (SEQ ID NO:697), FIG. 699 (SEQ ID NO:699), FIG. 701 (SEQ ID NO:701), FIG. 703 (SEQ ID NO:703), FIG. 705 (SEQ ID NO:705), FIG. 707 (SEQ ID NO:707), FIG. 709 (SEQ ID NO:709), FIG. 711 (SEQ ID NO:711), FIG. 713 (SEQ ID NO:713), FIG. 715 (SEQ ID NO:715), FIG. 717 (SEQ ID NO:717), FIG. 719 (SEQ ID NO:719), FIG. 721 (SEQ ID NO:721), FIG. 723 (SEQ ID NO:723), FIG. 725 (SEQ ID NO:725), FIG. 727 (SEQ ID NO:727), FIG. 729 (SEQ ID NO:729), FIG. 731 (SEQ ID NO:731), FIG. 733 (SEQ ID NO:733), FIG. 735 (SEQ ID NO:735), FIG. 737 (SEQ ID NO:737), FIG. 739 (SEQ ID NO:739), FIG. 741 (SEQ ID NO:741), FIG. 743 (SEQ ID NO:743), FIG. 745 (SEQ ID NO:745), FIG. 747 (SEQ ID NO:747), FIG. 749 (SEQ ID NO:749), FIG. 751 (SEQ ID NO:751), FIG. 753 (SEQ ID NO:753), FIG. 755 (SEQ ID NO:755), FIG. 757 (SEQ ID NO:757), FIG. 759 (SEQ ID NO:759), FIG. 761 (SEQ ID NO:761), FIG. 763 (SEQ ID NO:763), FIG. 765 (SEQ ID NO:765), FIG. 767 (SEQ ID NO:767), FIG. 769 (SEQ ID NO:769), FIG. 771 (SEQ ID NO:771), FIG. 773 (SEQ ID NO:773), FIG. 775 (SEQ ID NO:775), FIG. 777 (SEQ ID NO:777), FIG. 779 (SEQ ID NO:779), FIG. 781 (SEQ ID NO:781), FIG. 783 (SEQ ID NO:783), FIG. 785 (SEQ ID NO:785), FIG. 787 (SEQ ID NO:787), FIG. 789 (SEQ ID NO:789), FIG. 791 (SEQ ID NO:791), FIG. 793 (SEQ ID NO:793), FIG. 795 (SEQ ID NO:795), FIG. 797 (SEQ ID NO:797), FIG. 799 (SEQ ID NO:799), FIG. 801 (SEQ ID NO:801), FIG. 803 (SEQ ID NO:803), FIG. 805 (SEQ ID NO:805), FIG. 807 (SEQ ID NO:807), FIG. 809 (SEQ ID NO:809), FIG. 811 (SEQ ID NO:811), FIG. 813 (SEQ ID NO:813), FIG. 815 (SEQ ID NO:815), FIG. 817 (SEQ ID NO:817), FIG. 819 (SEQ ID NO:819), FIG. 821 (SEQ ID NO:821), FIG. 823 (SEQ ID NO:823), FIG. 825 (SEQ ID NO:825), FIG. 827 (SEQ ID NO:827), FIG. 829 (SEQ ID NO:829), FIG. 831 (SEQ ID NO:831), FIG. 833 (SEQ ID NO:833), FIG. 835 (SEQ ID NO:835), FIG. 837 (SEQ ID NO:837), FIG. 839 (SEQ ID NO:839), FIG. 841 (SEQ ID NO:841), FIG. 843 (SEQ ID NO:843), FIG. 845 (SEQ ID NO:845), FIG. 847 (SEQ ID NO:847), FIG. 849 (SEQ ID NO:849), FIG. 851 (SEQ ID NO:851), FIG. 853 (SEQ ID NO:853), FIG. 855 (SEQ ID NO:855), FIG. 858 (SEQ ID NO:858), FIG. 860 (SEQ ID NO:860), FIG. 862 (SEQ ID NO:862), FIG. 864 (SEQ ID NO:864), FIG. 866 (SEQ ID NO:866), FIG. 868 (SEQ ID NO:868), FIG. 870 (SEQ ID NO:870), FIG. 872 (SEQ ID NO:872), FIG. 874 (SEQ ID NO:874), FIG. 876 (SEQ ID NO:876), FIG. 878 (SEQ ID NO:878), FIG. 880 (SEQ ID NO:880), FIG. 882 (SEQ ID NO:882), FIG. 884 (SEQ ID NO:884), FIG. 886 (SEQ ID NO:886), FIG. 888 (SEQ ID NO:888), FIG. 890 (SEQ ID NO:890), FIG. 892 (SEQ ID NO:892), FIG. 894 (SEQ ID NO:894), FIG. 896 (SEQ ID NO:896), FIG. 898 (SEQ ID NO:898), FIG. 900 (SEQ ID NO:900), FIG. 902 (SEQ ID NO:902), FIG. 904 (SEQ ID NO:904), FIG. 906 (SEQ ID NO:906), FIG. 908 (SEQ ID NO:908), FIG. 910 (SEQ ID NO:910), FIG. 912 (SEQ ID NO:912), FIG. 914 (SEQ ID NO:914), FIG. 916 (SEQ ID NO:916), FIG. 918 (SEQ ID NO:918), FIG. 920 (SEQ ID NO:920), FIG. 922 (SEQ ID NO:922), FIG. 924 (SEQ ID NO:924), FIG. 926 (SEQ ID NO:926), FIG. 928 (SEQ ID NO:928), FIG. 930 (SEQ ID NO:930), FIG. 932 (SEQ ID NO:932), FIG. 934 (SEQ ID NO:934), FIG. 936 (SEQ ID NO:936), FIG. 938 (SEQ ID NO:938), FIG. 940 (SEQ ID NO:940), FIG. 943 (SEQ ID NO:943), FIG. 945 (SEQ ID NO:945), FIG. 947 (SEQ ID NO:947), FIG. 949 (SEQ ID NO:949), FIG. 951 (SEQ ID NO:951), FIG. 953 (SEQ ID NO:953), FIG. 955 (SEQ ID NO:955), FIG. 958 (SEQ ID NO:958), FIG. 960 (SEQ ID NO:960), FIG. 963 (SEQ ID NO:963), FIG. 965 (SEQ ID NO:965), FIG. 968 (SEQ ID NO:968), FIG. 970 (SEQ ID NO:970), FIG. 972 (SEQ ID NO:972), FIG. 974 (SEQ ID NO:974), FIG. 976 (SEQ ID NO:976), FIG. 978 (SEQ ID NO:978), FIG. 980 (SEQ ID NO:980), FIG. 983 (SEQ ID NO:983), FIG. 985 (SEQ ID NO:985), FIG. 987 (SEQ ID NO:987), FIG. 990 (SEQ ID NO:990), FIG. 992 (SEQ ID NO:992), FIG. 994 (SEQ ID NO:994), FIG. 996 (SEQ ID NO:996), FIG. 998 (SEQ ID NO:998), FIG. 1000 (SEQ ID NO:1000), FIG. 1002 (SEQ ID NO:1002), FIG. 1007 (SEQ ID NO:1007), FIG. 1009 (SEQ ID NO:1009), FIG. 1011 (SEQ ID NO:1011), FIG. 1013 (SEQ ID NO:1013), FIG. 1015 (SEQ ID NO:1015), FIG. 1017 (SEQ ID NO:1017), FIG. 1019 (SEQ ID NO:1019), FIG. 1021 (SEQ ID NO:1021), FIG. 1023 (SEQ ID NO:1023), FIG. 1025 (SEQ ID NO:1025), FIG. 1030 (SEQ ID NO:1030), FIG. 1033 (SEQ ID NO:1033), FIG. 1035 (SEQ ID NO:1035), FIG. 1037 (SEQ ID NO:1037), FIG. 1039 (SEQ ID NO:1039), FIG. 1041 (SEQ ID NO:1041), FIG. 1043 (SEQ ID NO:1043), FIG. 1046 (SEQ ID NO:1046), FIG. 1048 (SEQ ID NO:1048), FIG. 1050 (SEQ ID NO:1050), FIG. 1053 (SEQ ID NO:1053), FIG. 1055 (SEQ ID NO:1055), FIG. 1057 (SEQ ID NO:1057), FIG. 1060 (SEQ ID NO:1060), FIG. 1062 (SEQ ID NO:1062), FIG. 1064 (SEQ ID NO:1064), FIG. 1066 (SEQ ID NO:1066), FIG. 1068 (SEQ ID NO:1068), FIG. 1070 (SEQ ID NO:1070), FIG. 1072 (SEQ ID NO:1072), FIG. 1074 (SEQ ID NO:1074), FIG. 1076 (SEQ ID NO:1076), FIG. 1078 (SEQ ID NO:1078), FIG. 1080 (SEQ ID NO:1080), FIG. 1082 (SEQ ID NO:1082), FIG. 1084 (SEQ ID NO:1084), FIG. 1086 (SEQ ID NO:1086), FIG. 1088 (SEQ ID NO:1088), FIG. 1090 (SEQ ID NO:1090), FIG. 1092 (SEQ ID NO:1092), FIG. 1094 (SEQ ID NO:1094), FIG. 1096 (SEQ ID NO:1096), FIG. 1098 (SEQ ID NO:1098), FIG. 1101 (SEQ ID NO:1101), FIG. 1103 (SEQ ID NO:1103), FIG. 1105 (SEQ ID NO:1105), FIG. 1107 (SEQ ID NO:1107), FIG. 1109 (SEQ ID NO:1109), FIG. 1111 (SEQ ID NO:1111), FIG. 1113 (SEQ ID NO:1113), FIG. 1116 (SEQ ID NO:1116), FIG. 1118 (SEQ ID NO:1118), FIG. 1120 (SEQ ID NO:1120), FIG. 1123 (SEQ ID NO:1123), FIG. 1125 (SEQ ID NO:1125), FIG. 1128 (SEQ ID NO:1128), FIG. 1130 (SEQ ID NO:1130), FIG. 1132 (SEQ ID NO:1132), FIG. 1134 (SEQ ID NO:1134), FIG. 1136 (SEQ ID NO:1136), FIG. 1138 (SEQ ID NO:1138), FIG. 1142 (SEQ ID NO:1142), FIG. 1144 (SEQ ID NO:1144), FIG. 1146 (SEQ ID NO:1146), FIG. 1148 (SEQ ID NO:1148), FIG. 1150 (SEQ ID NO:1150), FIG. 1152 (SEQ ID NO:1152), FIG. 1154 (SEQ ID NO:1154), FIG. 1156 (SEQ ID NO:1156), FIG. 1158 (SEQ ID NO:1158), FIG. 1160 (SEQ ID NO:1160), FIG. 1162 (SEQ ID NO:1162), FIG. 1164 (SEQ ID NO:1164), FIG. 1166 (SEQ ID NO:1166), FIG. 1168 (SEQ ID NO:1168), FIG. 1170 (SEQ ID NO:1170), FIG. 1172 (SEQ ID NO:1172), FIG. 1174 (SEQ ID NO:1174), FIG. 1176 (SEQ ID NO:1176), FIG. 1178 (SEQ ID NO:1178), FIG. 1180 (SEQ ID NO:1180), FIG. 1182 (SEQ ID NO:1182), FIG. 1184 (SEQ ID NO:1184), FIG. 1186 (SEQ ID NO:1186), FIG. 1188 (SEQ ID NO:1188), FIG. 1190 (SEQ ID NO:1190), FIG. 1192 (SEQ ID NO:1192), FIG. 1194 (SEQ ID NO:1194), FIG. 1196 (SEQ ID NO:1196), FIG. 1198 (SEQ ID NO:1198), FIG. 1200 (SEQ ID NO:1200), FIG. 1202 (SEQ ID NO:1202), FIG. 1204 (SEQ ID NO:1204), FIG. 1206 (SEQ ID NO:1206), FIG. 1208 (SEQ ID NO:1208), FIG. 1210 (SEQ ID NO:1210), FIG. 1212 (SEQ ID NO:1212), FIG. 1214 (SEQ ID NO:1214), FIG. 1216 (SEQ ID NO:1216), FIG. 1218 (SEQ ID NO:1218), FIG. 1220 (SEQ ID NO:1220), FIG. 1222 (SEQ ID NO:1222), FIG. 1224 (SEQ ID NO:1224), FIG. 1226 (SEQ ID NO:1226), FIG. 1228 (SEQ ID NO:1228), FIG. 1230 (SEQ ID NO:1230), FIG. 1232 (SEQ ID NO:1232), FIG. 1234 (SEQ ID NO:1234), FIG. 1236 (SEQ ID NO:1236), FIG. 1238 (SEQ ID NO:1238), FIG. 1240 (SEQ ID NO:1240), FIG. 1242 (SEQ ID NO:1242), FIG. 1244 (SEQ ID NO:1244), FIG. 1246 (SEQ ID NO:1246), FIG. 1248 (SEQ ID NO:1248), FIG. 1250 (SEQ ID NO:1250), FIG. 1252 (SEQ ID NO:1252), FIG. 1254 (SEQ ID NO:1254), FIG. 1256 (SEQ ID NO:1256), FIG. 1258 (SEQ ID NO:1258), FIG. 1260 (SEQ ID NO:1260), FIG. 1262 (SEQ ID NO:1262), FIG. 1264 (SEQ ID NO:1264), FIG. 1266 (SEQ ID NO:1266), FIG. 1268 (SEQ ID NO:1268), FIG. 1270 (SEQ ID NO:1270), FIG. 1272 (SEQ ID NO:1272), FIG. 1274 (SEQ ID NO:1274), FIG. 1276 (SEQ ID NO:1276), FIG. 1278 (SEQ ID NO:1278), FIG. 1280 (SEQ ID NO:1280), FIG. 1282 (SEQ ID NO:1282), FIG. 1284 (SEQ ID NO:1284), FIG. 1286 (SEQ ID NO:1286), FIG. 1288 (SEQ ID NO:1288), FIG. 1290 (SEQ ID NO:1290), FIG. 1292 (SEQ ID NO:1292), FIG. 1294 (SEQ ID NO:1294), FIG. 1296 (SEQ ID NO:1296), FIG. 1298 (SEQ ID NO:1298), FIG. 1300 (SEQ ID NO:1300), FIG. 1302 (SEQ ID NO:1302), FIG. 1304 (SEQ ID NO:1304), FIG. 1306 (SEQ ID NO:1306), FIG. 1308 (SEQ ID NO:1308), FIG. 1310 (SEQ ID NO:1310), FIG. 1312 (SEQ ID NO:1312), FIG. 1314 (SEQ ID NO:1314), FIG. 1316 (SEQ ID NO:1316), FIG. 1318 (SEQ ID NO:1318), FIG. 1320 (SEQ ID NO:1320), FIG. 1322 (SEQ ID NO:1322), FIG. 1324 (SEQ ID NO:1324), FIG. 1326 (SEQ ID NO:1326), FIG. 1328 (SEQ ID NO:1328), FIG. 1330 (SEQ ID NO:1330), FIG. 1332 (SEQ ID NO:1332), FIG. 1334 (SEQ ID NO:1334), FIG. 1336 (SEQ ID NO:1336), FIG. 1338 (SEQ ID NO:1338), FIG. 1340 (SEQ ID NO:1340), FIG. 1342 (SEQ ID NO:1342), FIG. 1344 (SEQ ID NO:1344), FIG. 1346 (SEQ ID NO:1346), FIG. 1348 (SEQ ID NO:1348), FIG. 1350 (SEQ ID NO:1350), FIG. 1352 (SEQ ID NO:1352), FIG. 1354 (SEQ ID NO:1354), FIG. 1356 (SEQ ID NO:1356), FIG. 1358 (SEQ ID NO:1358), FIG. 1361 (SEQ ID NO:1361), FIG. 1363 (SEQ ID NO:1363), FIG. 1365 (SEQ ID NO:1365), FIG. 1367 (SEQ ID NO:1367), FIG. 1369 (SEQ ID NO:1369), FIG. 1371 (SEQ ID NO:1371), FIG. 1373 (SEQ ID NO:1373), FIG. 1375 (SEQ ID NO:1375), FIG. 1377 (SEQ ID NO:1377), FIG. 1379 (SEQ ID NO:1379), FIG. 1381 (SEQ ID NO:1381), FIG. 1383 (SEQ ID NO:1383), FIG. 1385 (SEQ ID NO:1385), FIG. 1387 (SEQ ID NO:1387), FIG. 1389 (SEQ ID NO:1389), FIG. 1391 (SEQ ID NO:1391), FIG. 1393 (SEQ ID NO:1393), FIG. 1395 (SEQ ID NO:1395), FIG. 1397 (SEQ ID NO:1397), FIG. 1399 (SEQ ID NO:1399), FIG. 1401 (SEQ ID NO:1401), FIG. 1403 (SEQ ID NO:1403), FIG. 1405 (SEQ ID NO:1405), FIG. 1407 (SEQ ID NO:1407), FIG. 1409 (SEQ ID NO:1409), FIG. 1411 (SEQ ID NO:1411), FIG. 1413 (SEQ ID NO:1413), FIG. 1415 (SEQ ID NO:1415), FIG. 1417 (SEQ ID NO:1417), FIG. 1419 (SEQ ID NO:1419), FIG. 1421 (SEQ ID NO:1421), FIG. 1423 (SEQ ID NO:1423), FIG. 1425 (SEQ ID NO:1425), FIG. 1427 (SEQ ID NO:1427), FIG. 1429 (SEQ ID NO:1429), FIG. 1431 (SEQ ID NO:1431), FIG. 1433 (SEQ ID NO:1433), FIG. 1435 (SEQ ID NO:1435), FIG. 1437 (SEQ ID NO:1437), FIG. 1439 (SEQ ID NO:1439), FIG. 1441 (SEQ ID NO:1441), FIG. 1443 (SEQ ID NO:1443), FIG. 1445 (SEQ ID NO:1445), FIG. 1447 (SEQ ID NO:1447), FIG. 1449 (SEQ ID NO:1449), FIG. 1451 (SEQ ID NO:1451), FIG. 1453 (SEQ ID NO:1453), FIG. 1455 (SEQ ID NO:1455), FIG. 1457 (SEQ ID NO:1457), FIG. 1459 (SEQ ID NO:1459), FIG. 1461 (SEQ ID NO:1461), FIG. 1463 (SEQ ID NO:1463), FIG. 1465 (SEQ ID NO:1465), FIG. 1467 (SEQ ID NO:1467), FIG. 1469 (SEQ ID NO:1469), FIG. 1471 (SEQ ID NO:1471), FIG. 1473 (SEQ ID NO:1473), FIG. 1475 (SEQ ID NO:1475), FIG. 1477 (SEQ ID NO:1477), FIG. 1479 (SEQ ID NO:1479), FIG. 1481 (SEQ ID NO:1481), FIG. 1483 (SEQ ID NO:1483), FIG. 1485 (SEQ ID NO:1485), FIG. 1487 (SEQ ID NO:1487), FIG. 1489 (SEQ ID NO:1489), FIG. 1491 (SEQ ID NO:1491), FIG. 1493 (SEQ ID NO:1493), FIG. 1495 (SEQ ID NO:1495), FIG. 1497 (SEQ ID NO:1497), FIG. 1499 (SEQ ID NO:1499), FIG. 1501 (SEQ ID NO:1501), FIG. 1503 (SEQ ID NO:1503), FIG. 1505 (SEQ ID NO:1505), FIG. 1507 (SEQ ID NO:1507), FIG. 1509 (SEQ ID NO:1509), FIG. 1511 (SEQ ID NO:1511), FIG. 1513 (SEQ ID NO:1513), FIG. 1515 (SEQ ID NO:1515), FIG. 1517 (SEQ ID NO:1517), FIG. 1519 (SEQ ID NO:1519), FIG. 1521 (SEQ ID NO:1521), FIG. 1523 (SEQ ID NO:1523), FIG. 1525 (SEQ ID NO:1525), FIG. 1527 (SEQ ID NO:1527), FIG. 1529 (SEQ ID NO:1529), FIG. 1531 (SEQ ID NO:1531), FIG. 1533 (SEQ ID NO:1533), FIG. 1535 (SEQ ID NO:1535), FIG. 1537 (SEQ ID NO:1537), FIG. 1539 (SEQ ID NO:1539), FIG. 1541 (SEQ ID NO:1541), FIG. 1543 (SEQ ID NO:1543), FIG. 1545 (SEQ ID NO:1545), FIG. 1547 (SEQ ID NO:1547), FIG. 1549 (SEQ ID NO:1549), FIG. 1551 (SEQ ID NO:1551), FIG. 1553 (SEQ ID NO:1553), FIG. 1555 (SEQ ID NO:1555), FIG. 1557 (SEQ ID NO:1557), FIG. 1559 (SEQ ID NO:1559), FIG. 1561 (SEQ ID NO:1561), FIG. 1563 (SEQ ID NO:1563), FIG. 1565 (SEQ ID NO:1565), FIG. 1567 (SEQ ID NO:1567), FIG. 1569 (SEQ ID NO:1569), FIG. 1571 (SEQ ID NO:1571), FIG. 1573 (SEQ ID NO:1573), FIG. 1575 (SEQ ID NO:1575), FIG. 1578 (SEQ ID NO:1578), FIG. 1581 (SEQ ID NO:1581), FIG. 1583 (SEQ ID NO:1583), FIG. 1585 (SEQ ID NO:1585), FIG. 1587 (SEQ ID NO:1587), FIG. 1589 (SEQ ID NO:1589), FIG. 1592 (SEQ ID NO:1592), FIG. 1594 (SEQ ID NO:1594), FIG. 1596 (SEQ ID NO:1596), FIG. 1598 (SEQ ID NO:1598), FIG. 1600 (SEQ ID NO:1600), FIG. 1602 (SEQ ID NO:1602), FIG. 1604 (SEQ ID NO:1604), FIG. 1606 (SEQ ID NO:1606), FIG. 1609 (SEQ ID NO:1609), FIG. 1611 (SEQ ID NO:1611), FIG. 1614 (SEQ ID NO:1614), FIG. 1617 (SEQ ID NO:1617), FIG. 1619 (SEQ ID NO:1619), FIG. 1621 (SEQ ID NO:1621), FIG. 1623 (SEQ ID NO:1623), FIG. 1626 (SEQ ID NO:1626), FIG. 1628 (SEQ ID NO:1628), FIG. 1630 (SEQ ID NO:1630), FIG. 1632 (SEQ ID NO:1632), FIG. 1636 (SEQ ID NO:1636), FIG. 1639 (SEQ ID NO:1639), FIG. 1644 (SEQ ID NO:1644), FIG. 1646 (SEQ ID NO:1646), FIG. 1648 (SEQ ID NO:1648), FIG. 1650 (SEQ ID NO:1650), FIG. 1652 (SEQ ID NO:1652), FIG. 1654 (SEQ ID NO:1654), FIG. 1656 (SEQ ID NO:1656), FIG. 1658 (SEQ ID NO:1658), FIG. 1660 (SEQ ID NO:1660), FIG. 1662 (SEQ ID NO:1662), FIG. 1664 (SEQ ID NO:1664), FIG. 1666 (SEQ ID NO:1666), FIG. 1668 (SEQ ID NO:1668), FIG. 1670 (SEQ ID NO:1670), FIG. 1672 (SEQ ID NO:1672), FIG. 1674 (SEQ ID NO:1674), FIG. 1676 (SEQ ID NO:1676), FIG. 1678 (SEQ ID NO:1678), FIG. 1680 (SEQ ID NO:1680), FIG. 1683 (SEQ ID NO:1683), FIG. 1685 (SEQ ID NO:1685), FIG. 1687 (SEQ ID NO:1687), FIG. 1689 (SEQ ID NO:1689), FIG. 1692 (SEQ ID NO:1692), FIG. 1694 (SEQ ID NO:1694), FIG. 1696 (SEQ ID NO:1696), FIG. 1698 (SEQ ID NO:1698), FIG. 1701 (SEQ ID NO:1701), FIG. 1703 (SEQ ID NO:1703), FIG. 1705 (SEQ ID NO:1705), FIG. 1707 (SEQ ID NO:1707), FIG. 1709 (SEQ ID NO:1709), FIG. 1711 (SEQ ID NO:1711), FIG. 1713 (SEQ ID NO:1713), FIG. 1715 (SEQ ID NO:1715), FIG. 1717 (SEQ ID NO:1717), FIG. 1719 (SEQ ID NO:1719), FIG. 1721 (SEQ ID NO:1721), FIG. 1723 (SEQ ID NO:1723), FIG. 1725 (SEQ ID NO:1725), FIG. 1727 (SEQ ID NO:1727), FIG. 1729 (SEQ ID NO:1729), FIG. 1732 (SEQ ID NO:1732), FIG. 1734 (SEQ ID NO:1734), FIG. 1736 (SEQ ID NO:1736), FIG. 1738 (SEQ ID NO:1738), FIG. 1741 (SEQ ID NO:1741), FIG. 1743 (SEQ ID NO:1743), FIG. 1745 (SEQ ID NO:1745), FIG. 1747 (SEQ ID NO:1747), FIG. 1749 (SEQ ID NO:1749), FIG. 1751 (SEQ ID NO:1751), FIG. 1753 (SEQ ID NO:1753), FIG. 1755 (SEQ ID NO:1155), FIG. 1757 (SEQ ID NO:1757), FIG. 1760 (SEQ ID NO:1760), FIG. 1762 (SEQ ID NO:1762), FIG. 1764 (SEQ ID NO:1764), FIG. 1766 (SEQ ID NO:1766), FIG. 1769 (SEQ ID NO:1769), FIG. 1771 (SEQ ID NO:1771), FIG. 1773 (SEQ ID NO:1773), FIG. 1775 (SEQ ID NO:1775), FIG. 1777 (SEQ ID NO:1777), FIG. 1779 (SEQ ID NO:1779), FIG. 1781 (SEQ ID NO:1781), FIG. 1783 (SEQ ID NO:1783), FIG. 1785 (SEQ ID NO:1785), FIG. 1787 (SEQ ID NO:1787), FIG. 1789 (SEQ ID NO:1789), FIG. 1792 (SEQ ID NO:1792), FIG. 1795 (SEQ ID NO:1795), FIG. 1797 (SEQ ID NO:1797), FIG. 1799 (SEQ ID NO:1799), FIG. 1802 (SEQ ID NO:1802), FIG. 1805 (SEQ ID NO:1805), FIG. 1807 (SEQ ID NO:1807), FIG. 1809 (SEQ ID NO:1809), FIG. 1811 (SEQ ID NO:1811), FIG. 1813 (SEQ ID NO:1813), FIG. 1815 (SEQ ID NO:1815), FIG. 1817 (SEQ ID NO:1817), FIG. 1819 (SEQ ID NO:1819), FIG. 1821 (SEQ ID NO:1821), FIG. 1823 (SEQ ID NO:1823), FIG. 1825 (SEQ ID NO:1825), FIG. 1827 (SEQ ID NO:1827), FIG. 1829 (SEQ ID NO:1829), FIG. 1831 (SEQ ID NO:1831), FIG. 1833 (SEQ ID NO:1833), FIG. 1836 (SEQ ID NO:1836), FIG. 1838 (SEQ ID NO:1838), FIG. 1841 (SEQ ID NO:1841), FIG. 1843 (SEQ ID NO:1843), FIG. 1845 (SEQ ID NO:1845), FIG. 1847 (SEQ ID NO:1847), FIG. 1849 (SEQ ID NO:1849), FIG. 1851 (SEQ ID NO:1851), FIG. 1854 (SEQ ID NO:1854), FIG. 1856 (SEQ ID NO:1856), FIG. 1858 (SEQ ID NO:1858), FIG. 1860 (SEQ ID NO:1860), FIG. 1863 (SEQ ID NO:1863), FIG. 1865 (SEQ ID NO:1865), FIG. 1867 (SEQ ID NO:1867), FIG. 1869 (SEQ ID NO:1869), FIG. 1871 (SEQ ID NO:1871), FIG. 1873 (SEQ ID NO:1873), FIG. 1875 (SEQ ID NO:1875), FIG. 1877 (SEQ ID NO:1877), FIG. 1881 (SEQ ID NO:1881), FIG. 1883 (SEQ ID NO:1883), FIG. 1885 (SEQ ID NO:1885), FIG. 1887 (SEQ ID NO:1887), FIG. 1889 (SEQ ID NO:1889), FIG. 1891 (SEQ ID NO:1891), FIG. 1893 (SEQ ID NO:1893), FIG. 1895 (SEQ ID NO:1895), FIG. 1897 (SEQ ID NO:1897), FIG. 1899 (SEQ ID NO:1899), FIG. 1901 (SEQ ID NO:1901), FIG. 1903 (SEQ ID NO:1903), FIG. 1905 (SEQ ID NO:1905), FIG. 1908 (SEQ ID NO:1908), FIG. 1910 (SEQ ID NO:1910), FIG. 1913 (SEQ ID NO:1913), FIG. 1915 (SEQ ID NO:1915), FIG. 1917 (SEQ ID NO:1917), FIG. 1919 (SEQ ID NO:1919), FIG. 1922 (SEQ ID NO:1922), FIG. 1924 (SEQ ID NO:1924), FIG. 1926 (SEQ ID NO:1926), FIG. 1928 (SEQ ID NO:1928), FIG. 1930 (SEQ ID NO:1930), FIG. 1932 (SEQ ID NO:1932), FIG. 1934 (SEQ ID NO:1934), FIG. 1936 (SEQ ID NO:1936), FIG. 1938 (SEQ ID NO:1938), FIG. 1940 (SEQ ID NO:1940), FIG. 1942 (SEQ ID NO:1942), FIG. 1944 (SEQ ID NO:1944), FIG. 1946 (SEQ ID NO:1946), FIG. 1948 (SEQ ID NO:1948), FIG. 1950 (SEQ ID NO:1950), FIG. 1952 (SEQ ID NO:1952), FIG. 1954 (SEQ ID NO:1954), FIG. 1956 (SEQ ID NO:1956), FIG. 1958 (SEQ ID NO:1958), FIG. 1960 (SEQ ID NO:1960), FIG. 1962 (SEQ ID NO:1962), FIG. 1964 (SEQ ID NO:1964), FIG. 1966 (SEQ ID NO:1966), FIG. 1968 (SEQ ID NO:1968), FIG. 1970 (SEQ ID NO:1970), FIG. 1972 (SEQ ID NO:1972), FIG. 1974 (SEQ ID NO:1974), FIG. 1976 (SEQ ID NO:1976), FIG. 1978 (SEQ ID NO:1978), FIG. 1980 (SEQ ID NO:1980), FIG. 1982 (SEQ ID NO:1982), FIG. 1984 (SEQ ID NO:1984), FIG. 1986 (SEQ ID NO:1986), FIG. 1988 (SEQ ID NO:1988), FIG. 1990 (SEQ ID NO:1990), FIG. 1992 (SEQ ID NO:1992), FIG. 1994 (SEQ ID NO:1994), FIG. 1996 (SEQ ID NO:1996), FIG. 1998 (SEQ ID NO:1998), FIG. 2000 (SEQ ID NO:2000), FIG. 2002 (SEQ ID NO:2002), FIG. 2004 (SEQ ID NO:2004), FIG. 2006 (SEQ ID NO:2006), FIG. 2008 (SEQ ID NO:2008), FIG. 2010 (SEQ ID NO:2010), FIG. 2012 (SEQ ID NO:2012), FIG. 2014 (SEQ ID NO:2014), FIG. 2016 (SEQ ID NO:2016), FIG. 2018 (SEQ ID NO:2018), FIG. 2020 (SEQ ID NO:2020), FIG. 2022 (SEQ ID NO:2022), FIG. 2024 (SEQ ID NO:2024), FIG. 2026 (SEQ ID NO:2026), FIG. 2028 (SEQ ID NO:2028), FIG. 2030 (SEQ ID NO:2030), FIG. 2032 (SEQ ID NO:2032), FIG. 2034 (SEQ ID NO:2034), FIG. 2036 (SEQ ID NO:2036), FIG. 2038 (SEQ ID NO:2038), FIG. 2040 (SEQ ID NO:2040), FIG. 2042 (SEQ ID NO:2042), FIG. 2044 (SEQ ID NO:2044), FIG. 2046 (SEQ ID NO:2046), FIG. 2048 (SEQ ID NO:2048), FIG. 2050 (SEQ ID NO:2050), FIG. 2052 (SEQ ID NO:2052), FIG. 2054 (SEQ ID NO:2054), FIG. 2056 (SEQ ID NO:2056), FIG. 2058 (SEQ ID NO:2058), FIG. 2060 (SEQ ID NO:2060), FIG. 2062 (SEQ ID NO:2062), FIG. 2064 (SEQ ID NO:2064), FIG. 2066 (SEQ ID NO:2066), FIG. 2068 (SEQ ID NO:2068), FIG. 2070 (SEQ ID NO:2070), FIG. 2072 (SEQ ID NO:2072), FIG. 2074 (SEQ ID NO:2074), FIG. 2076 (SEQ ID NO:2076), FIG. 2078 (SEQ ID NO:2078), FIG. 2080 (SEQ ID NO:2080), FIG. 2082 (SEQ ID NO:2082), FIG. 2084 (SEQ ID NO:2084), FIG. 2086 (SEQ ID NO:2086), FIG. 2088 (SEQ ID NO:2088), FIG. 2090 (SEQ ID NO:2090), FIG. 2092 (SEQ ID NO:2092), FIG. 2094 (SEQ ID NO:2094), FIG. 2096 (SEQ ID NO:2096), FIG. 2098 (SEQ ID NO:2098), FIG. 2100 (SEQ ID NO:2100), FIG. 2102 (SEQ ID NO:2102), FIG. 2104 (SEQ ID NO:2104), FIG. 2106 (SEQ ID NO:2106), FIG. 2108 (SEQ ID NO:2108), FIG. 2110 (SEQ ID NO:2110), FIG. 2112 (SEQ ID NO:2112), FIG. 2114 (SEQ ID NO:2114), FIG. 2116 (SEQ ID NO:2116), FIG. 2118 (SEQ ID NO:2118), FIG. 2120 (SEQ ID NO:2120), FIG. 2122 (SEQ ID NO:2122), FIG. 2124 (SEQ ID NO:2124), FIG. 2126 (SEQ ID NO:2126), FIG. 2128 (SEQ ID NO:2128), FIG. 2130 (SEQ ID NO:2130), FIG. 2132 (SEQ ID NO:2132), FIG. 2134 (SEQ ID NO:2134), FIG. 2136 (SEQ ID NO:2136), FIG. 2138 (SEQ ID NO:2138), FIG. 2140 (SEQ ID NO:2140), FIG. 2142 (SEQ ID NO:2142), FIG. 2144 (SEQ ID NO:2144), FIG. 2146 (SEQ ID NO:2146), FIG. 2148 (SEQ ID NO:2148), FIG. 2150 (SEQ ID NO:2150), FIG. 2152 (SEQ ID NO:2152), FIG. 2154 (SEQ ID NO:2154), FIG. 2156 (SEQ ID NO:2156), FIG. 2158 (SEQ ID NO:2158), FIG. 2160 (SEQ ID NO:2160), FIG. 2163 (SEQ ID NO:2163), FIG. 2165 (SEQ ID NO:2165), FIG. 2167 (SEQ ID NO:2167), FIG. 2170 (SEQ ID NO:2170), FIG. 2172 (SEQ ID NO:2172), FIG. 2174 (SEQ ID NO:2174), FIG. 2176 (SEQ ID NO:2176), FIG. 2178 (SEQ ID NO:2178), FIG. 2180 (SEQ ID NO:2180), FIG. 2182 (SEQ ID NO:2182), FIG. 2184 (SEQ ID NO:2184), FIG. 2186 (SEQ ID NO:2186), FIG. 2188 (SEQ ID NO:2188), FIG. 2191 (SEQ ID NO:2191), FIG. 2193 (SEQ ID NO:2193), FIG. 2195 (SEQ ID NO:2195), FIG. 2197 (SEQ ID NO:2197), FIG. 2199 (SEQ ID NO:2199), FIG. 2201 (SEQ ID NO:2201), FIG. 2204 (SEQ ID NO:2204), FIG. 2207 (SEQ ID NO:2207), FIG. 2209 (SEQ ID NO:2209), FIG. 2212 (SEQ ID NO:2212), FIG. 2214 (SEQ ID NO:2214), FIG. 2216 (SEQ ID NO:2216), FIG. 2218 (SEQ ID NO:2218), FIG. 2220 (SEQ ID NO:2220), FIG. 2222 (SEQ ID NO:2222), FIG. 2224 (SEQ ID NO:2224), FIG. 2226 (SEQ ID NO:2226), FIG. 2228 (SEQ ID NO:2228), FIG. 2230 (SEQ ID NO:2230), FIG. 2232 (SEQ ID NO:2232), FIG. 2234 (SEQ ID NO:2234), FIG. 2236 (SEQ ID NO:2236), FIG. 2238 (SEQ ID NO:2238), FIG. 2240 (SEQ ID NO:2240), FIG. 2242 (SEQ ID NO:2242), FIG. 2244 (SEQ ID NO:2244), FIG. 2246 (SEQ ID NO:2246), FIG. 2248 (SEQ ID NO:2248), FIG. 2250 (SEQ ID NO:2250), FIG. 2252 (SEQ ID NO:2252), FIG. 2254 (SEQ ID NO:2254), FIG. 2256 (SEQ ID NO:2256), FIG. 2258 (SEQ ID NO:2258), FIG. 2260 (SEQ ID NO:2260), FIG. 2262 (SEQ ID NO:2262), FIG. 2264 (SEQ ID NO:2264), FIG. 2266 (SEQ ID NO:2266), FIG. 2268 (SEQ ID NO:2268), FIG. 2270 (SEQ ID NO:2270), FIG. 2272 (SEQ ID NO:2272), FIG. 2274 (SEQ ID NO:2274), FIG. 2276 (SEQ ID NO:2276), FIG. 2278 (SEQ ID NO:2278), FIG. 2280 (SEQ ID NO:2280), FIG. 2282 (SEQ ID NO:2282), FIG. 2284 (SEQ ID NO:2284), FIG. 2286 (SEQ ID NO:2286), FIG. 2288 (SEQ ID NO:2288), FIG. 2290 (SEQ ID NO:2290), FIG. 2292 (SEQ ID NO:2292), FIG. 2294 (SEQ ID NO:2294), FIG. 2296 (SEQ ID NO:2296), FIG. 2298 (SEQ ID NO:2298), FIG. 2301 (SEQ ID NO:2301), FIG. 2303 (SEQ ID NO:2303), FIG. 2305 (SEQ ID NO:2305), FIG. 2307 (SEQ ID NO:2307), FIG. 2310 (SEQ ID NO:2310), FIG. 2312 (SEQ ID NO:2312), FIG. 2314 (SEQ ID NO:2314), FIG. 2316 (SEQ ID NO:2316), FIG. 2319 (SEQ ID NO:2319), FIG. 2321 (SEQ ID NO:2321), FIG. 2323 (SEQ ID NO:2323), FIG. 2325 (SEQ ID NO:2325), FIG. 2327 (SEQ ID NO:2327), FIG. 2329 (SEQ ID NO:2329), FIG. 2331 (SEQ ID NO:2331), FIG. 2333 (SEQ ID NO:2333), FIG. 2335 (SEQ ID NO:2335), FIG. 2337 (SEQ ID NO:2337), FIG. 2339 (SEQ ID NO:2339), FIG. 2341 (SEQ ID NO:2341), FIG. 2343 (SEQ ID NO:2343), FIG. 2345 (SEQ ID NO:2345), FIG. 2347 (SEQ ID NO:2347), FIG. 2349 (SEQ ID NO:2349), FIG. 2351 (SEQ ID NO:2351), FIG. 2353 (SEQ ID NO:2353), FIG. 2355 (SEQ ID NO:2355), FIG. 2357 (SEQ ID NO:2357), FIG. 2359 (SEQ ID NO:2359), FIG. 2361 (SEQ ID NO:2361), FIG. 2363 (SEQ ID NO:2363), FIG. 2365 (SEQ ID NO:2365), FIG. 2367 (SEQ ID NO:2367), FIG. 2369 (SEQ ID NO:2369), FIG. 2371 (SEQ ID NO:2371), FIG. 2373 (SEQ ID NO:2373), FIG. 2375 (SEQ ID NO:2375), FIG. 2378 (SEQ ID NO:2378), FIG. 2380 (SEQ ID NO:2380), FIG. 2383 (SEQ ID NO:2383), FIG. 2386 (SEQ ID NO:2386), FIG. 2388 (SEQ ID NO:2388), FIG. 2391 (SEQ ID NO:2391), FIG. 2393 (SEQ ID NO:2393), FIG. 2396 (SEQ ID NO:2396), FIG. 2398 (SEQ ID NO:2398), FIG. 2402 (SEQ ID NO:2402), FIG. 2404 (SEQ ID NO:2404), FIG. 2408 (SEQ ID NO:2408), FIG. 2410 (SEQ ID NO:2410), FIG. 2412 (SEQ ID NO:2412), FIG. 2415 (SEQ ID NO:2415), FIG. 2418 (SEQ ID NO:2418), FIG. 2420 (SEQ ID NO:2420), FIG. 2422 (SEQ ID NO:2422), FIG. 2424 (SEQ ID NO:2424), FIG. 2426 (SEQ ID NO:2426), FIG. 2430 (SEQ ID NO:2430), FIG. 2432 (SEQ ID NO:2432), FIG. 2434 (SEQ ID NO:2434), FIG. 2436 (SEQ ID NO:2436), FIG. 2438 (SEQ ID NO:2438), FIG. 2440 (SEQ ID NO:2440), or FIG. 2442 (SEQ ID NO:2442) said method comprising contacting cells which normally respond to said polypeptide with a candidate compound, and determining the responsiveness by said cell to said candidate compound.

27. A method of stimulating the immune response in a mammal, said method comprising administering to said mammal an effective amount of a PRO polypeptide of the invention as described in FIG. 2 (SEQ ID NO:2), FIG. 4 (SEQ ID NO:4), FIG. 6 (SEQ ID NO:6), FIG. 8 (SEQ ID NO:8), FIG. 10 (SEQ ID NO:10), FIG. 12 (SEQ ID NO:12), FIG. 14 (SEQ ID NO:14), FIG. 16 (SEQ ID NO:16), FIG. 18 (SEQ ID NO:18), FIG. 20 (SEQ ID NO:20), FIG. 22 (SEQ ID NO:22), FIG. 24 (SEQ ID NO:24), FIG. 26 (SEQ ID NO:26), FIG. 28 (SEQ ID NO:28), FIG. 30 (SEQ ID NO:30), FIG. 32 (SEQ ID NO:32), FIG. 34 (SEQ ID NO:34), FIG. 36 (SEQ ID NO:36), FIG. 38 (SEQ ID NO:38), FIG. 40 (SEQ ID NO:40), FIG. 42 (SEQ ID NO:42), FIG. 44 (SEQ ID NO:44), FIG. 46 (SEQ ID NO:46), FIG. 48 (SEQ ID NO:48), FIG. 50 (SEQ ID NO:50), FIG. 52 (SEQ ID NO:52), FIG. 54 (SEQ ID NO:54), FIG. 56 (SEQ ID NO:56), FIG. 58 (SEQ ID NO:58), FIG. 60 (SEQ ID NO:60), FIG. 62 (SEQ ID NO:62), FIG. 64 (SEQ ID NO:64), FIG. 66 (SEQ ID NO:66), FIG. 68 (SEQ ID NO:68), FIG. 70 (SEQ ID NO:70), FIG. 72 (SEQ ID NO:72), FIG. 74 (SEQ ID NO:74), FIG. 76 (SEQ ID NO:76), FIG. 78 (SEQ ID NO:78), FIG. 80 (SEQ ID NO:80), FIG. 82 (SEQ ID NO:82), FIG. 84 (SEQ ID NO:84), FIG. 86 (SEQ ID NO:86), FIG. 88 (SEQ ID NO:88), FIG. 90 (SEQ ID NO:90), FIG. 92 (SEQ ID NO:92), FIG. 94 (SEQ ID NO:94), FIG. 96 (SEQ ID NO:96), FIG. 98 (SEQ ID NO:98), FIG. 100 (SEQ ID NO:100), FIG. 102 (SEQ ID NO:102), FIG. 104 (SEQ ID NO:104), FIG. 106 (SEQ ID NO:106), FIG. 108 (SEQ ID NO:108), FIG. 110 (SEQ ID NO:110), FIG. 112 (SEQ ID NO:112), FIG. 114 (SEQ ID NO:114), FIG. 116 (SEQ ID NO:116), FIG. 118 (SEQ ID NO:118), FIG. 121 (SEQ ID NO:121), FIG. 123 (SEQ ID NO:123), FIG. 125 (SEQ ID NO:125), FIG. 127 (SEQ ID NO:127), FIG. 129 (SEQ ID NO:129), FIG. 131 (SEQ ID NO:131), FIG. 133 (SEQ ID NO:133), FIG. 135 (SEQ ID NO:135), FIG. 137 (SEQ ID NO:137), FIG. 139 (SEQ ID NO:139), FIG. 141 (SEQ ID NO:141), FIG. 143 (SEQ ID NO:143), FIG. 145 (SEQ ID NO:145), FIG. 147 (SEQ ID NO:147), FIG. 149 (SEQ ID NO:149), FIG. 151 (SEQ ID NO:151), FIG. 153 (SEQ ID NO:153), FIG. 155 (SEQ ID NO:155), FIG. 157 (SEQ ID NO:157), FIG. 159 (SEQ ID NO:159), FIG. 161 (SEQ ID NO:161), FIG. 163 (SEQ ID NO:163), FIG. 165 (SEQ ID NO:165), FIG. 167 (SEQ ID NO:167), FIG. 169 (SEQ ID NO:169), FIG. 171 (SEQ ID NO:171), FIG. 173 (SEQ ID NO:173), FIG. 175 (SEQ ID NO:175), FIG. 177 (SEQ ID NO:177), FIG. 179 (SEQ ID NO:179), FIG. 181 (SEQ ID NO:181), FIG. 183 (SEQ ID NO:183), FIG. 185 (SEQ ID NO:185), FIG. 187 (SEQ ID NO:187), FIG. 189 (SEQ ID NO:189), FIG. 191 (SEQ ID NO:191), FIG. 193 (SEQ ID NO:193), FIG. 195 (SEQ ID NO:195), FIG. 197 (SEQ ID NO:197), FIG. 199 (SEQ ID NO:199), FIG. 201 (SEQ ID NO:201), FIG. 203 (SEQ ID NO:203), FIG. 205 (SEQ ID NO:205), FIG. 207 (SEQ ID NO:207), FIG. 209 (SEQ ID NO:209), FIG. 211 (SEQ ID NO:211), FIG. 213 (SEQ ID NO:213), FIG. 215 (SEQ ID NO:215), FIG. 217 (SEQ ID NO:217), FIG. 219 (SEQ ID NO:219), FIG. 221 (SEQ ID NO:221), FIG. 223 (SEQ ID NO:223), FIG. 225 (SEQ ID NO:225), FIG. 227 (SEQ ID NO:227), FIG. 229 (SEQ ID NO:229), FIG. 231 (SEQ ID NO:231), FIG. 233 (SEQ ID NO:233), FIG. 235 (SEQ ID NO:235), FIG. 237 (SEQ ID NO:237), FIG. 239 (SEQ ID NO:239), FIG. 241 (SEQ ID NO:241), FIG. 243 (SEQ ID NO:243), FIG. 245 (SEQ ID NO:245), FIG. 247 (SEQ ID NO:247), FIG. 249 (SEQ ID NO:249), FIG. 251 (SEQ ID NO:251), FIG. 254 (SEQ ID NO:254), FIG. 256 (SEQ ID NO:256), FIG. 258 (SEQ ID NO:258), FIG. 260 (SEQ ID NO:260), FIG. 262 (SEQ ID NO:262), FIG. 264 (SEQ ID NO:264), FIG. 266 (SEQ ID NO:266), FIG. 268 (SEQ ID NO:268), FIG. 270 (SEQ ID NO:270), FIG. 272 (SEQ ID NO:272), FIG. 274 (SEQ ID NO:274), FIG. 276 (SEQ ID NO:276), FIG. 278 (SEQ ID NO:278), FIG. 280 (SEQ ID NO:280), FIG. 282 (SEQ ID NO:282), FIG. 284 (SEQ ID NO:284), FIG. 286 (SEQ ID NO:286), FIG. 288 (SEQ ID NO:288), FIG. 290 (SEQ ID NO:290), FIG. 292 (SEQ ID NO:292), FIG. 294 (SEQ ID NO:294), FIG. 296 (SEQ ID NO:296), FIG. 298 (SEQ ID NO:298), FIG. 300 (SEQ ID NO:300), FIG. 302 (SEQ ID NO:302), FIG. 304 (SEQ ID NO:304), FIG. 306 (SEQ ID NO:306), FIG. 308 (SEQ ID NO:308), FIG. 310 (SEQ ID NO:310), FIG. 312 (SEQ ID NO:312), FIG. 314 (SEQ ID NO:314), FIG. 316 (SEQ ID NO:316), FIG. 318 (SEQ ID NO:318), FIG. 320 (SEQ ID NO:320), FIG. 322 (SEQ ID NO:322), FIG. 324 (SEQ ID NO:324), FIG. 326 (SEQ ID NO:326), FIG. 328 (SEQ ID NO:328), FIG. 330 (SEQ ID NO:330), FIG. 332 (SEQ ID NO:332), FIG. 334 (SEQ ID NO:334), FIG. 336 (SEQ ID NO:336), FIG. 338 (SEQ ID NO:338), FIG. 340 (SEQ ID NO:340), FIG. 342 (SEQ ID NO:342), FIG. 344 (SEQ ID NO:344), FIG. 346 (SEQ ID NO:346), FIG. 348 (SEQ ID NO:348), FIG. 350 (SEQ ID NO:350), FIG. 352 (SEQ ID NO:352), FIG. 354 (SEQ ID NO:354), FIG. 356 (SEQ ID NO:356), FIG. 358 (SEQ ID NO:358), FIG. 360 (SEQ ID NO:360), FIG. 362 (SEQ ID NO:362), FIG. 364 (SEQ ID NO:364), FIG. 366 (SEQ ID NO:366), FIG. 368 (SEQ ID NO:368), FIG. 370 (SEQ ID NO:370), FIG. 372 (SEQ ID NO:372), FIG. 374 (SEQ ID NO:374), FIG. 376 (SEQ ID NO:376), FIG. 378 (SEQ ID NO:378), FIG. 380 (SEQ ID NO:380), FIG. 382 (SEQ ID NO:382), FIG. 384 (SEQ ID NO:384), FIG. 386 (SEQ ID NO:386), FIG. 388 (SEQ ID NO:388), FIG. 390 (SEQ ID NO:390), FIG. 392 (SEQ ID NO:392), FIG. 394 (SEQ ID NO:394), FIG. 396 (SEQ ID NO:396), FIG. 398 (SEQ ID NO:398), FIG. 400 (SEQ ID NO:400), FIG. 402 (SEQ ID NO:402), FIG. 404 (SEQ ID NO:404), FIG. 406 (SEQ ID NO:406), FIG. 408 (SEQ ID NO:408), FIG. 410 (SEQ ID NO:410), FIG. 412 (SEQ ID NO:412), FIG. 414 (SEQ ID NO:414), FIG. 416 (SEQ ID NO:416), FIG. 418 (SEQ ID NO:418), FIG. 420 (SEQ ID NO:420), FIG. 422 (SEQ ID NO:422), FIG. 424 (SEQ ID NO:424), FIG. 426 (SEQ ID NO:426), FIG. 428 (SEQ ID NO:428), FIG. 430 (SEQ ID NO:430), FIG. 432 (SEQ ID NO:432), FIG. 434 (SEQ ID NO:434), FIG. 436 (SEQ ID NO:436), FIG. 438 (SEQ ID NO:438), FIG. 440 (SEQ ID NO:440), FIG. 442 (SEQ ID NO:442), FIG. 444 (SEQ ID NO:444), FIG. 446 (SEQ ID NO:446), FIG. 448 (SEQ ID NO:448), FIG. 450 (SEQ ID NO:450), FIG. 452 (SEQ ID NO:452), FIG. 454 (SEQ ID NO:454), FIG. 456 (SEQ ID NO:456), FIG. 458 (SEQ ID NO:458), FIG. 460 (SEQ ID NO:460), FIG. 462 (SEQ ID NO:462), FIG. 464 (SEQ ID NO:464), FIG. 466 (SEQ ID NO:466), FIG. 468 (SEQ ID NO:468), FIG. 470 (SEQ ID NO:470), FIG. 472 (SEQ ID NO:472), FIG. 474 (SEQ ID NO:474), FIG. 476 (SEQ ID NO:476), FIG. 478 (SEQ ID NO:478), FIG. 480 (SEQ ID NO:480), FIG. 482 (SEQ ID NO:482), FIG. 484 (SEQ ID NO:484), FIG. 486 (SEQ ID NO:486), FIG. 488 (SEQ ID NO:488), FIG. 490 (SEQ ID NO:490), FIG. 492 (SEQ ID NO:492), FIG. 494 (SEQ ID NO:494), FIG. 496 (SEQ ID NO:496), FIG. 498 (SEQ ID NO:498), FIG. 500 (SEQ ID NO:500), FIG. 502 (SEQ ID NO:502), FIG. 504 (SEQ ID NO:504), FIG. 506 (SEQ ID NO:506), FIG. 508 (SEQ ID NO:508), FIG. 510 (SEQ ID NO:510), FIG. 512 (SEQ ID NO:512), FIG. 514 (SEQ ID NO:514), FIG. 516 (SEQ ID NO:516), FIG. 518 (SEQ ID NO:518), FIG. 520 (SEQ ID NO:520), FIG. 522 (SEQ ID NO:522), FIG. 524 (SEQ ID NO:524), FIG. 526 (SEQ ID NO:526), FIG. 528 (SEQ ID NO:528), FIG. 530 (SEQ ID NO:530), FIG. 532 (SEQ ID NO:532), FIG. 534 (SEQ ID NO:534), FIG. 536 (SEQ ID NO:536), FIG. 538 (SEQ ID NO:538), FIG. 540 (SEQ ID NO:540), FIG. 542 (SEQ ID NO:542), FIG. 544 (SEQ ID NO:544), FIG. 546 (SEQ ID NO:546), FIG. 549 (SEQ ID NO:549), FIG. 551 (SEQ ID NO:551), FIG. 553 (SEQ ID NO:553), FIG. 555 (SEQ ID NO:555), FIG. 557 (SEQ ID NO:557), FIG. 559 (SEQ ID NO:559), FIG. 561 (SEQ ID NO:561), FIG. 563 (SEQ ID NO:563), FIG. 565 (SEQ ID NO:565), FIG. 567 (SEQ ID NO:567), FIG. 569 (SEQ ID NO:569), FIG. 571 (SEQ ID NO:571), FIG. 573 (SEQ ID NO:573), FIG. 575 (SEQ ID NO:575), FIG. 577 (SEQ ID NO:577), FIG. 579 (SEQ ID NO:579), FIG. 581 (SEQ ID NO:581), FIG. 583 (SEQ ID NO:583), FIG. 585 (SEQ ID NO:585), FIG. 587 (SEQ ID NO:587), FIG. 589 (SEQ ID NO:589), FIG. 591 (SEQ ID NO:591), FIG. 593 (SEQ ID NO:593), FIG. 595 (SEQ ID NO:595), FIG. 597 (SEQ ID NO:597), FIG. 599 (SEQ ID NO:599), FIG. 601 (SEQ ID NO:601), FIG. 603 (SEQ ID NO:603), FIG. 605 (SEQ ID NO:605), FIG. 607 (SEQ ID NO:607), FIG. 609 (SEQ ID NO:609), FIG. 611 (SEQ ID NO:611), FIG. 613 (SEQ ID NO:613), FIG. 615 (SEQ ID NO:615), FIG. 617 (SEQ ID NO:617), FIG. 619 (SEQ ID NO:619), FIG. 621 (SEQ ID NO:621), FIG. 623 (SEQ ID NO:623), FIG. 625 (SEQ ID NO:625), FIG. 627 (SEQ ID NO:627), FIG. 629 (SEQ ID NO:629), FIG. 631 (SEQ ID NO:631), FIG. 633 (SEQ ID NO:633), FIG. 635 (SEQ ID NO:635), FIG. 637 (SEQ ID NO:637), FIG. 639 (SEQ ID NO:639), FIG. 641 (SEQ ID NO:641), FIG. 643 (SEQ ID NO:643), FIG. 645 (SEQ ID NO:645), FIG. 647 (SEQ ID NO:647), FIG. 649 (SEQ ID NO:649), FIG. 651 (SEQ ID NO:651), FIG. 653 (SEQ ID NO:653), FIG. 655 (SEQ ID NO:655), FIG. 657 (SEQ ID NO:657), FIG. 659 (SEQ ID NO:659), FIG. 661 (SEQ ID NO:661), FIG. 663 (SEQ ID NO:663), FIG. 665 (SEQ ID NO:665), FIG. 667 (SEQ ID NO:667), FIG. 669 (SEQ ID NO:669), FIG. 671 (SEQ ID NO:671), FIG. 673 (SEQ ID NO:673), FIG. 675 (SEQ ID NO:675), FIG. 677 (SEQ ID NO:377), FIG. 679 (SEQ ID NO:679), FIG. 681 (SEQ ID NO:681), FIG. 683 (SEQ ID NO:683), FIG. 685 (SEQ ID NO:685), FIG. 687 (SEQ ID NO:687), FIG. 689 (SEQ ID NO:689), FIG. 691 (SEQ ID NO:691), FIG. 693 (SEQ ID NO:693), FIG. 695 (SEQ ID NO:695), FIG. 697 (SEQ ID NO:697), FIG. 699 (SEQ ID NO:699), FIG. 701 (SEQ ID NO:701), FIG. 703 (SEQ ID NO:703), FIG. 705 (SEQ ID NO:705), FIG. 707 (SEQ ID NO:707), FIG. 709 (SEQ ID NO:709), FIG. 711 (SEQ ID NO:711), FIG. 713 (SEQ ID NO:713), FIG. 715 (SEQ ID NO:715), FIG. 717 (SEQ ID NO:717), FIG. 719 (SEQ ID NO:719), FIG. 721 (SEQ ID NO:721), FIG. 723 (SEQ ID NO:723), FIG. 725 (SEQ ID NO:725), FIG. 727 (SEQ ID NO:727), FIG. 729 (SEQ ID NO:729), FIG. 731 (SEQ ID NO:731), FIG. 733 (SEQ ID NO:733), FIG. 735 (SEQ ID NO:735), FIG. 737 (SEQ ID NO:737), FIG. 739 (SEQ ID NO:739), FIG. 741 (SEQ ID NO:741), FIG. 743 (SEQ ID NO:743), FIG. 745 (SEQ ID NO:745), FIG. 747 (SEQ ID NO:747), FIG. 749 (SEQ ID NO:749), FIG. 751 (SEQ ID NO:751), FIG. 753 (SEQ ID NO:753), FIG. 755 (SEQ ID NO:755), FIG. 757 (SEQ ID NO:757), FIG. 759 (SEQ ID NO:759), FIG. 761 (SEQ ID NO:761), FIG. 763 (SEQ ID NO:763), FIG. 765 (SEQ ID NO:765), FIG. 767 (SEQ ID NO:767), FIG. 769 (SEQ ID NO:769), FIG. 771 (SEQ ID NO:771), FIG. 773 (SEQ ID NO:773), FIG. 775 (SEQ ID NO:775), FIG. 777 (SEQ ID NO:777), FIG. 779 (SEQ ID NO:779), FIG. 781 (SEQ ID NO:781), FIG. 783 (SEQ ID NO:783), FIG. 785 (SEQ ID NO:785), FIG. 787 (SEQ ID NO:787), FIG. 789 (SEQ ID NO:789), FIG. 791 (SEQ ID NO:791), FIG. 793 (SEQ ID NO:793), FIG. 795 (SEQ ID NO:795), FIG. 797 (SEQ ID NO:797), FIG. 799 (SEQ ID NO:799), FIG. 801 (SEQ ID NO:801), FIG. 803 (SEQ ID NO:803), FIG. 805 (SEQ ID NO:805), FIG. 807 (SEQ ID NO:807), FIG. 809 (SEQ ID NO:809), FIG. 811 (SEQ ID NO:811), FIG. 813 (SEQ ID NO:813), FIG. 815 (SEQ ID NO:815), FIG. 817 (SEQ ID NO:817), FIG. 819 (SEQ ID NO:819), FIG. 821 (SEQ ID NO:821), FIG. 823 (SEQ ID NO:823), FIG. 825 (SEQ ID NO:825), FIG. 827 (SEQ ID NO:827), FIG. 829 (SEQ ID NO:829), FIG. 831 (SEQ ID NO:831), FIG. 833 (SEQ ID NO:833), FIG. 835 (SEQ ID NO:835), FIG. 837 (SEQ ID NO:837), FIG. 839 (SEQ ID NO:839), FIG. 841 (SEQ ID NO:841), FIG. 843 (SEQ ID NO:843), FIG. 845 (SEQ ID NO:845), FIG. 847 (SEQ ID NO:847), FIG. 849 (SEQ ID NO:849), FIG. 851 (SEQ ID NO:851), FIG. 853 (SEQ ID NO:853), FIG. 855 (SEQ ID NO:855), FIG. 858 (SEQ ID NO:858), FIG. 860 (SEQ ID NO:860), FIG. 862 (SEQ ID NO:862), FIG. 864 (SEQ ID NO:864), FIG. 866 (SEQ ID NO:866), FIG. 868 (SEQ ID NO:868), FIG. 870 (SEQ ID NO:870), FIG. 872 (SEQ ID NO:872), FIG. 874 (SEQ ID NO:874), FIG. 876 (SEQ ID NO:876), FIG. 878 (SEQ ID NO:878), FIG. 880 (SEQ ID NO:880), FIG. 882 (SEQ ID NO:982), FIG. 884 (SEQ ID NO:884), FIG. 886 (SEQ ID NO:886), FIG. 888 (SEQ ID NO:888), FIG. 890 (SEQ ID NO:890), FIG. 892 (SEQ ID NO:892), FIG. 894 (SEQ ID NO:894), FIG. 896 (SEQ ID NO:896), FIG. 898 (SEQ ID NO:898), FIG. 900 (SEQ ID NO:900), FIG. 902 (SEQ ID NO:902), FIG. 904 (SEQ ID NO:904), FIG. 906 (SEQ ID NO:906), FIG. 908 (SEQ ID NO:908), FIG. 910 (SEQ ID NO:910), FIG. 912 (SEQ ID NO:912), FIG. 914 (SEQ ID NO:914), FIG. 916 (SEQ ID NO:916), FIG. 918 (SEQ ID NO:918), FIG. 920 (SEQ ID NO:920), FIG. 922 (SEQ ID NO:922), FIG. 924 (SEQ ID NO:924), FIG. 926 (SEQ ID NO:926), FIG. 928 (SEQ ID NO:928), FIG. 930 (SEQ ID NO:930), FIG. 932 (SEQ ID NO:932), FIG. 934 (SEQ ID NO:934), FIG. 936 (SEQ ID NO:936), FIG. 938 (SEQ ID NO:938), FIG. 940 (SEQ ID NO:940), FIG. 943 (SEQ ID NO:943), FIG. 945 (SEQ ID NO:945), FIG. 947 (SEQ ID NO:947), FIG. 949 (SEQ ID NO:949), FIG. 951 (SEQ ID NO:951), FIG. 953 (SEQ ID NO:953), FIG. 955 (SEQ ID NO:955), FIG. 958 (SEQ ID NO:958), FIG. 960 (SEQ ID NO:960), FIG. 963 (SEQ ID NO:963), FIG. 965 (SEQ ID NO:965), FIG. 968 (SEQ ID NO:968), FIG. 970 (SEQ ID NO:970), FIG. 972 (SEQ ID NO:972), FIG. 974 (SEQ ID NO:974), FIG. 976 (SEQ ID NO:976), FIG. 978 (SEQ ID NO:978), FIG. 980 (SEQ ID NO:980), FIG. 983 (SEQ ID NO:983), FIG. 985 (SEQ ID NO:985), FIG. 987 (SEQ ID NO:987), FIG. 990 (SEQ ID NO:990), FIG. 992 (SEQ ID NO:992), FIG. 994 (SEQ ID NO:994), FIG. 996 (SEQ ID NO:996), FIG. 998 (SEQ ID NO:998), FIG. 1000 (SEQ ID NO:1000), FIG. 1002 (SEQ ID NO:1002), FIG. 1007 (SEQ ID NO:1007), FIG. 1009 (SEQ ID NO:1009), FIG. 1011 (SEQ ID NO:1011), FIG. 1013 (SEQ ID NO:1013), FIG. 1015 (SEQ ID NO:1015), FIG. 1017 (SEQ ID NO:1017), FIG. 1019 (SEQ ID NO:1019), FIG. 1021 (SEQ ID NO:1021), FIG. 1023 (SEQ ID NO:1023), FIG. 1025 (SEQ ID NO:1025), FIG. 1030 (SEQ ID NO:1030), FIG. 1033 (SEQ ID NO:1033), FIG. 1035 (SEQ ID NO:1035), FIG. 1037 (SEQ ID NO:1037), FIG. 1039 (SEQ ID NO:1039), FIG. 1041 (SEQ ID NO:1041), FIG. 1043 (SEQ ID NO:1043), FIG. 1046 (SEQ ID NO:1046), FIG. 1048 (SEQ ID NO:1048), FIG. 1050 (SEQ ID NO:1050), FIG. 1053 (SEQ ID NO:1053), FIG. 1055 (SEQ ID NO:1055), FIG. 1057 (SEQ ID NO:1057), FIG. 1060 (SEQ ID NO:1060), FIG. 1062 (SEQ ID NO:1062), FIG. 1064 (SEQ ID NO:1064), FIG. 1066 (SEQ ID NO:1066), FIG. 1068 (SEQ ID NO:1068), FIG. 1070 (SEQ ID NO:1070), FIG. 1072 (SEQ ID NO:1072), FIG. 1074 (SEQ ID NO:1074), FIG. 1076 (SEQ ID NO:1076), FIG. 1078 (SEQ ID NO:1078), FIG. 1080 (SEQ ID NO:1080), FIG. 1082 (SEQ ID NO:1082), FIG. 1084 (SEQ ID NO:1084), FIG. 1086 (SEQ ID NO:1086), FIG. 1088 (SEQ ID NO:1088), FIG. 1090 (SEQ ID NO:1090), FIG. 1092 (SEQ ID NO:1092), FIG. 1094 (SEQ ID NO:1094), FIG. 1096 (SEQ ID NO:1096), FIG. 1098 (SEQ ID NO:1098), FIG. 1101 (SEQ ID NO:1101), FIG. 1103 (SEQ ID NO:1103), FIG. 1105 (SEQ ID NO:1105), FIG. 1107 (SEQ ID NO:1107), FIG. 1109 (SEQ ID NO:1109), FIG. 1111 (SEQ ID NO:1111), FIG. 1113 (SEQ ID NO:1113), FIG. 1116 (SEQ ID NO:1116), FIG. 1118 (SEQ ID NO:1118), FIG. 1120 (SEQ ID NO:1120), FIG. 1123 (SEQ ID NO:1123), FIG. 1125 (SEQ ID NO:1125), FIG. 1128 (SEQ ID NO:1128), FIG. 1130 (SEQ ID NO:1130), FIG. 1132 (SEQ ID NO:1132), FIG. 1134 (SEQ ID NO:1134), FIG. 1136 (SEQ ID NO:1136), FIG. 1138 (SEQ ID NO:1138), FIG. 1142 (SEQ ID NO:1142), FIG. 1144 (SEQ ID NO:1144), FIG. 1146 (SEQ ID NO:1146), FIG. 1148 (SEQ ID NO:1148), FIG. 1150 (SEQ ID NO:1150), FIG. 1152 (SEQ ID NO:1152), FIG. 1154 (SEQ ID NO:1154), FIG. 1156 (SEQ ID NO:1156), FIG. 1158 (SEQ ID NO:1158), FIG. 1160 (SEQ ID NO:1160), FIG. 1162 (SEQ ID NO:1162), FIG. 1164 (SEQ ID NO:1164), FIG. 1166 (SEQ ID NO:1166), FIG. 1168 (SEQ ID NO:1168), FIG. 1170 (SEQ ID NO:1170), FIG. 1172 (SEQ ID NO:1172), FIG. 1174 (SEQ ID NO:1174), FIG. 1176 (SEQ ID NO:1176), FIG. 1178 (SEQ ID NO:1178), FIG. 1180 (SEQ ID NO:1180), FIG. 1182 (SEQ ID NO:1182), FIG. 1184 (SEQ ID NO:1184), FIG. 1186 (SEQ ID NO:1186), FIG. 1188 (SEQ ID NO:1188), FIG. 1190 (SEQ ID NO:1190), FIG. 1192 (SEQ ID NO:1192), FIG. 1194 (SEQ ID NO:1194), FIG. 1196 (SEQ ID NO:1196), FIG. 1198 (SEQ ID NO:1198), FIG. 1200 (SEQ ID NO:1200), FIG. 1202 (SEQ ID NO:1202), FIG. 1204 (SEQ ID NO:1204), FIG. 1206 (SEQ ID NO:1206), FIG. 1208 (SEQ ID NO:1208), FIG. 1210 (SEQ ID NO:1210), FIG. 1212 (SEQ ID NO:1212), FIG. 1214 (SEQ ID NO:1214), FIG. 1216 (SEQ ID NO:1216), FIG. 1218 (SEQ ID NO:1218), FIG. 1220 (SEQ ID NO:1220), FIG. 1222 (SEQ ID NO:1222), FIG. 1224 (SEQ ID NO:1224), FIG. 1226 (SEQ ID NO:1226), FIG. 1228 (SEQ ID NO:1228), FIG. 1230 (SEQ ID NO:1230), FIG. 1232 (SEQ ID NO:1232), FIG. 1234 (SEQ ID NO:1234), FIG. 1236 (SEQ ID NO:1236), FIG. 1238 (SEQ ID NO:1238), FIG. 1240 (SEQ ID NO:1240), FIG. 1242 (SEQ ID NO:1242), FIG. 1244 (SEQ ID NO:1244), FIG. 1246 (SEQ ID NO:1246), FIG. 1248 (SEQ ID NO:1248), FIG. 1250 (SEQ ID NO:1250), FIG. 1252 (SEQ ID NO:1252), FIG. 1254 (SEQ ID NO:1254), FIG. 1256 (SEQ ID NO:1256), FIG. 1258 (SEQ ID NO:1258), FIG. 1260 (SEQ ID NO:1260), FIG. 1262 (SEQ ID NO:1262), FIG. 1264 (SEQ ID NO:1264), FIG. 1266 (SEQ ID NO:1266), FIG. 1268 (SEQ ID NO:1268), FIG. 1270 (SEQ ID NO:1270), FIG. 1272 (SEQ ID NO:1272), FIG. 1274 (SEQ ID NO:1274), FIG. 1276 (SEQ ID NO:1276), FIG. 1278 (SEQ ID NO:1278), FIG. 1280 (SEQ ID NO:1280), FIG. 1282 (SEQ ID NO:1282), FIG. 1284 (SEQ ID NO:1284), FIG. 1286 (SEQ ID NO:1286), FIG. 1288 (SEQ ID NO:1288), FIG. 1290 (SEQ ID NO:1290), FIG. 1292 (SEQ ID NO:1292), FIG. 1294 (SEQ ID NO:1294), FIG. 1296 (SEQ ID NO:1296), FIG. 1298 (SEQ ID NO:1298), FIG. 1300 (SEQ ID NO:1300), FIG. 1302 (SEQ ID NO:1302), FIG. 1304 (SEQ ID NO:1304), FIG. 1306 (SEQ ID NO:1306), FIG. 1308 (SEQ ID NO:1308), FIG. 1310 (SEQ ID NO:1310), FIG. 1312 (SEQ ID NO:1312), FIG. 1314 (SEQ ID NO:1314), FIG. 1316 (SEQ ID NO:1316), FIG. 1318 (SEQ ID NO:1318), FIG. 1320 (SEQ ID NO:1320), FIG. 1322 (SEQ ID NO:1322), FIG. 1324 (SEQ ID NO:1324), FIG. 1326 (SEQ ID NO:1326), FIG. 1328 (SEQ ID NO:1328), FIG. 1330 (SEQ ID NO:1330), FIG. 1332 (SEQ ID NO:1332), FIG. 1334 (SEQ ID NO:1334), FIG. 1336 (SEQ ID NO:1336), FIG. 1338 (SEQ ID NO:1338), FIG. 1340 (SEQ ID NO:1340), FIG. 1342 (SEQ ID NO:1342), FIG. 1344 (SEQ ID NO:1344), FIG. 1346 (SEQ ID NO:1346), FIG. 1348 (SEQ ID NO:1348), FIG. 1350 (SEQ ID NO:1350), FIG. 1352 (SEQ ID NO:1352), FIG. 1354 (SEQ ID NO:1354), FIG. 1356 (SEQ ID NO:1356), FIG. 1358 (SEQ ID NO:1358), FIG. 1361 (SEQ ID NO:1361), FIG. 1363 (SEQ ID NO:1363), FIG. 1365 (SEQ ID NO:1365), FIG. 1367 (SEQ ID NO:1367), FIG. 1369 (SEQ ID NO:1369), FIG. 1371 (SEQ ID NO:1371), FIG. 1373 (SEQ ID NO:1373), FIG. 1375 (SEQ ID NO:1375), FIG. 1377 (SEQ ID NO:1377), FIG. 1379 (SEQ ID NO:1379), FIG. 1381 (SEQ ID NO:1381), FIG. 1383 (SEQ ID NO:1383), FIG. 1385 (SEQ ID NO:1385), FIG. 1387 (SEQ ID NO:1387), FIG. 1389 (SEQ ID NO:1389), FIG. 1391 (SEQ ID NO:1391), FIG. 1393 (SEQ ID NO:1393), FIG. 1395 (SEQ ID NO:1395), FIG. 1397 (SEQ ID NO:1397), FIG. 1399 (SEQ ID NO:1399), FIG. 1401 (SEQ ID NO:1401), FIG. 1403 (SEQ ID NO:1403), FIG. 1405 (SEQ ID NO:1405), FIG. 1407 (SEQ ID NO:1407), FIG. 1409 (SEQ ID NO:1409), FIG. 1411 (SEQ ID NO:1411), FIG. 1413 (SEQ ID NO:1413), FIG. 1415 (SEQ ID NO:1415), FIG. 1417 (SEQ ID NO:1417), FIG. 1419 (SEQ ID NO:1419), FIG. 1421 (SEQ ID NO:1421), FIG. 1423 (SEQ ID NO:1423), FIG. 1425 (SEQ ID NO:1425), FIG. 1427 (SEQ ID NO:1427), FIG. 1429 (SEQ ID NO:1429), FIG. 1431 (SEQ ID NO:1431), FIG. 1433 (SEQ ID NO:1433), FIG. 1435 (SEQ ID NO:1435), FIG. 1437 (SEQ ID NO:1437), FIG. 1439 (SEQ ID NO:1439), FIG. 1441 (SEQ ID NO:1441), FIG. 1443 (SEQ ID NO:1443), FIG. 1445 (SEQ ID NO:1445), FIG. 1447 (SEQ ID NO:1447), FIG. 1449 (SEQ ID NO:1449), FIG. 1451 (SEQ ID NO:1451), FIG. 1453 (SEQ ID NO:1453), FIG. 1455 (SEQ ID NO:1455), FIG. 1457 (SEQ ID NO:1457), FIG. 1459 (SEQ ID NO:1459), FIG. 1461 (SEQ ID NO:1461), FIG. 1463 (SEQ ID NO:1463), FIG. 1465 (SEQ ID NO:1465), FIG. 1467 (SEQ ID NO:1467), FIG. 1469 (SEQ ID NO:1469), FIG. 1471 (SEQ ID NO:1471), FIG. 1473 (SEQ ID NO:1473), FIG. 1475 (SEQ ID NO:1475), FIG. 1477 (SEQ ID NO:1477), FIG. 1479 (SEQ ID NO:1479), FIG. 1481 (SEQ ID NO:1481), FIG. 1483 (SEQ ID NO:1483), FIG. 1485 (SEQ ID NO:1485), FIG. 1487 (SEQ ID NO:1487), FIG. 1489 (SEQ ID NO:1489), FIG. 1491 (SEQ ID NO:1491), FIG. 1493 (SEQ ID NO:1493), FIG. 1495 (SEQ ID NO:1495), FIG. 1497 (SEQ ID NO:1497), FIG. 1499 (SEQ ID NO:1499), FIG. 1501 (SEQ ID NO:1501), FIG. 1503 (SEQ ID NO:1503), FIG. 1505 (SEQ ID NO:1505), FIG. 1507 (SEQ ID NO:1507), FIG. 1509 (SEQ ID NO:1509), FIG. 1511 (SEQ ID NO:1511), FIG. 1513 (SEQ ID NO:1513), FIG. 1515 (SEQ ID NO:1515), FIG. 1517 (SEQ ID NO:1517), FIG. 1519 (SEQ ID NO:1519), FIG. 1521 (SEQ ID NO:1521), FIG. 1523 (SEQ ID NO:1523), FIG. 1525 (SEQ ID NO:1525), FIG. 1527 (SEQ ID NO:1527), FIG. 1529 (SEQ ID NO:1529), FIG. 1531 (SEQ ID NO:1531), FIG. 1533 (SEQ ID NO:1533), FIG. 1535 (SEQ ID NO:1535), FIG. 1537 (SEQ ID NO:1537), FIG. 1539 (SEQ ID NO:1539), FIG. 1541 (SEQ ID NO:1541), FIG. 1543 (SEQ ID NO:1543), FIG. 1545 (SEQ ID NO:1545), FIG. 1547 (SEQ ID NO:1547), FIG. 1549 (SEQ ID NO:1549), FIG. 1551 (SEQ ID NO:1551), FIG. 1553 (SEQ ID NO:1553), FIG. 1555 (SEQ ID NO:1555), FIG. 1557 (SEQ ID NO:1557), FIG. 1559 (SEQ ID NO:1559), FIG. 1561 (SEQ ID NO:1561), FIG. 1563 (SEQ ID NO:1563), FIG. 1565 (SEQ ID NO:1565), FIG. 1567 (SEQ ID NO:1567), FIG. 1569 (SEQ ID NO:1569), FIG. 1571 (SEQ ID NO:1571), FIG. 1573 (SEQ ID NO:1573), FIG. 1575 (SEQ ID NO:1575), FIG. 1578 (SEQ ID NO:1578), FIG. 1581 (SEQ ID NO:1581), FIG. 1583 (SEQ ID NO:1583), FIG. 1585 (SEQ ID NO:1585), FIG. 1587 (SEQ ID NO:1587), FIG. 1589 (SEQ ID NO:1589), FIG. 1592 (SEQ ID NO:1592), FIG. 1594 (SEQ ID NO:1594), FIG. 1596 (SEQ ID NO:1596), FIG. 1598 (SEQ ID NO:1598), FIG. 1600 (SEQ ID NO:1600), FIG. 1602 (SEQ ID NO:1602), FIG. 1604 (SEQ ID NO:1604), FIG. 1606 (SEQ ID NO:1606), FIG. 1609 (SEQ ID NO:1609), FIG. 1611 (SEQ ID NO:1611), FIG. 1614 (SEQ ID NO:1614), FIG. 1617 (SEQ ID NO:1617), FIG. 1619 (SEQ ID NO:1619), FIG. 1621 (SEQ ID NO:1621), FIG. 1623 (SEQ ID NO:1623), FIG. 1626 (SEQ ID NO:1626), FIG. 1628 (SEQ ID NO:1628), FIG. 1630 (SEQ ID NO:1630), FIG. 1632 (SEQ ID NO:1632), FIG. 1636 (SEQ ID NO:1636), FIG. 1639 (SEQ ID NO:1639), FIG. 1644 (SEQ ID NO:1644), FIG. 1646 (SEQ ID NO:1646), FIG. 1648 (SEQ ID NO:1648), FIG. 1650 (SEQ ID NO:1650), FIG. 1652 (SEQ ID NO:1652), FIG. 1654 (SEQ ID NO:1654), FIG. 1656 (SEQ ID NO:1656), FIG. 1658 (SEQ ID NO:1658), FIG. 1660 (SEQ ID NO:1660), FIG. 1662 (SEQ ID NO:1662), FIG. 1664 (SEQ ID NO:1664), FIG. 1666 (SEQ ID NO:1666), FIG. 1668 (SEQ ID NO:1668), FIG. 1670 (SEQ ID NO:1670), FIG. 1672 (SEQ ID NO:1672), FIG. 1674 (SEQ ID NO:1674), FIG. 1676 (SEQ ID NO:1676), FIG. 1678 (SEQ ID NO:1678), FIG. 1680 (SEQ ID NO:1680), FIG. 1683 (SEQ ID NO:1683), FIG. 1685 (SEQ ID NO:1685), FIG. 1687 (SEQ ID NO:1687), FIG. 1689 (SEQ ID NO:1689), FIG. 1692 (SEQ ID NO:1692), FIG. 1694 (SEQ ID NO:1694), FIG. 1696 (SEQ ID NO:1696), FIG. 1698 (SEQ ID NO:1698), FIG. 1701 (SEQ ID NO:1701), FIG. 1703 (SEQ ID NO:1703), FIG. 1705 (SEQ ID NO:1705), FIG. 1707 (SEQ ID NO:1707), FIG. 1709 (SEQ ID NO:1709), FIG. 1711 (SEQ ID NO:1711), FIG. 1713 (SEQ ID NO:1713), FIG. 1715 (SEQ ID NO:1715), FIG. 1717 (SEQ ID NO:1717), FIG. 1719 (SEQ ID NO:1719), FIG. 1721 (SEQ ID NO:1721), FIG. 1723 (SEQ ID NO:1723), FIG. 1725 (SEQ ID NO:1725), FIG. 1727 (SEQ ID NO:1727), FIG. 1729 (SEQ ID NO:1729), FIG. 1732 (SEQ ID NO:1732), FIG. 1734 (SEQ ID NO:1734), FIG. 1736 (SEQ ID NO:1736), FIG. 1738 (SEQ ID NO:1738), FIG. 1741 (SEQ ID NO:1741), FIG. 1743 (SEQ ID NO:1743), FIG. 1745 (SEQ ID NO:1745), FIG. 1747 (SEQ ID NO:1747), FIG. 1749 (SEQ ID NO:1749), FIG. 1751 (SEQ ID NO:1751), FIG. 1753 (SEQ ID NO:1753), FIG. 1755 (SEQ ID NO:1755), FIG. 1757 (SEQ ID NO:1757), FIG. 1760 (SEQ ID NO:1760), FIG. 1762 (SEQ ID NO:1762), FIG. 1764 (SEQ ID NO:1764), FIG. 1766 (SEQ ID NO:1766), FIG. 1769 (SEQ ID NO:1769), FIG. 1771 (SEQ ID NO:1771), FIG. 1773 (SEQ ID NO:1773), FIG. 1775 (SEQ ID NO:1775), FIG. 1777 (SEQ ID NO:1777), FIG. 1779 (SEQ ID NO:1779), FIG. 1781 (SEQ ID NO:1781), FIG. 1783 (SEQ ID NO:1783), FIG. 1785 (SEQ ID NO:1785), FIG. 1787 (SEQ ID NO:1787), FIG. 1789 (SEQ ID NO:1789), FIG. 1792 (SEQ ID NO:1792), FIG. 1795 (SEQ ID NO:1795), FIG. 1797 (SEQ ID NO:1797), FIG. 1799 (SEQ ID NO:1799), FIG. 1802 (SEQ ID NO:1802), FIG. 1805 (SEQ ID NO:1805), FIG. 1807 (SEQ ID NO:1807), FIG. 1809 (SEQ ID NO:1809), FIG. 1811 (SEQ ID NO:1811), FIG. 1813 (SEQ ID NO:1813), FIG. 1815 (SEQ ID NO:1815), FIG. 1817 (SEQ ID NO:1817), FIG. 1819 (SEQ ID NO:1819), FIG. 1821 (SEQ ID NO:1821), FIG. 1823 (SEQ ID NO:1823), FIG. 1825 (SEQ ID NO:1825), FIG. 1827 (SEQ ID NO:1827), FIG. 1829 (SEQ ID NO:1829), FIG. 1831 (SEQ ID NO:1831), FIG. 1833 (SEQ ID NO:1833), FIG. 1836 (SEQ ID NO:1836), FIG. 1838 (SEQ ID NO:1838), FIG. 1841 (SEQ ID NO:1841), FIG. 1843 (SEQ ID NO:1843), FIG. 1845 (SEQ ID NO:1845), FIG. 1847 (SEQ ID NO:1847), FIG. 1849 (SEQ ID NO:1849), FIG. 1851 (SEQ ID NO:1851), FIG. 1854 (SEQ ID NO:1854), FIG. 1856 (SEQ ID NO:1856), FIG. 1858 (SEQ ID NO:1858), FIG. 1860 (SEQ ID NO:1860), FIG. 1863 (SEQ ID NO:1863), FIG. 1865 (SEQ ID NO:1865), FIG. 1867 (SEQ ID NO:1867), FIG. 1869 (SEQ ID NO:1869), FIG. 1871 (SEQ ID NO:1871), FIG. 1873 (SEQ ID NO:1873), FIG. 1875 (SEQ ID NO:1875), FIG. 1877 (SEQ ID NO:1877), FIG. 1881 (SEQ ID NO:1881), FIG. 1883 (SEQ ID NO:1883), FIG. 1885 (SEQ ID NO:1885), FIG. 1887 (SEQ ID NO:1887), FIG. 1889 (SEQ ID NO:1889), FIG. 1891 (SEQ ID NO:1891), FIG. 1893 (SEQ ID NO:1893), FIG. 1895 (SEQ ID NO:1895), FIG. 1897 (SEQ ID NO:1897), FIG. 1899 (SEQ ID NO:1899), FIG. 1901 (SEQ ID NO:1901), FIG. 1903 (SEQ ID NO:1903), FIG. 1905 (SEQ ID NO:1905), FIG. 1908 (SEQ ID NO:1908), FIG. 1910 (SEQ ID NO:1910), FIG. 1913 (SEQ ID NO:1913), FIG. 1915 (SEQ ID NO:1915), FIG. 1917 (SEQ ID NO:1917), FIG. 1919 (SEQ ID NO:1919), FIG. 1922 (SEQ ID NO:1922), FIG. 1924 (SEQ ID NO:1924), FIG. 1926 (SEQ ID NO:1926), FIG. 1928 (SEQ ID NO:1928), FIG. 1930 (SEQ ID NO:1930), FIG. 1932 (SEQ ID NO:1932), FIG. 1934 (SEQ ID NO:1934), FIG. 1936 (SEQ ID NO:1936), FIG. 1938 (SEQ ID NO:1938), FIG. 1940 (SEQ ID NO:1940), FIG. 1942 (SEQ ID NO:1942), FIG. 1944 (SEQ ID NO:1944), FIG. 1946 (SEQ ID NO:1946), FIG. 1948 (SEQ ID NO:1948), FIG. 1950 (SEQ ID NO:1950), FIG. 1952 (SEQ ID NO:1952), FIG. 1954 (SEQ ID NO:1954), FIG. 1956 (SEQ ID NO:1956), FIG. 1958 (SEQ ID NO:1958), FIG. 1960 (SEQ ID NO:1960), FIG. 1962 (SEQ ID NO:1962), FIG. 1964 (SEQ ID NO:1964), FIG. 1966 (SEQ ID NO:1966), FIG. 1968 (SEQ ID NO:1968), FIG. 1970 (SEQ ID NO:1970), FIG. 1972 (SEQ ID NO:1972), FIG. 1974 (SEQ ID NO:1974), FIG. 1976 (SEQ ID NO:1976), FIG. 1978 (SEQ ID NO:1978), FIG. 1980 (SEQ ID NO:1980), FIG. 1982 (SEQ ID NO:1982), FIG. 1984 (SEQ ID NO:1984), FIG. 1986 (SEQ ID NO:1986), FIG. 1988 (SEQ ID NO:1988), FIG. 1990 (SEQ ID NO:1990), FIG. 1992 (SEQ ID NO:1992), FIG. 1994 (SEQ ID NO:1994), FIG. 1996 (SEQ ID NO:1996), FIG. 1998 (SEQ ID NO:1998), FIG. 2000 (SEQ ID NO:2000), FIG. 2002 (SEQ ID NO:2002), FIG. 2004 (SEQ ID NO:2004), FIG. 2006 (SEQ ID NO:2006), FIG. 2008 (SEQ ID NO:2008), FIG. 2010 (SEQ ID NO:2010), FIG. 2012 (SEQ ID NO:2012), FIG. 2014 (SEQ ID NO:2014), FIG. 2016 (SEQ ID NO:2016), FIG. 2018 (SEQ ID NO:2018), FIG. 2020 (SEQ ID NO:2020), FIG. 2022 (SEQ ID NO:2022), FIG. 2024 (SEQ ID NO:2024), FIG. 2026 (SEQ ID NO:2026), FIG. 2028 (SEQ ID NO:2028), FIG. 2030 (SEQ ID NO:2030), FIG. 2032 (SEQ ID NO:2032), FIG. 2034 (SEQ ID NO:2034), FIG. 2036 (SEQ ID NO:2036), FIG. 2038 (SEQ ID NO:2038), FIG. 2040 (SEQ ID NO:2040), FIG. 2042 (SEQ ID NO:2042), FIG. 2044 (SEQ ID NO:2044), FIG. 2046 (SEQ ID NO:2046), FIG. 2048 (SEQ ID NO:2048), FIG. 2050 (SEQ ID NO:2050), FIG. 2052 (SEQ ID NO:2052), FIG. 2054 (SEQ ID NO:2054), FIG. 2056 (SEQ ID NO:2056), FIG. 2058 (SEQ ID NO:2058), FIG. 2060 (SEQ ID NO:2060), FIG. 2062 (SEQ ID NO:2062), FIG. 2064 (SEQ ID NO:2064), FIG. 2066 (SEQ ID NO:2066), FIG. 2068 (SEQ ID NO:2068), FIG. 2070 (SEQ ID NO:2070), FIG. 2072 (SEQ ID NO:2072), FIG. 2074 (SEQ ID NO:2074), FIG. 2076 (SEQ ID NO:2076), FIG. 2078 (SEQ ID NO:2078), FIG. 2080 (SEQ ID NO:2080), FIG. 2082 (SEQ ID NO:2082), FIG. 2084 (SEQ ID NO:2084), FIG. 2086 (SEQ ID NO:2086), FIG. 2088 (SEQ ID NO:2088), FIG. 2090 (SEQ ID NO:2090), FIG. 2092 (SEQ ID NO:2092), FIG. 2094 (SEQ ID NO:2094), FIG. 2096 (SEQ ID NO:2096), FIG. 2098 (SEQ ID NO:2098), FIG. 2100 (SEQ ID NO:2100), FIG. 2102 (SEQ ID NO:2102), FIG. 2104 (SEQ ID NO:2104), FIG. 2106 (SEQ ID NO:2106), FIG. 2108 (SEQ ID NO:2108), FIG. 2110 (SEQ ID NO:2110), FIG. 2112 (SEQ ID NO:2112), FIG. 2114 (SEQ ID NO:2114), FIG. 2116 (SEQ ID NO:2116), FIG. 2118 (SEQ ID NO:2118), FIG. 2120 (SEQ ID NO:2120), FIG. 2122 (SEQ ID NO:2122), FIG. 2124 (SEQ ID NO:2124), FIG. 2126 (SEQ ID NO:2126), FIG. 2128 (SEQ ID NO:2128), FIG. 2130 (SEQ ID NO:2130), FIG. 2132 (SEQ ID NO:2132), FIG. 2134 (SEQ ID NO:2134), FIG. 2136 (SEQ ID NO:2136), FIG. 2138 (SEQ ID NO:2138), FIG. 2140 (SEQ ID NO:2140), FIG. 2142 (SEQ ID NO:2142), FIG. 2144 (SEQ ID NO:2144), FIG. 2146 (SEQ ID NO:2146), FIG. 2148 (SEQ ID NO:2148), FIG. 2150 (SEQ ID NO:2150), FIG. 2152 (SEQ ID NO:2152), FIG. 2154 (SEQ ID NO:2154), FIG. 2156 (SEQ ID NO:2156), FIG. 2158 (SEQ ID NO:2158), FIG. 2160 (SEQ ID NO:2160), FIG. 2163 (SEQ ID NO:2163), FIG. 2165 (SEQ ID NO:2165), FIG. 2167 (SEQ ID NO:2167), FIG. 2170 (SEQ ID NO:2170), FIG. 2172 (SEQ ID NO:2172), FIG. 2174 (SEQ ID NO:2174), FIG. 2176 (SEQ ID NO:2176), FIG. 2178 (SEQ ID NO:2178), FIG. 2180 (SEQ ID NO:2180), FIG. 2182 (SEQ ID NO:2182), FIG. 2184 (SEQ ID NO:2184), FIG. 2186 (SEQ ID NO:2186), FIG. 2188 (SEQ ID NO:2188), FIG. 2191 (SEQ ID NO:2191), FIG. 2193 (SEQ ID NO:2193), FIG. 2195 (SEQ ID NO:2195), FIG. 2197 (SEQ ID NO:2197), FIG. 2199 (SEQ ID NO:2199), FIG. 2201 (SEQ ID NO:2201), FIG. 2204 (SEQ ID NO:2204), FIG. 2207 (SEQ ID NO:2207), FIG. 2209 (SEQ ID NO:2209), FIG. 2212 (SEQ ID NO:2212), FIG. 2214 (SEQ ID NO:2214), FIG. 2216 (SEQ ID NO:2216), FIG. 2218 (SEQ ID NO:2218), FIG. 2220 (SEQ ID NO:2220), FIG. 2222 (SEQ ID NO:2222), FIG. 2224 (SEQ ID NO:2224), FIG. 2226 (SEQ ID NO:2226), FIG. 2228 (SEQ ID NO:2228), FIG. 2230 (SEQ ID NO:2230), FIG. 2232 (SEQ ID NO:2232), FIG. 2234 (SEQ ID NO:2234), FIG. 2236 (SEQ ID NO:2236), FIG. 2238 (SEQ ID NO:2238), FIG. 2240 (SEQ ID NO:2240), FIG. 2242 (SEQ ID NO:2242), FIG. 2244 (SEQ ID NO:2244), FIG. 2246 (SEQ ID NO:2246), FIG. 2248 (SEQ ID NO:2248), FIG. 2250 (SEQ ID NO:2250), FIG. 2252 (SEQ ID NO:2252), FIG. 2254 (SEQ ID NO:2254), FIG. 2256 (SEQ ID NO:2256), FIG. 2258 (SEQ ID NO:2258), FIG. 2260 (SEQ ID NO:2260), FIG. 2262 (SEQ ID NO:2262), FIG. 2264 (SEQ ID NO:2264), FIG. 2266 (SEQ ID NO:2266), FIG. 2268 (SEQ ID NO:2268), FIG. 2270 (SEQ ID NO:2270), FIG. 2272 (SEQ ID NO:2272), FIG. 2274 (SEQ ID NO:2274), FIG. 2276 (SEQ ID NO:2276), FIG. 2278 (SEQ ID NO:2278), FIG. 2280 (SEQ ID NO:2280), FIG. 2282 (SEQ ID NO:2282), FIG. 2284 (SEQ ID NO:2284), FIG. 2286 (SEQ ID NO:2286), FIG. 2288 (SEQ ID NO:2288), FIG. 2290 (SEQ ID NO:2290), FIG. 2292 (SEQ ID NO:2292), FIG. 2294 (SEQ ID NO:2294), FIG. 2296 (SEQ ID NO:2296), FIG. 2298 (SEQ ID NO:2298), FIG. 2301 (SEQ ID NO:2301), FIG. 2303 (SEQ ID NO:2303), FIG. 2305 (SEQ ID NO:2305), FIG. 2307 (SEQ ID NO:2307), FIG. 2310 (SEQ ID NO:2310), FIG. 2312 (SEQ ID NO:2312), FIG. 2314 (SEQ ID NO:2314), FIG. 2316 (SEQ ID NO:2316), FIG. 2319 (SEQ ID NO:2319), FIG. 2321 (SEQ ID NO:2321), FIG. 2323 (SEQ ID NO:2323), FIG. 2325 (SEQ ID NO:2325), FIG. 2327 (SEQ ID NO:2327), FIG. 2329 (SEQ ID NO:2329), FIG. 2331 (SEQ ID NO:2331), FIG. 2333 (SEQ ID NO:2333), FIG. 2335 (SEQ ID NO:2335), FIG. 2337 (SEQ ID NO:2337), FIG. 2339 (SEQ ID NO:2339), FIG. 2341 (SEQ ID NO:2341), FIG. 2343 (SEQ ID NO:2343), FIG. 2345 (SEQ ID NO:2345), FIG. 2347 (SEQ ID NO:2347), FIG. 2349 (SEQ ID NO:2349), FIG. 2351 (SEQ ID NO:2351), FIG. 2353 (SEQ ID NO:2353), FIG. 2355 (SEQ ID NO:2355), FIG. 2357 (SEQ ID NO:2357), FIG. 2359 (SEQ ID NO:2359), FIG. 2361 (SEQ ID NO:2361), FIG. 2363 (SEQ ID NO:2363), FIG. 2365 (SEQ ID NO:2365), FIG. 2367 (SEQ ID NO:2367), FIG. 2369 (SEQ ID NO:2369), FIG. 2371 (SEQ ID NO:2371), FIG. 2373 (SEQ ID NO:2373), FIG. 2375 (SEQ ID NO:2375), FIG. 2378 (SEQ ID NO:2378), FIG. 2380 (SEQ ID NO:2380), FIG. 2383 (SEQ ID NO:2383), FIG. 2386 (SEQ ID NO:2386), FIG. 2388 (SEQ ID NO:2388), FIG. 2391 (SEQ ID NO:2391), FIG. 2393 (SEQ ID NO:2393), FIG. 2396 (SEQ ID NO:2396), FIG. 2398 (SEQ ID NO:2398), FIG. 2402 (SEQ ID NO:2402), FIG. 2404 (SEQ ID NO:2404), FIG. 2408 (SEQ ID NO:2408), FIG. 2410 (SEQ ID NO:2410), FIG. 2412 (SEQ ID NO:2412), FIG. 2415 (SEQ ID NO:2415), FIG. 2418 (SEQ ID NO:2418), FIG. 2420 (SEQ ID NO:2420), FIG. 2422 (SEQ ID NO:2422), FIG. 2424 (SEQ ID NO:2424), FIG. 2426 (SEQ ID NO:2426), FIG. 2430 (SEQ ID NO:2430), FIG. 2432 (SEQ ID NO:2432), FIG. 2434 (SEQ ID NO:2434), FIG. 2436 (SEQ ID NO:2436), FIG. 2438 (SEQ ID NO:2438), FIG. 2440 (SEQ ID NO:2440), or FIG. 2442 (SEQ ID NO:2442) antagonist, wherein said immune response is stimulated.

28. A method of diagnosing an inflammatory immune response in a mammal, said method comprising detecting the level of expression of a gene encoding a PRO polypeptide of the invention as described in FIG. 2 (SEQ ID NO:2), FIG. 4 (SEQ ID NO:4), FIG. 6 (SEQ ID NO:6), FIG. 8 (SEQ ID NO:8), FIG. 10 (SEQ ID NO:10), FIG. 12 (SEQ ID NO:12), FIG. 14 (SEQ ID NO:14), FIG. 16 (SEQ ID NO:16), FIG. 18 (SEQ ID NO:18), FIG. 20 (SEQ ID NO:20), FIG. 22 (SEQ ID NO:22), FIG. 24 (SEQ ID NO:24), FIG. 26 (SEQ ID NO:26), FIG. 28 (SEQ ID NO:28), FIG. 30 (SEQ ID NO:30), FIG. 32 (SEQ ID NO:32), FIG. 34 (SEQ ID NO:34), FIG. 36 (SEQ ID NO:36), FIG. 38 (SEQ ID NO:38), FIG. 40 (SEQ ID NO:40), FIG. 42 (SEQ ID NO:42), FIG. 44 (SEQ ID NO:44), FIG. 46 (SEQ ID NO:46), FIG. 48 (SEQ ID NO:48), FIG. 50 (SEQ ID NO:50), FIG. 52 (SEQ ID NO:52), FIG. 54 (SEQ ID NO:54), FIG. 56 (SEQ ID NO:56), FIG. 58 (SEQ ID NO:58), FIG. 60 (SEQ ID NO:60), FIG. 62 (SEQ ID NO:62), FIG. 64 (SEQ ID NO:64), FIG. 66 (SEQ ID NO:66), FIG. 68 (SEQ ID NO:68), FIG. 70 (SEQ ID NO:70), FIG. 72 (SEQ ID NO:72), FIG. 74 (SEQ ID NO:74), FIG. 76 (SEQ ID NO:76), FIG. 78 (SEQ ID NO:78), FIG. 80 (SEQ ID NO:80), FIG. 82 (SEQ ID NO:82), FIG. 84 (SEQ ID NO:84), FIG. 86 (SEQ ID NO:86), FIG. 88 (SEQ ID NO:88), FIG. 90 (SEQ ID NO:90), FIG. 92 (SEQ ID NO:92), FIG. 94 (SEQ ID NO:94), FIG. 96 (SEQ ID NO:96), FIG. 98 (SEQ ID NO:98), FIG. 100 (SEQ ID NO:100), FIG. 102 (SEQ ID NO:102), FIG. 104 (SEQ ID NO:104), FIG. 106 (SEQ ID NO:106), FIG. 108 (SEQ ID NO:108), FIG. 110 (SEQ ID NO:110), FIG. 112 (SEQ ID NO:112), FIG. 114 (SEQ ID NO:114), FIG. 116 (SEQ ID NO:116), FIG. 118 (SEQ ID NO:118), FIG. 121 (SEQ ID NO:121), FIG. 123 (SEQ ID NO:123), FIG. 125 (SEQ ID NO:125), FIG. 127 (SEQ ID NO:127), FIG. 129 (SEQ ID NO:129), FIG. 131 (SEQ ID NO:131), FIG. 133 (SEQ ID NO:133), FIG. 135 (SEQ ID NO:135), FIG. 137 (SEQ ID NO:137), FIG. 139 (SEQ ID NO:139), FIG. 141 (SEQ ID NO:141), FIG. 143 (SEQ ID NO:143), FIG. 145 (SEQ ID NO:145), FIG. 147 (SEQ ID NO:147), FIG. 149 (SEQ ID NO:149), FIG. 151 (SEQ ID NO:151), FIG. 153 (SEQ ID NO:153), FIG. 155 (SEQ ID NO:155), FIG. 157 (SEQ ID NO:157), FIG. 159 (SEQ ID NO:159), FIG. 161 (SEQ ID NO:161), FIG. 163 (SEQ ID NO:163), FIG. 165 (SEQ ID NO:165), FIG. 167 (SEQ ID NO:167), FIG. 169 (SEQ ID NO:169), FIG. 171 (SEQ ID NO:171), FIG. 173 (SEQ ID NO:173), FIG. 175 (SEQ ID NO:175), FIG. 177 (SEQ ID NO:177), FIG. 179 (SEQ ID NO:179), FIG. 181 (SEQ ID NO:181), FIG. 183 (SEQ ID NO:183), FIG. 185 (SEQ ID NO:185), FIG. 187 (SEQ ID NO:187), FIG. 189 (SEQ ID NO:189), FIG. 191 (SEQ ID NO:191), FIG. 193 (SEQ ID NO:193), FIG. 195 (SEQ ID NO:195), FIG. 197 (SEQ ID NO:197), FIG. 199 (SEQ ID NO:199), FIG. 201 (SEQ ID NO:201), FIG. 203 (SEQ ID NO:203), FIG. 205 (SEQ ID NO:205), FIG. 207 (SEQ ID NO:207), FIG. 209 (SEQ ID NO:209), FIG. 211 (SEQ ID NO:211), FIG. 213 (SEQ ID NO:213), FIG. 215 (SEQ ID NO:215), FIG. 217 (SEQ ID NO:217), FIG. 219 (SEQ ID NO:219), FIG. 221 (SEQ ID NO:221), FIG. 223 (SEQ ID NO:223), FIG. 225 (SEQ ID NO:225), FIG. 227 (SEQ ID NO:227), FIG. 229 (SEQ ID NO:229), FIG. 231 (SEQ ID NO:231), FIG. 233 (SEQ ID NO:233), FIG. 235 (SEQ ID NO:235), FIG. 237 (SEQ ID NO:237), FIG. 239 (SEQ ID NO:239), FIG. 241 (SEQ ID NO:241), FIG. 243 (SEQ ID NO:243), FIG. 245 (SEQ ID NO:245), FIG. 247 (SEQ ID NO:247), FIG. 249 (SEQ ID NO:249), FIG. 251 (SEQ ID NO:251), FIG. 254 (SEQ ID NO:254), FIG. 256 (SEQ ID NO:256), FIG. 258 (SEQ ID NO:258), FIG. 260 (SEQ ID NO:260), FIG. 262 (SEQ ID NO:262), FIG. 264 (SEQ ID NO:264), FIG. 266 (SEQ ID NO:266), FIG. 268 (SEQ ID NO:268), FIG. 270 (SEQ ID NO:270), FIG. 272 (SEQ ID NO:272), FIG. 274 (SEQ ID NO:274), FIG. 276 (SEQ ID NO:276), FIG. 278 (SEQ ID NO:278), FIG. 280 (SEQ ID NO:280), FIG. 282 (SEQ ID NO:282), FIG. 284 (SEQ ID NO:284), FIG. 286 (SEQ ID NO:286), FIG. 288 (SEQ ID NO:288), FIG. 290 (SEQ ID NO:290), FIG. 292 (SEQ ID NO:292), FIG. 294 (SEQ ID NO:294), FIG. 296 (SEQ ID NO:296), FIG. 298 (SEQ ID NO:298), FIG. 300 (SEQ ID NO:300), FIG. 302 (SEQ ID NO:302), FIG. 304 (SEQ ID NO:304), FIG. 306 (SEQ ID NO:306), FIG. 308 (SEQ ID NO:308), FIG. 310 (SEQ ID NO:310), FIG. 312 (SEQ ID NO:312), FIG. 314 (SEQ ID NO:314), FIG. 316 (SEQ ID NO:316), FIG. 318 (SEQ ID NO:318), FIG. 320 (SEQ ID NO:320), FIG. 322 (SEQ ID NO:322), FIG. 324 (SEQ ID NO:324), FIG. 326 (SEQ ID NO:326), FIG. 328 (SEQ ID NO:328), FIG. 330 (SEQ ID NO:330), FIG. 332 (SEQ ID NO:332), FIG. 334 (SEQ ID NO:334), FIG. 336 (SEQ ID NO:336), FIG. 338 (SEQ ID NO:338), FIG. 340 (SEQ ID NO:340), FIG. 342 (SEQ ID NO:342), FIG. 344 (SEQ ID NO:344), FIG. 346 (SEQ ID NO:346), FIG. 348 (SEQ ID NO:348), FIG. 350 (SEQ ID NO:350), FIG. 352 (SEQ ID NO:352), FIG. 354 (SEQ ID NO:354), FIG. 356 (SEQ ID NO:356), FIG. 358 (SEQ ID NO:358), FIG. 360 (SEQ ID NO:360), FIG. 362 (SEQ ID NO:362), FIG. 364 (SEQ ID NO:364), FIG. 366 (SEQ ID NO:366), FIG. 368 (SEQ ID NO:368), FIG. 370 (SEQ ID NO:370), FIG. 372 (SEQ ID NO:372), FIG. 374 (SEQ ID NO:374), FIG. 376 (SEQ ID NO:376), FIG. 378 (SEQ ID NO:378), FIG. 380 (SEQ ID NO:380), FIG. 382 (SEQ ID NO:382), FIG. 384 (SEQ ID NO:384), FIG. 386 (SEQ ID NO:386), FIG. 388 (SEQ ID NO:388), FIG. 390 (SEQ ID NO:390), FIG. 392 (SEQ ID NO:392), FIG. 394 (SEQ ID NO:394), FIG. 396 (SEQ ID NO:396), FIG. 398 (SEQ ID NO:398), FIG. 400 (SEQ ID NO:400), FIG. 402 (SEQ ID NO:402), FIG. 404 (SEQ ID NO:404), FIG. 406 (SEQ ID NO:406), FIG. 408 (SEQ ID NO:408), FIG. 410 (SEQ ID NO:410), FIG. 412 (SEQ ID NO:412), FIG. 414 (SEQ ID NO:414), FIG. 416 (SEQ ID NO:416), FIG. 418 (SEQ ID NO:418), FIG. 420 (SEQ ID NO:420), FIG. 422 (SEQ ID NO:422), FIG. 424 (SEQ ID NO:424), FIG. 426 (SEQ ID NO:426), FIG. 428 (SEQ ID NO:428), FIG. 430 (SEQ ID NO:430), FIG. 432 (SEQ ID NO:432), FIG. 434 (SEQ ID NO:434), FIG. 436 (SEQ ID NO:436), FIG. 438 (SEQ ID NO:438), FIG. 440 (SEQ ID NO:440), FIG. 442 (SEQ ID NO:442), FIG. 444 (SEQ ID NO:444), FIG. 446 (SEQ ID NO:446), FIG. 448 (SEQ ID NO:448), FIG. 450 (SEQ ID NO:450), FIG. 452 (SEQ ID NO:452), FIG. 454 (SEQ ID NO:454), FIG. 456 (SEQ ID NO:456), FIG. 458 (SEQ ID NO:458), FIG. 460 (SEQ ID NO:460), FIG. 462 (SEQ ID NO:462), FIG. 464 (SEQ ID NO:464), FIG. 466 (SEQ ID NO:466), FIG. 468 (SEQ ID NO:468), FIG. 470 (SEQ ID NO:470), FIG. 472 (SEQ ID NO:472), FIG. 474 (SEQ ID NO:474), FIG. 476 (SEQ ID NO:476), FIG. 478 (SEQ ID NO:478), FIG. 480 (SEQ ID NO:480), FIG. 482 (SEQ ID NO:482), FIG. 484 (SEQ ID NO:484), FIG. 486 (SEQ ID NO:486), FIG. 488 (SEQ ID NO:488), FIG. 490 (SEQ ID NO:490), FIG. 492 (SEQ ID NO:492), FIG. 494 (SEQ ID NO:494), FIG. 496 (SEQ ID NO:496), FIG. 498 (SEQ ID NO:498), FIG. 500 (SEQ ID NO:500), FIG. 502 (SEQ ID NO:502), FIG. 504 (SEQ ID NO:504), FIG. 506 (SEQ ID NO:506), FIG. 508 (SEQ ID NO:508), FIG. 510 (SEQ ID NO:510), FIG. 512 (SEQ ID NO:512), FIG. 514 (SEQ ID NO:514), FIG. 516 (SEQ ID NO:516), FIG. 518 (SEQ ID NO:518), FIG. 520 (SEQ ID NO:520), FIG. 522 (SEQ ID NO:522), FIG. 524 (SEQ ID NO:524), FIG. 526 (SEQ ID NO:526), FIG. 528 (SEQ ID NO:528), FIG. 530 (SEQ ID NO:530), FIG. 532 (SEQ ID NO:532), FIG. 534 (SEQ ID NO:534), FIG. 536 (SEQ ID NO:536), FIG. 538 (SEQ ID NO:538), FIG. 540 (SEQ ID NO:540), FIG. 542 (SEQ ID NO:542), FIG. 544 (SEQ ID NO:544), FIG. 546 (SEQ ID NO:546), FIG. 549 (SEQ ID NO:549), FIG. 551 (SEQ ID NO:551), FIG. 553 (SEQ ID NO:553), FIG. 555 (SEQ ID NO:555), FIG. 557 (SEQ ID NO:557), FIG. 559 (SEQ ID NO:559), FIG. 561 (SEQ ID NO:561), FIG. 563 (SEQ ID NO:563), FIG. 565 (SEQ ID NO:565), FIG. 567 (SEQ ID NO:567), FIG. 569 (SEQ ID NO:569), FIG. 571 (SEQ ID NO:571), FIG. 573 (SEQ ID NO:573), FIG. 575 (SEQ ID NO:575), FIG. 577 (SEQ ID NO:577), FIG. 579 (SEQ ID NO:579), FIG. 581 (SEQ ID NO:581), FIG. 583 (SEQ ID NO:583), FIG. 585 (SEQ ID NO:585), FIG. 587 (SEQ ID NO:587), FIG. 589 (SEQ ID NO:589), FIG. 591 (SEQ ID NO:591), FIG. 593 (SEQ ID NO:593), FIG. 595 (SEQ ID NO:595), FIG. 597 (SEQ ID NO:597), FIG. 599 (SEQ ID NO:599), FIG. 601 (SEQ ID NO:601), FIG. 603 (SEQ ID NO:603), FIG. 605 (SEQ ID NO:605), FIG. 607 (SEQ ID NO:607), FIG. 609 (SEQ ID NO:609), FIG. 611 (SEQ ID NO:611), FIG. 613 (SEQ ID NO:613), FIG. 615 (SEQ ID NO:615), FIG. 617 (SEQ ID NO:617), FIG. 619 (SEQ ID NO:619), FIG. 621 (SEQ ID NO:621), FIG. 623 (SEQ ID NO:623), FIG. 625 (SEQ ID NO:625), FIG. 627 (SEQ ID NO:627), FIG. 629 (SEQ ID NO:629), FIG. 631 (SEQ ID NO:631), FIG. 633 (SEQ ID NO:633), FIG. 635 (SEQ ID NO:635), FIG. 637 (SEQ ID NO:637), FIG. 639 (SEQ ID NO:639), FIG. 641 (SEQ ID NO:641), FIG. 643 (SEQ ID NO:643), FIG. 645 (SEQ ID NO:645), FIG. 647 (SEQ ID NO:647), FIG. 649 (SEQ ID NO:649), FIG. 651 (SEQ ID NO:651), FIG. 653 (SEQ ID NO:653), FIG. 655 (SEQ ID NO:655), FIG. 657 (SEQ ID NO:657), FIG. 659 (SEQ ID NO:659), FIG. 661 (SEQ ID NO:661), FIG. 663 (SEQ ID NO:663), FIG. 665 (SEQ ID NO:665), FIG. 667 (SEQ ID NO:667), FIG. 669 (SEQ ID NO:669), FIG. 671 (SEQ ID NO:671), FIG. 673 (SEQ ID NO:673), FIG. 675 (SEQ ID NO:675), FIG. 677 (SEQ ID NO:377), FIG. 679 (SEQ ID NO:679), FIG. 681 (SEQ ID NO:681), FIG. 683 (SEQ ID NO:683), FIG. 685 (SEQ ID NO:685), FIG. 687 (SEQ ID NO:687), FIG. 689 (SEQ ID NO:689), FIG. 691 (SEQ ID NO:691), FIG. 693 (SEQ ID NO:693), FIG. 695 (SEQ ID NO:695), FIG. 697 (SEQ ID NO:697), FIG. 699 (SEQ ID NO:699), FIG. 701 (SEQ ID NO:701), FIG. 703 (SEQ ID NO:703), FIG. 705 (SEQ ID NO:705), FIG. 707 (SEQ ID NO:707), FIG. 709 (SEQ ID NO:709), FIG. 711 (SEQ ID NO:711), FIG. 713 (SEQ ID NO:713), FIG. 715 (SEQ ID NO:715), FIG. 717 (SEQ ID NO:717), FIG. 719 (SEQ ID NO:719), FIG. 721 (SEQ ID NO:721), FIG. 723 (SEQ ID NO:723), FIG. 725 (SEQ ID NO:725), FIG. 727 (SEQ ID NO:727), FIG. 729 (SEQ ID NO:729), FIG. 731 (SEQ ID NO:731), FIG. 733 (SEQ ID NO:733), FIG. 735 (SEQ ID NO:735), FIG. 737 (SEQ ID NO:737), FIG. 739 (SEQ ID NO:739), FIG. 741 (SEQ ID NO:741), FIG. 743 (SEQ ID NO:743), FIG. 745 (SEQ ID NO:745), FIG. 747 (SEQ ID NO:747), FIG. 749 (SEQ ID NO:749), FIG. 751 (SEQ ID NO:751), FIG. 753 (SEQ ID NO:753), FIG. 755 (SEQ ID NO:755), FIG. 757 (SEQ ID NO:757), FIG. 759 (SEQ ID NO:759), FIG. 761 (SEQ ID NO:761), FIG. 763 (SEQ ID NO:763), FIG. 765 (SEQ ID NO:765), FIG. 767 (SEQ ID NO:767); FIG. 769 (SEQ ID NO:769), FIG. 771 (SEQ ID NO:771), FIG. 773 (SEQ ID NO:773), FIG. 775 (SEQ ID NO:775), FIG. 777 (SEQ ID NO:777), FIG. 779 (SEQ ID NO:779), FIG. 781 (SEQ ID NO:781), FIG. 783 (SEQ ID NO:783), FIG. 785 (SEQ ID NO:785), FIG. 787 (SEQ ID NO:787), FIG. 789 (SEQ ID NO:789), FIG. 791 (SEQ ID NO:791), FIG. 793 (SEQ ID NO:793), FIG. 795 (SEQ ID NO:795), FIG. 797 (SEQ ID NO:797), FIG. 799 (SEQ ID NO:799), FIG. 801 (SEQ ID NO:801), FIG. 803 (SEQ ID NO:803), FIG. 805 (SEQ ID NO:805), FIG. 807 (SEQ ID NO:807), FIG. 809 (SEQ ID NO:809), FIG. 811 (SEQ ID NO:811), FIG. 813 (SEQ ID NO:813), FIG. 815 (SEQ ID NO:815), FIG. 817 (SEQ ID NO:817), FIG. 819 (SEQ ID NO:819), FIG. 821 (SEQ ID NO:821), FIG. 823 (SEQ ID NO:823), FIG. 825 (SEQ ID NO:825), FIG. 827 (SEQ ID NO:827), FIG. 829 (SEQ ID NO:829), FIG. 831 (SEQ ID NO:831), FIG. 833 (SEQ ID NO:833), FIG. 835 (SEQ ID NO:835), FIG. 837 (SEQ ID NO:837), FIG. 839 (SEQ ID NO:839), FIG. 841 (SEQ ID NO:841), FIG. 843 (SEQ ID NO:843), FIG. 845 (SEQ ID NO:845), FIG. 847 (SEQ ID NO:847), FIG. 849 (SEQ ID NO:849), FIG. 851 (SEQ ID NO:851), FIG. 853 (SEQ ID NO:853), FIG. 855 (SEQ ID NO:855), FIG. 858 (SEQ ID NO:858), FIG. 860 (SEQ ID NO:860), FIG. 862 (SEQ ID NO:862), FIG. 864 (SEQ ID NO:864), FIG. 866 (SEQ ID NO:866), FIG. 868 (SEQ ID NO:868), FIG. 870 (SEQ ID NO:870), FIG. 872 (SEQ ID NO:872), FIG. 874 (SEQ ID NO:874), FIG. 876 (SEQ ID NO:876), FIG. 878 (SEQ ID NO:878), FIG. 880 (SEQ ID NO:880), FIG. 882 (SEQ ID NO:882), FIG. 884 (SEQ ID NO:884), FIG. 886 (SEQ ID NO:886), FIG. 888 (SEQ ID NO:888), FIG. 890 (SEQ ID NO:890), FIG. 892 (SEQ ID NO:892), FIG. 894 (SEQ ID NO:894), FIG. 896 (SEQ ID NO:896), FIG. 898 (SEQ ID NO:898), FIG. 900 (SEQ ID NO:900), FIG. 902 (SEQ ID NO:902), FIG. 904 (SEQ ID NO:904), FIG. 906 (SEQ ID NO:906), FIG. 908 (SEQ ID NO:908), FIG. 910 (SEQ ID NO:910), FIG. 912 (SEQ ID NO:912), FIG. 914 (SEQ ID NO:914), FIG. 916 (SEQ ID NO:916), FIG. 918 (SEQ ID NO:918), FIG. 920 (SEQ ID NO:920), FIG. 922 (SEQ ID NO:922), FIG. 924 (SEQ ID NO:924), FIG. 926 (SEQ ID NO:926), FIG. 928 (SEQ ID NO:928), FIG. 930 (SEQ ID NO:930), FIG. 932 (SEQ ID NO:932), FIG. 934 (SEQ ID NO:934), FIG. 936 (SEQ ID NO:936), FIG. 938 (SEQ ID NO:938), FIG. 940 (SEQ ID NO:940), FIG. 943 (SEQ ID NO:943), FIG. 945 (SEQ ID NO:945), FIG. 947 (SEQ ID NO:947), FIG. 949 (SEQ ID NO:949), FIG. 951 (SEQ ID NO:951), FIG. 953 (SEQ ID NO:953), FIG. 955 (SEQ ID NO:955), FIG. 958 (SEQ ID NO:958), FIG. 960 (SEQ ID NO:960), FIG. 963 (SEQ ID NO:963), FIG. 965 (SEQ ID NO:965), FIG. 968 (SEQ ID NO:968), FIG. 970 (SEQ ID NO:970), FIG. 972 (SEQ ID NO:972), FIG. 974 (SEQ ID NO:974), FIG. 976 (SEQ ID NO:976), FIG. 978 (SEQ ID NO:978), FIG. 980 (SEQ ID NO:980), FIG. 983 (SEQ ID NO:983), FIG. 985 (SEQ ID NO:985), FIG. 987 (SEQ ID NO:987), FIG. 990 (SEQ ID NO:990), FIG. 992 (SEQ ID NO:992), FIG. 994 (SEQ ID NO:994), FIG. 996 (SEQ ID NO:996), FIG. 998 (SEQ ID NO:998), FIG. 1000 (SEQ ID NO:1000), FIG. 1002 (SEQ ID NO:1002), FIG. 1007 (SEQ ID NO:1007), FIG. 1009 (SEQ ID NO:1009), FIG. 1011 (SEQ ID NO:1011), FIG. 1013 (SEQ ID NO:1013), FIG. 1015 (SEQ ID NO:1015), FIG. 1017 (SEQ ID NO:1017), FIG. 1019 (SEQ ID NO:1019), FIG. 1021 (SEQ ID NO:1021), FIG. 1023 (SEQ ID NO:1023), FIG. 1025 (SEQ ID NO:1025), FIG. 1030 (SEQ ID NO:1030), FIG. 1033 (SEQ ID NO:1033), FIG. 1035 (SEQ ID NO:1035), FIG. 1037 (SEQ ID NO:1037), FIG. 1039 (SEQ ID NO:1039), FIG. 1041 (SEQ ID NO:1041), FIG. 1043 (SEQ ID NO:1043), FIG. 1046 (SEQ ID NO:1046), FIG. 1048 (SEQ ID NO:1048), FIG. 1050 (SEQ ID NO:1050), FIG. 1053 (SEQ ID NO:1053), FIG. 1055 (SEQ ID NO:1055), FIG. 1057 (SEQ ID NO:1057), FIG. 1060 (SEQ ID NO:1060), FIG. 1062 (SEQ ID NO:1062), FIG. 1064 (SEQ ID NO:1064), FIG. 1066 (SEQ ID NO:1066), FIG. 1068 (SEQ ID NO:1068), FIG. 1070 (SEQ ID NO:1070), FIG. 1072 (SEQ ID NO:1072), FIG. 1074 (SEQ ID NO:1074), FIG. 1076 (SEQ ID NO:1076), FIG. 1078 (SEQ ID NO:1078), FIG. 1080 (SEQ ID NO:1080), FIG. 1082 (SEQ ID NO:1082), FIG. 1084 (SEQ ID NO:1084), FIG. 1086 (SEQ ID NO:1086), FIG. 1088 (SEQ ID NO:1088), FIG. 1090 (SEQ ID NO:1090), FIG. 1092 (SEQ ID NO:1092), FIG. 1094 (SEQ ID NO:1094), FIG. 1096 (SEQ ID NO:1096), FIG. 1098 (SEQ ID NO:1098), FIG. 1101 (SEQ ID NO:1101), FIG. 1103 (SEQ ID NO:1103), FIG. 1105 (SEQ ID NO:1105), FIG. 1107 (SEQ ID NO:1107), FIG. 1109 (SEQ ID NO:1109), FIG. 1111 (SEQ ID NO:1111), FIG. 1113 (SEQ ID NO:1113), FIG. 1116 (SEQ ID NO:1116), FIG. 1118 (SEQ ID NO:1118), FIG. 1120 (SEQ ID NO:1120), FIG. 1123 (SEQ ID NO:1123), FIG. 1125 (SEQ ID NO:1125), FIG. 1128 (SEQ ID NO:1128), FIG. 1130 (SEQ ID NO:1130), FIG. 1132 (SEQ ID NO:1132), FIG. 1134 (SEQ ID NO:1134), FIG. 1136 (SEQ ID NO:1136), FIG. 1138 (SEQ ID NO:1138), FIG. 1142 (SEQ ID NO:1142), FIG. 1144 (SEQ ID NO:1144), FIG. 1146 (SEQ ID NO:1146), FIG. 1148 (SEQ ID NO:1148), FIG. 1150 (SEQ ID NO:1150), FIG. 1152 (SEQ ID NO:1152), FIG. 1154 (SEQ ID NO:1154), FIG. 1156 (SEQ ID NO:1156), FIG. 1158 (SEQ ID NO:1158), FIG. 1160 (SEQ ID NO:1160), FIG. 1162 (SEQ ID NO:1162), FIG. 1164 (SEQ ID NO:1164), FIG. 1166 (SEQ ID NO:1166), FIG. 1168 (SEQ ID NO:1168), FIG. 1170 (SEQ ID NO:1170), FIG. 1172 (SEQ ID NO:1172), FIG. 1174 (SEQ ID NO:1174), FIG. 1176 (SEQ ID NO:1176), FIG. 1178 (SEQ ID NO:1178), FIG. 1180 (SEQ ID NO:1180), FIG. 1182 (SEQ ID NO:1182), FIG. 1184 (SEQ ID NO:1184), FIG. 1186 (SEQ ID NO:1186), FIG. 1188 (SEQ ID NO:1188), FIG. 1190 (SEQ ID NO:1190), FIG. 1192 (SEQ ID NO:1192), FIG. 1194 (SEQ ID NO:1194), FIG. 1196 (SEQ ID NO:1196), FIG. 1198 (SEQ ID NO:1198), FIG. 1200 (SEQ ID NO:1200), FIG. 1202 (SEQ ID NO:1202), FIG. 1204 (SEQ ID NO:1204), FIG. 1206 (SEQ ID NO:1206), FIG. 1208 (SEQ ID NO:1208), FIG. 1210 (SEQ ID NO:1210), FIG. 1212 (SEQ ID NO:1212), FIG. 1214 (SEQ ID NO:1214), FIG. 1216 (SEQ ID NO:1216), FIG. 1218 (SEQ ID NO:1218), FIG. 1220 (SEQ ID NO:1220), FIG. 1222 (SEQ ID NO:1222), FIG. 1224 (SEQ ID NO:1224), FIG. 1226 (SEQ ID NO:1226), FIG. 1228 (SEQ ID NO:1228), FIG. 1230 (SEQ ID NO:1230), FIG. 1232 (SEQ ID NO:1232), FIG. 1234 (SEQ ID NO:1234), FIG. 1236 (SEQ ID NO:1236), FIG. 1238 (SEQ ID NO:1238), FIG. 1240 (SEQ ID NO:1240), FIG. 1242 (SEQ ID NO:1242), FIG. 1244 (SEQ ID NO:1244), FIG. 1246 (SEQ ID NO:1246), FIG. 1248 (SEQ ID NO:1248), FIG. 1250 (SEQ ID NO:1250), FIG. 1252 (SEQ ID NO:1252), FIG. 1254 (SEQ ID NO:1254), FIG. 1256 (SEQ ID NO:1256), FIG. 1258 (SEQ ID NO:1258), FIG. 1260 (SEQ ID NO:1260), FIG. 1262 (SEQ ID NO:1262), FIG. 1264 (SEQ ID NO:1264), FIG. 1266 (SEQ ID NO:1266), FIG. 1268 (SEQ ID NO:1268), FIG. 1270 (SEQ ID NO:1270), FIG. 1272 (SEQ ID NO:1272), FIG. 1274 (SEQ ID NO:1274), FIG. 1276 (SEQ ID NO:1276), FIG. 1278 (SEQ ID NO:1278), FIG. 1280 (SEQ ID NO:1280), FIG. 1282 (SEQ ID NO:1282), FIG. 1284 (SEQ ID NO:1284), FIG. 1286 (SEQ ID NO:1286), FIG. 1288 (SEQ ID NO:1288), FIG. 1290 (SEQ ID NO:1290), FIG. 1292 (SEQ ID NO:1292), FIG. 1294 (SEQ ID NO:1294), FIG. 1296 (SEQ ID NO:1296), FIG. 1298 (SEQ ID NO:1298), FIG. 1300 (SEQ ID NO:1300), FIG. 1302 (SEQ ID NO:1302), FIG. 1304 (SEQ ID NO:1304), FIG. 1306 (SEQ ID NO:1306), FIG. 1308 (SEQ ID NO:1308), FIG. 1310 (SEQ ID NO:1310), FIG. 1312 (SEQ ID NO:1312), FIG. 1314 (SEQ ID NO:1314), FIG. 1316 (SEQ ID NO:1316), FIG. 1318 (SEQ ID NO:1318), FIG. 1320 (SEQ ID NO:1320), FIG. 1322 (SEQ ID NO:1322), FIG. 1324 (SEQ ID NO:1324), FIG. 1326 (SEQ ID NO:1326), FIG. 1328 (SEQ ID NO:1328), FIG. 1330 (SEQ ID NO:1330), FIG. 1332 (SEQ ID NO:1332), FIG. 1334 (SEQ ID NO:1334), FIG. 1336 (SEQ ID NO:1336), FIG. 1338 (SEQ ID NO:1338), FIG. 1340 (SEQ ID NO:1340), FIG. 1342 (SEQ ID NO:1342), FIG. 1344 (SEQ ID NO:1344), FIG. 1346 (SEQ ID NO:1346), FIG. 1348 (SEQ ID NO:1348), FIG. 1350 (SEQ ID NO:1350), FIG. 1352 (SEQ ID NO:1352), FIG. 1354 (SEQ ID NO:1354), FIG. 1356 (SEQ ID NO:1356), FIG. 1358 (SEQ ID NO:1358), FIG. 1361 (SEQ ID NO:1361), FIG. 1363 (SEQ ID NO:1363), FIG. 1365 (SEQ ID NO:1365), FIG. 1367 (SEQ ID NO:1367), FIG. 1369 (SEQ ID NO:1369), FIG. 1371 (SEQ ID NO:1371), FIG. 1373 (SEQ ID NO:1373), FIG. 1375 (SEQ ID NO:1375), FIG. 1377 (SEQ ID NO:1377), FIG. 1379 (SEQ ID NO:1379), FIG. 1381 (SEQ ID NO:1381), FIG. 1383 (SEQ ID NO:1383), FIG. 1385 (SEQ ID NO:1385), FIG. 1387 (SEQ ID NO:1387), FIG. 1389 (SEQ ID NO:1389), FIG. 1391 (SEQ ID NO:1391), FIG. 1393 (SEQ ID NO:1393), FIG. 1395 (SEQ ID NO:1395), FIG. 1397 (SEQ ID NO:1397), FIG. 1399 (SEQ ID NO:1399), FIG. 1401 (SEQ ID NO:1401), FIG. 1403 (SEQ ID NO:1403), FIG. 1405 (SEQ ID NO:1405), FIG. 1407 (SEQ ID NO:1407), FIG. 1409 (SEQ ID NO:1409), FIG. 1411 (SEQ ID NO:1411), FIG. 1413 (SEQ ID NO:1413), FIG. 1415 (SEQ ID NO:1415), FIG. 1417 (SEQ ID NO:1417), FIG. 1419 (SEQ ID NO:1419), FIG. 1421 (SEQ ID NO:1421), FIG. 1423 (SEQ ID NO:1423), FIG. 1425 (SEQ ID NO:1425), FIG. 1427 (SEQ ID NO:1427), FIG. 1429 (SEQ ID NO:1429), FIG. 1431 (SEQ ID NO:1431), FIG. 1433 (SEQ ID NO:1433), FIG. 1435 (SEQ ID NO:1435), FIG. 1437 (SEQ ID NO:1437), FIG. 1439 (SEQ ID NO:1439), FIG. 1441 (SEQ ID NO:1441), FIG. 1443 (SEQ ID NO:1443), FIG. 1445 (SEQ ID NO:1445), FIG. 1447 (SEQ ID NO:1447), FIG. 1449 (SEQ ID NO:1449), FIG. 1451 (SEQ ID NO:1451), FIG. 1453 (SEQ ID NO:1453), FIG. 1455 (SEQ ID NO:1455), FIG. 1457 (SEQ ID NO:1457), FIG. 1459 (SEQ ID NO:1459), FIG. 1461 (SEQ ID NO:1461), FIG. 1463 (SEQ ID NO:1463), FIG. 1465 (SEQ ID NO:1465), FIG. 1467 (SEQ ID NO:1467), FIG. 1469 (SEQ ID NO:1469), FIG. 1471 (SEQ ID NO:1471), FIG. 1473 (SEQ ID NO:1473), FIG. 1475 (SEQ ID NO:1475), FIG. 1477 (SEQ ID NO:1477), FIG. 1479 (SEQ ID NO:1479), FIG. 1481 (SEQ ID NO:1481), FIG. 1483 (SEQ ID NO:1483), FIG. 1485 (SEQ ID NO:1485), FIG. 1487 (SEQ ID NO:1487), FIG. 1489 (SEQ ID NO:1489), FIG. 1491 (SEQ ID NO:1491), FIG. 1493 (SEQ ID NO:1493), FIG. 1495 (SEQ ID NO:1495), FIG. 1497 (SEQ ID NO:1497), FIG. 1499 (SEQ ID NO:1499), FIG. 1501 (SEQ ID NO:1501), FIG. 1503 (SEQ ID NO:1503), FIG. 1505 (SEQ ID NO:1505), FIG. 1507 (SEQ ID NO:1507), FIG. 1509 (SEQ ID NO:1509), FIG. 1511 (SEQ ID NO:1511), FIG. 1513 (SEQ ID NO:1513), FIG. 1515 (SEQ ID NO:1515), FIG. 1517 (SEQ ID NO:1517), FIG. 1519 (SEQ ID NO:1519), FIG. 1521 (SEQ ID NO:1521), FIG. 1523 (SEQ ID NO:1523), FIG. 1525 (SEQ ID NO:1525), FIG. 1527 (SEQ ID NO:1527), FIG. 1529 (SEQ ID NO:1529), FIG. 1531 (SEQ ID NO:1531), FIG. 1533 (SEQ ID NO:1533), FIG. 1535 (SEQ ID NO:1535), FIG. 1537 (SEQ ID NO:1537), FIG. 1539 (SEQ ID NO:1539), FIG. 1541 (SEQ ID NO:1541), FIG. 1543 (SEQ ID NO:1543), FIG. 1545 (SEQ ID NO:1545), FIG. 1547 (SEQ ID NO:1547), FIG. 1549 (SEQ ID NO:1549), FIG. 1551 (SEQ ID NO:1551), FIG. 1553 (SEQ ID NO:1553), FIG. 1555 (SEQ ID NO:1555), FIG. 1557 (SEQ ID NO:1557), FIG. 1559 (SEQ ID NO:1559), FIG. 1561 (SEQ ID NO:1561), FIG. 1563 (SEQ ID NO:1563), FIG. 1565 (SEQ ID NO:1565), FIG. 1567 (SEQ ID NO:1567), FIG. 1569 (SEQ ID NO:1569), FIG. 1571 (SEQ ID NO:1571), FIG. 1573 (SEQ ID NO:1573), FIG. 1575 (SEQ ID NO:1575), FIG. 1578 (SEQ ID NO:1578), FIG. 1581 (SEQ ID NO:1581), FIG. 1583 (SEQ ID NO:1583), FIG. 1585 (SEQ ID NO:1585), FIG. 1587 (SEQ ID NO:1587), FIG. 1589 (SEQ ID NO:1589), FIG. 1592 (SEQ ID NO:1592), FIG. 1594 (SEQ ID NO:1594), FIG. 1596 (SEQ ID NO:1596), FIG. 1598 (SEQ ID NO:1598), FIG. 1600 (SEQ ID NO:1600), FIG. 1602 (SEQ ID NO:1602), FIG. 1604 (SEQ ID NO:1604), FIG. 1606 (SEQ ID NO:1606), FIG. 1609 (SEQ ID NO:1609), FIG. 1611 (SEQ ID NO:1611), FIG. 1614 (SEQ ID NO:1614), FIG. 1617 (SEQ ID NO:1617), FIG. 1619 (SEQ ID NO:1619), FIG. 1621 (SEQ ID NO:1621), FIG. 1623 (SEQ ID NO:1623), FIG. 1626 (SEQ ID NO:1626), FIG. 1628 (SEQ ID NO:1628), FIG. 1630 (SEQ ID NO:1630), FIG. 1632 (SEQ ID NO:1632), FIG. 1636 (SEQ ID NO:1636), FIG. 1639 (SEQ ID NO:1639), FIG. 1644 (SEQ ID NO:1644), FIG. 1646 (SEQ ID NO:1646), FIG. 1648 (SEQ ID NO:1648), FIG. 1650 (SEQ ID NO:1650), FIG. 1652 (SEQ ID NO:1652), FIG. 1654 (SEQ ID NO:1654), FIG. 1656 (SEQ ID NO:1656), FIG. 1658 (SEQ ID NO:1658), FIG. 1660 (SEQ ID NO:1660), FIG. 1662 (SEQ ID NO:1662), FIG. 1664 (SEQ ID NO:1664), FIG. 1666 (SEQ ID NO:1666), FIG. 1668 (SEQ ID NO:1668), FIG. 1670 (SEQ ID NO:1670), FIG. 1672 (SEQ ID NO:1672), FIG. 1674 (SEQ ID NO:1674), FIG. 1676 (SEQ ID NO:1676), FIG. 1678 (SEQ ID NO:1678), FIG. 1680 (SEQ ID NO:1680), FIG. 1683 (SEQ ID NO:1683), FIG. 1685 (SEQ ID NO:1685), FIG. 1687 (SEQ ID NO:1687), FIG. 1689 (SEQ ID NO:1689), FIG. 1692 (SEQ ID NO:1692), FIG. 1694 (SEQ ID NO:1694), FIG. 1696 (SEQ ID NO:1696), FIG. 1698 (SEQ ID NO:1698), FIG. 1701 (SEQ ID NO:1701), FIG. 1703 (SEQ ID NO:1703), FIG. 1705 (SEQ ID NO:1705), FIG. 1707 (SEQ ID NO:1707), FIG. 1709 (SEQ ID NO:1709), FIG. 1711 (SEQ ID NO:1711), FIG. 1713 (SEQ ID NO:1713), FIG. 1715 (SEQ ID NO:1715), FIG. 1717 (SEQ ID NO:1717), FIG. 1719 (SEQ ID NO:1719), FIG. 1721 (SEQ ID NO:1721), FIG. 1723 (SEQ ID NO:1723), FIG. 1725 (SEQ ID NO:1725), FIG. 1727 (SEQ ID NO:1727), FIG. 1729 (SEQ ID NO:1729), FIG. 1732 (SEQ ID NO:1732), FIG. 1734 (SEQ ID NO:1734), FIG. 1736 (SEQ ID NO:1736), FIG. 1738 (SEQ ID NO:1738), FIG. 1741 (SEQ ID NO:1741), FIG. 1743 (SEQ ID NO:1743), FIG. 1745 (SEQ ID NO:1745), FIG. 1747 (SEQ ID NO:1747), FIG. 1749 (SEQ ID NO:1749), FIG. 1751 (SEQ ID NO:1751), FIG. 1753 (SEQ ID NO:1753), FIG. 1755 (SEQ ID NO:1755), FIG. 1757 (SEQ ID NO:1757), FIG. 1760 (SEQ ID NO:1760), FIG. 1762 (SEQ ID NO:1762), FIG. 1764 (SEQ ID NO:1764), FIG. 1766 (SEQ ID NO:1766), FIG. 1769 (SEQ ID NO:1769), FIG. 1771 (SEQ ID NO:1771), FIG. 1773 (SEQ ID NO:1773), FIG. 1775 (SEQ ID NO:1775), FIG. 1777 (SEQ ID NO:1777), FIG. 1779 (SEQ ID NO:1779), FIG. 1781 (SEQ ID NO:1781), FIG. 1783 (SEQ ID NO:1783), FIG. 1785 (SEQ ID NO:1785), FIG. 1787 (SEQ ID NO:1787), FIG. 1789 (SEQ ID NO:1789), FIG. 1792 (SEQ ID NO:1792), FIG. 1795 (SEQ ID NO:1795), FIG. 1797 (SEQ ID NO:1797), FIG. 1799 (SEQ ID NO:1799), FIG. 1802 (SEQ ID NO:1802), FIG. 1805 (SEQ ID NO:1805), FIG. 1807 (SEQ ID NO:1807), FIG. 1809 (SEQ ID NO:1809), FIG. 1811 (SEQ ID NO:1811), FIG. 1813 (SEQ ID NO:1813), FIG. 1815 (SEQ ID NO:1815), FIG. 1817 (SEQ ID NO:1817), FIG. 1819 (SEQ ID NO:1819), FIG. 1821 (SEQ ID NO:1821), FIG. 1823 (SEQ ID NO:1823), FIG. 1825 (SEQ ID NO:1825), FIG. 1827 (SEQ ID NO:1827), FIG. 1829 (SEQ ID NO:1829), FIG. 1831 (SEQ ID NO:1831), FIG. 1833 (SEQ ID NO:1833), FIG. 1836 (SEQ ID NO:1836), FIG. 1838 (SEQ ID NO:1838), FIG. 1841 (SEQ ID NO:1841), FIG. 1843 (SEQ ID NO:1843), FIG. 1845 (SEQ ID NO:1845), FIG. 1847 (SEQ ID NO:1847), FIG. 1849 (SEQ ID NO:1849), FIG. 1851 (SEQ ID NO:1851), FIG. 1854 (SEQ ID NO:1854), FIG. 1856 (SEQ ID NO:1856), FIG. 1858 (SEQ ID NO:1858), FIG. 1860 (SEQ ID NO:1860), FIG. 1863 (SEQ ID NO:1863), FIG. 1865 (SEQ ID NO:1865), FIG. 1867 (SEQ ID NO:1867), FIG. 1869 (SEQ ID NO:1869), FIG. 1871 (SEQ ID NO:1871), FIG. 1873 (SEQ ID NO:1873), FIG. 1875 (SEQ ID NO:1875), FIG. 1877 (SEQ ID NO:1877), FIG. 1881 (SEQ ID NO:1881), FIG. 1883 (SEQ ID NO:1883), FIG. 1885 (SEQ ID NO:1885), FIG. 1887 (SEQ ID NO:1887), FIG. 1889 (SEQ ID NO:1889), FIG. 1891 (SEQ ID NO:1891), FIG. 1893 (SEQ ID NO:1893), FIG. 1895 (SEQ ID NO:1895), FIG. 1897 (SEQ ID NO:1897), FIG. 1899 (SEQ ID NO:1899), FIG. 1901 (SEQ ID NO:1901), FIG. 1903 (SEQ ID NO:1903), FIG. 1905 (SEQ ID NO:1905), FIG. 1908 (SEQ ID NO:1908), FIG. 1910 (SEQ ID NO:1910), FIG. 1913 (SEQ ID NO:1913), FIG. 1915 (SEQ ID NO:1915), FIG. 1917 (SEQ ID NO:1917), FIG. 1919 (SEQ ID NO:1919), FIG. 1922 (SEQ ID NO:1922), FIG. 1924 (SEQ ID NO:1924), FIG. 1926 (SEQ ID NO:1926), FIG. 1928 (SEQ ID NO:1928), FIG. 1930 (SEQ ID NO:1930), FIG. 1932 (SEQ ID NO:1932), FIG. 1934 (SEQ ID NO:1934), FIG. 1936 (SEQ ID NO:1936), FIG. 1938 (SEQ ID NO:1938), FIG. 1940 (SEQ ID NO:1940), FIG. 1942 (SEQ ID NO:1942), FIG. 1944 (SEQ ID NO:1944), FIG. 1946 (SEQ ID NO:1946), FIG. 1948 (SEQ ID NO:1948), FIG. 1950 (SEQ ID NO:1950), FIG. 1952 (SEQ ID NO:1952), FIG. 1954 (SEQ ID NO:1954), FIG. 1956 (SEQ ID NO:1956), FIG. 1958 (SEQ ID NO:1958), FIG. 1960 (SEQ ID NO:1960), FIG. 1962 (SEQ ID NO:1962), FIG. 1964 (SEQ ID NO:1964), FIG. 1966 (SEQ ID NO:1966), FIG. 1968 (SEQ ID NO:1968), FIG. 1970 (SEQ ID NO:1970), FIG. 1972 (SEQ ID NO:1972), FIG. 1974 (SEQ ID NO:1974), FIG. 1976 (SEQ ID NO:1976), FIG. 1978 (SEQ ID NO:1978), FIG. 1980 (SEQ ID NO:1980), FIG. 1982 (SEQ ID NO:1982), FIG. 1984 (SEQ ID NO:1984), FIG. 1986 (SEQ ID NO:1986), FIG. 1988 (SEQ ID NO:1988), FIG. 1990 (SEQ ID NO:1990), FIG. 1992 (SEQ ID NO:1992), FIG. 1994 (SEQ ID NO:1994), FIG. 1996 (SEQ ID NO:1996), FIG. 1998 (SEQ ID NO:1998), FIG. 2000 (SEQ ID NO:2000), FIG. 2002 (SEQ ID NO:2002), FIG. 2004 (SEQ ID NO:2004), FIG. 2006 (SEQ ID NO:2006), FIG. 2008 (SEQ ID NO:2008), FIG. 2010 (SEQ ID NO:2010), FIG. 2012 (SEQ ID NO:2012), FIG. 2014 (SEQ ID NO:2014), FIG. 2016 (SEQ ID NO:2016), FIG. 2018 (SEQ ID NO:2018), FIG. 2020 (SEQ ID NO:2020), FIG. 2022 (SEQ ID NO:2022), FIG. 2024 (SEQ ID NO:2024), FIG. 2026 (SEQ ID NO:2026), FIG. 2028 (SEQ ID NO:2028), FIG. 2030 (SEQ ID NO:2030), FIG. 2032 (SEQ ID NO:2032), FIG. 2034 (SEQ ID NO:2034), FIG. 2036 (SEQ ID NO:2036), FIG. 2038 (SEQ ID NO:2038), FIG. 2040 (SEQ ID NO:2040), FIG. 2042 (SEQ ID NO:2042), FIG. 2044 (SEQ ID NO:2044), FIG. 2046 (SEQ ID NO:2046), FIG. 2048 (SEQ ID NO:2048), FIG. 2050 (SEQ ID NO:2050), FIG. 2052 (SEQ ID NO:2052), FIG. 2054 (SEQ ID NO:2054), FIG. 2056 (SEQ ID NO:2056), FIG. 2058 (SEQ ID NO:2058), FIG. 2060 (SEQ ID NO:2060), FIG. 2062 (SEQ ID NO:2062), FIG. 2064 (SEQ ID NO:2064), FIG. 2066 (SEQ ID NO:2066), FIG. 2068 (SEQ ID NO:2068), FIG. 2070 (SEQ ID NO:2070), FIG. 2072 (SEQ ID NO:2072), FIG. 2074 (SEQ ID NO:2074), FIG. 2076 (SEQ ID NO:2076), FIG. 2078 (SEQ ID NO:2078), FIG. 2080 (SEQ ID NO:2080), FIG. 2082 (SEQ ID NO:2082), FIG. 2084 (SEQ ID NO:2084), FIG. 2086 (SEQ ID NO:2086), FIG. 2088 (SEQ ID NO:2088), FIG. 2090 (SEQ ID NO:2090), FIG. 2092 (SEQ ID NO:2092), FIG. 2094 (SEQ ID NO:2094), FIG. 2096 (SEQ ID NO:2096), FIG. 2098 (SEQ ID NO:2098), FIG. 2100 (SEQ ID NO:2100), FIG. 2102 (SEQ ID NO:2102), FIG. 2104 (SEQ ID NO:2104), FIG. 2106 (SEQ ID NO:2106), FIG. 2108 (SEQ ID NO:2108), FIG. 2110 (SEQ ID NO:2110), FIG. 2112 (SEQ ID NO:2112), FIG. 2114 (SEQ ID NO:2114), FIG. 2116 (SEQ ID NO:2116), FIG. 2118 (SEQ ID NO:2118), FIG. 2120 (SEQ ID NO:2120), FIG. 2122 (SEQ ID NO:2122), FIG. 2124 (SEQ ID NO:2124), FIG. 2126 (SEQ ID NO:2126), FIG. 2128 (SEQ ID NO:2128), FIG. 2130 (SEQ ID NO:2130), FIG. 2132 (SEQ ID NO:2132), FIG. 2134 (SEQ ID NO:2134), FIG. 2136 (SEQ ID NO:2136), FIG. 2138 (SEQ ID NO:2138), FIG. 2140 (SEQ ID NO:2140), FIG. 2142 (SEQ ID NO:2142), FIG. 2144 (SEQ ID NO:2144), FIG. 2146 (SEQ ID NO:2146), FIG. 2148 (SEQ ID NO:2148), FIG. 2150 (SEQ ID NO:2150), FIG. 2152 (SEQ ID NO:2152), FIG. 2154 (SEQ ID NO:2154), FIG. 2156 (SEQ ID NO:2156), FIG. 2158 (SEQ ID NO:2158), FIG. 2160 (SEQ ID NO:2160), FIG. 2163 (SEQ ID NO:2163), FIG. 2165 (SEQ ID NO:2165), FIG. 2167 (SEQ ID NO:2167), FIG. 2170 (SEQ ID NO:2170), FIG. 2172 (SEQ ID NO:2172), FIG. 2174 (SEQ ID NO:2174), FIG. 2176 (SEQ ID NO:2176), FIG. 2178 (SEQ ID NO:2178), FIG. 2180 (SEQ ID NO:2180), FIG. 2182 (SEQ ID NO:2182), FIG. 2184 (SEQ ID NO:2184), FIG. 2186 (SEQ ID NO:2186), FIG. 2188 (SEQ ID NO:2188), FIG. 2191 (SEQ ID NO:2191), FIG. 2193 (SEQ ID NO:2193), FIG. 2195 (SEQ ID NO:2195), FIG. 2197 (SEQ ID NO:2197), FIG. 2199 (SEQ ID NO:2199), FIG. 2201 (SEQ ID NO:2201), FIG. 2204 (SEQ ID NO:2204), FIG. 2207 (SEQ ID NO:2207), FIG. 2209 (SEQ ID NO:2209), FIG. 2212 (SEQ ID NO:2212), FIG. 2214 (SEQ ID NO:2214), FIG. 2216 (SEQ ID NO:2216), FIG. 2218 (SEQ ID NO:2218), FIG. 2220 (SEQ ID NO:2220), FIG. 2222 (SEQ ID NO:2222), FIG. 2224 (SEQ ID NO:2224), FIG. 2226 (SEQ ID NO:2226), FIG. 2228 (SEQ ID NO:2228), FIG. 2230 (SEQ ID NO:2230), FIG. 2232 (SEQ ID NO:2232), FIG. 2234 (SEQ ID NO:2234), FIG. 2236 (SEQ ID NO:2236), FIG. 2238 (SEQ ID NO:2238), FIG. 2240 (SEQ ID NO:2240), FIG. 2242 (SEQ ID NO:2242), FIG. 2244 (SEQ ID NO:2244), FIG. 2246 (SEQ ID NO:2246), FIG. 2248 (SEQ ID NO:2248), FIG. 2250 (SEQ ID NO:2250), FIG. 2252 (SEQ ID NO:2252), FIG. 2254 (SEQ ID NO:2254), FIG. 2256 (SEQ ID NO:2256), FIG. 2258 (SEQ ID NO:2258), FIG. 2260 (SEQ ID NO:2260), FIG. 2262 (SEQ ID NO:2262), FIG. 2264 (SEQ ID NO:2264), FIG. 2266 (SEQ ID NO:2266), FIG. 2268 (SEQ ID NO:2268), FIG. 2270 (SEQ ID NO:2270), FIG. 2272 (SEQ ID NO:2272), FIG. 2274 (SEQ ID NO:2274), FIG. 2276 (SEQ ID NO:2276), FIG. 2278 (SEQ ID NO:2278), FIG. 2280 (SEQ ID NO:2280), FIG. 2282 (SEQ ID NO:2282), FIG. 2284 (SEQ ID NO:2284), FIG. 2286 (SEQ ID NO:2286), FIG. 2288 (SEQ ID NO:2288), FIG. 2290 (SEQ ID NO:2290), FIG. 2292 (SEQ ID NO:2292), FIG. 2294 (SEQ ID NO:2294), FIG. 2296 (SEQ ID NO:2296), FIG. 2298 (SEQ ID NO:2298), FIG. 2301 (SEQ ID NO:2301), FIG. 2303 (SEQ ID NO:2303), FIG. 2305 (SEQ ID NO:2305), FIG. 2307 (SEQ ID NO:2307), FIG. 2310 (SEQ ID NO:2310), FIG. 2312 (SEQ ID NO:2312), FIG. 2314 (SEQ ID NO:2314), FIG. 2316 (SEQ ID NO:2316), FIG. 2319 (SEQ ID NO:2319), FIG. 2321 (SEQ ID NO:2321), FIG. 2323 (SEQ ID NO:2323), FIG. 2325 (SEQ ID NO:2325), FIG. 2327 (SEQ ID NO:2327), FIG. 2329 (SEQ ID NO:2329), FIG. 2331 (SEQ ID NO:2331), FIG. 2333 (SEQ ID NO:2333), FIG. 2335 (SEQ ID NO:2335), FIG. 2337 (SEQ ID NO:2337), FIG. 2339 (SEQ ID NO:2339), FIG. 2341 (SEQ ID NO:2341), FIG. 2343 (SEQ ID NO:2343), FIG. 2345 (SEQ ID NO:2345), FIG. 2347 (SEQ ID NO:2347), FIG. 2349 (SEQ ID NO:2349), FIG. 2351 (SEQ ID NO:2351), FIG. 2353 (SEQ ID NO:2353), FIG. 2355 (SEQ ID NO:2355), FIG. 2357 (SEQ ID NO:2357), FIG. 2359 (SEQ ID NO:2359), FIG. 2361 (SEQ ID NO:2361), FIG. 2363 (SEQ ID NO:2363), FIG. 2365 (SEQ ID NO:2365), FIG. 2367 (SEQ ID NO:2367), FIG. 2369 (SEQ ID NO:2369), FIG. 2371 (SEQ ID NO:2371), FIG. 2373 (SEQ ID NO:2373), FIG. 2375 (SEQ ID NO:2375), FIG. 2378 (SEQ ID NO:2378), FIG. 2380 (SEQ ID NO:2380), FIG. 2383 (SEQ ID NO:2383), FIG. 2386 (SEQ ID NO:2386), FIG. 2388 (SEQ ID NO:2388), FIG. 2391 (SEQ ID NO:2391), FIG. 2393 (SEQ ID NO:2393), FIG. 2396 (SEQ ID NO:2396), FIG. 2398 (SEQ ID NO:2398), FIG. 2402 (SEQ ID NO:2402), FIG. 2404 (SEQ ID NO:2404), FIG. 2408 (SEQ ID NO:2408), FIG. 2410 (SEQ ID NO:2410), FIG. 2412 (SEQ ID NO:2412), FIG. 2415 (SEQ ID NO:2415), FIG. 2418 (SEQ ID NO:2418), FIG. 2420 (SEQ ID NO:2420), FIG. 2422 (SEQ ID NO:2422), FIG. 2424 (SEQ ID NO:2424), FIG. 2426 (SEQ ID NO:2426), FIG. 2430 (SEQ ID NO:2430), FIG. 2432 (SEQ ID NO:2432), FIG. 2434 (SEQ ID NO:2434), FIG. 2436 (SEQ ID NO:2436), FIG. 2438 (SEQ ID NO:2438), FIG. 2440 (SEQ ID NO:2440), or FIG. 2442 (SEQ ID NO:2442) (a) in a test sample of tissue cells obtained from the mammal, and (b) in a control sample of known normal tissue cells of the same cell type, wherein a higher or lower level of expression of said gene in the test sample as compared to the control sample is indicative of the presence of an inflammatory immune response in the mammal from which the test tissue cells were obtained.
